United States Patent Application Publication US 2024/0301345 A1 - sequence listing, part 4

SEQ ID NO: 362 - DNA, 23110 bp, Unknown
  R42_10m  MAG No. k141_24530
ctctcagatcgggcctggtgaacccggcacgctgattctgaccaccaccggcagcagcattccgttctcggagatgtcgcacggctgggcagtgcccaccgccacggatatcgcgttctcactggccgtgctcgccctgtttgccaaggccctgcccggttcgatccgcgcgttcctgatgacgcttgccaccgtcgatgacctgctggccattattctgatcgccgtattcttctcctcgatcaacgcctggtattggttcatcggcatcgtcgtgtgcgccgtcatctgggcatacctcgtacgactgaaaaaagtgccgtggattgcggtcggcatcgtcggcgtcctcgcttggatcatgatgttcgaggcaggcgtgcatcccacactggccggcgtgctggttggcctgctgactccctcccgtgaaatgcacggcgaactttcaccgcgtgccgaacgctatgccaacaagcttcagccattctccgcactgctggccctgcccatcttcgccctgttcgccaccggcgtgcacttcgagtcggtgagcccgctgttgctggcttcgccgttggttatcgcactgattgtggctttggtggtcggcaaacctttgggcatcatcaccaccgcatggctggccacgcatgtgggcgggctcaagatggccaaggggctgcgcgtgcgcgacatgattcccgctgccgtcgcctgcggcattggcttcactgtgtccttcctcatcgcctcgctggcgtacaagaatgcggaactttccgctgaggcgcgcttcggcgtgctggtggcctccctgatcgccgctgcgatttccggtgtgctgctgagccgtcagtccaagagattcgagaaggccgcagccgcagcagcggccgatgcggaggatgacgaatcgattgatggcgatggcgctggtcagaccggtcgcaccacaaagtccaccacgcccacggaacaccccggcaccctcgccgacggcaccgccagtgtggagattgacttccgccactgatggcttagacgatccctactccattgttggccttgtttcgtgaaaaccgtacgctgaggcgcgctcaccgtacgttcttcacgagatgaggccttatttcgtgaaaaccgtacgctgagtgtcactcaccgtacgttcttcacgaagtcaaggatgatttcgcggaaaacgtatgcagagcttcaggcgctagaatgcgaagagtcgatagcaccgtacaggaggatattggatggcaaagaagcagaagaaatccaagaagaacgacggcaaaaaggccgctgaagcaaagaatctagccgaggccgcatccaagtccacagtcgtggacgatatggaaccattggaagccacagccgcgaatgatgcggcaacgttggaggccgagacggcaaccgaggctgccgcaacgccggtgaacccggtcgacttggaggacgtctcgccgctgggcgacacctatcatcgcggcccggtgattctacgcggccagatgattccctcggacaataccaccgccaatctgctgaaacccgaccaggacaccgactggctgcacatggacccatggcgtgtgctgcgcatccaatcggaattcgtggacggtttcggggcgctcgccgagctcggacctgcggtctctattttcggctccgcacgcacccagcgcaccgaatcgatctacaaggcggcccggcgcatgggtagccagatagccaagcgcaacatcgccgtcatcaccggcggtggtcccggcatcatggaagccgcgaataggggagcggcactggctggcggcaaatccgtgggactcggcatcgaattgccgcacgagcaggggttgaaccagtgggtgaacctcggcatgagcttccggtacttctttgtgcggaaaaccatgttcgtcaagtattcctccggcgtgatcgtgtgcccgggcggcttcggcacactggatgagatgttcgagctgctgaccttggtccagacccacaaggtggcgaatattccggtggtgctctacggcaaggaatactggcaggggctctttgactggctcaacggtccggtggccgagcacggcatgatttcggcaatcgacccgaaactggtcaccgtgaccgatgacgccgacgaagccgtggaggtggccgtcagcgcaattgtgaggtaagcgagatagagtggctcccctctccgaggggagccaagggcagagttactttttgtaggcgatgagcaggcctgtgccgtcaggggtaagcgtggactcgaaaccttcgtcatcttcgacggtggtgagcagctcacgcatggcgatggccttgtcgctgcggtcggccggattaatcatgccgccctgaccgtcctccaacgccagcacatcggtgaacacgatcacgccgtgcgcgcgcagcagacgggaggcctgggcgaacgtggcggcatagttctcggcgtcgcccgccaccacgatcagatcgtaatcattggcgttgaggcgcggcagaaacacgctggccggggcgttcaccgcacgcaacgtggtgtcggtctcatcctgcagttcggtgaacgccttgcgaatcagcgcgatgccctgagcggtggaatcgaccgcagtcagcaggcccttgttatccagcgcatgggcgagctgcaaggtctccaccagcgagccggtgcctacggcgatgaccgaagcggcgccggtgatgcgcaccagcatgcccagcagacgggcctgcgcggccgaaccctgcaactggccggacttgtcggcggccgtacgggcgtcggtcaacgcattggattcacgttcgcgcgcgtgttcctcggtgaattcccatgccttggtgaggttggtgtactgcgttctgtccataattcgttcctttatgtcttctctcgtgcgggcacccggtggatgtatcgactacgtgttgcagcgattgccgtagctggtcgtggcgcggcttagcgctcgcggaccttggccacgatctgccacatctcctcgcccacatcgatgccgcgcgggcagtggcgggagcaggcgcgcacggactggcaggcggccacgccgtcggcggtgtcgatggcgtccatacgctccatggccttggtgtcgcgcgaatcgttgacgaaacgggaggcccaaatcagcgcggccgggccgatgaaggcgtcgccgccggcgtacaccgggcaggcgccttcgcacacgccgcaggcgatgcagttgctcagcagctcgtatttggcgagttgttcggggttctgcaggtattcgaacacgtccaccttgccttcggcggtggtggcgagcacgccgtccgcctgaagatatggggtgagcttccttatttggttgagcatcgggtcgatgtcggcgatgaggtcgcgctgcggcgggaagccgggcagggatgccagttcgatgactcccagcgagccgtttgcggccgagtcctggtcggctgccgcgtttgcgccgttttccgcggaatcgtcggattcttcggactcggtgccggtgtgccggaacccttcgtcatcgacttcggggatggcgccgggctgcttggcccaatcgcggatggtggccgtgcacagcagggtgggggtgccgttgatggccacggcgtccgaaccgcacatgccgtgaccgcacgaatagcggaaggccagcgtcgggtcgacggtgcgtttgatggtcagcaggcagtcgagcacggtgtccgaggggcgcgcgggaatcgtgtattcctgcacccactgcttgccgcgcggacgacggcgtgccgccgaatccgagccgccgccgaatggggagcttttcttggcgaacgggctgccgccgcgtgcacgttcggcgcgctcgggtcgcggcgtgaaacgatgcacttgcagggtaaccgtcgtgttgctcgcctcagccatgttctgcctccatgaaacagtgggatgtcaagtccaatatcagccaacctattgtgccacaagccctaggcggcttggtattacccccagcggatcagtactcgcgcttcttgggtggatagtcggtgatgtgcaccggcttgaaacttgccggaccatcatcggcgaccatcgagtgagcaaggaaatgctcatcgtcgcgttcggggaaatcaagtcgttgcatggatccgcgggattcctgacgggattcggaagcgtgcagcatggcctcggccagttcgattagatgacggacttcccagatggcggtgacctcctgattgaaagcggcggtcttgtcatgggcccgcaaggtatcggcaaccggtgtgatgtcgttgttgatctgagtcaacgccgtatcgatggtctgagcggtgcaacgtacggccagagcctgctccatcactgatccgagttgggccatgagctgataaggattggcggtgggcccgccatcgtctgaatcgtccatcggcccggcgagcagttcgtcaagctctgccttgcgggaatcggcagcctgatcggcggcatcggtcagcatgtcatcggtcgaatcatcggccatgggggagtcaaccgggttctcgacgatgcgtgcggccatcgtctgaccagcacgtgtaccgaacaggcaggcgtcgagcagagaattgccgcccagacgattcgcaccatgtacggagacacaagagcattcgccagcggagaacagtccatcgactacctgcacggcaccgtcggcccaacggtacacctcgccattggtggtgatggggatgccgcccatcgtgtaatgcgcagtgggcttgataggcaccaggtccttggccggatcgaggttcgcgtactgctcgatggtttcgaccacctgcggtagcacttccttcatacgttcggggtcgatgccggtcatgtccagccagacgcagtccttcggaccatccgggtccttcgggtcggcgacgccgcggccggcgtcgatctccgccatgatggagcgggagaccacgtctcgcgcggccagatccctatgctccggggcgtagcgttccataaacggctcaccgtcggcgttcctcaggatgccgccctcggcgcgggccgcctcggacagcaggatgccggtgtgcgcgagcccggtggggtggaactgcacaaattcgatgtcctccagctgcaggccggcggccaaggccaatgccatgccgtcgccggtcaggtcccaggaattcgatgtggtatggaacagtcggcccgcgccaccggtggcaagaagcacgttgcgcgcgtggatggcctgaatcttgcccgaatgcgtgtcaaatgccacgatgccggccgcctgcttgccgtcgtcggcgagcaccaggtcggtcacataccattcctcggcgaactcgacgccggcggccacgcactgctgccacaaggtgtgcagaatctggtggccgatgcggtcggccgcataggcggcgcgcttgaccggggcaccgccgaactcgcgcgtgtggccgccgaaccggcgctgggcgatatgcccgtcatcggtacgggagaaggccacgccctgacgctccaggttgatcacggtctgcggcgcgtattcggcgagcagtttggccgcgtcctggtcgacgagccagtcgccgcccttgatggtgtcgtagtaatgccagtgccagtcatcggactccacattgcccaggctcgcggcgatgccgccctcggccgaaccggtgtgcgaacgcagcggctgcagtttggagaccacgaggatcttcgggtccacgccttgttccttgagctcggtgattttgggggagcgcagcagtcccaacgccgccgacaggccggccgctccggcgccgacgatcaccgcatcatacatatcttccaaacgtttcggactcatgggttcgattctcgcacacccgccgaacagtcttcgagccgtgtcatgaaagccgattagccgacacggctgctcagcttgagtatgccggcatcccgctcgatcactcccttcagctccaatgcgccgagtagctcaagtatggtgccgatattgggaatctcgtcgggtaccgtctctcgcgccacacgcaatagtgcgtccggggtgacgatgagatgtcgtttacggcattcacgaatcaatgccactaatgtgcgttccatttccggcagcttggcgataatgatacgttgttgggcttccttctcgggatcgagcttcggcttgacacgaagatccggcatctgatgcgacgagggcggctcttcacccttgctcttgttggcaccggcctcggcagttgcgctcgccggcccatccttggattgaacgagtgtaggctgagtatgcttggtcctaagacgtttcgaatgacctgaatcttgtgacgactcctgtgacgccgatgattccgaggatgctggcgataacggagtcgttgccggcacttccatggcctcctcgttttcggacgagtcctgacctgtggatttcggtatgcctgggcatgccgccataacgggcttatgccgttcatggcatatatcctcagtggatgtggcggcacacagaatcatcgcccggtggtcgccgatcatcttattgcacccggcgttgcaaggctgattgatgtcaccgggaaccgcatacacttcgcgcagcaattcgcatgcccatcccgcggtgttgagcgctccggaacgcaaccgggcttgcgtcacaatcaatgtggaagacatggccgcgataatgcggttgcggagtagaaaacgacgggcttcgggaatcgtccctgggcacagttcactgatcagtgcaccaccctgcgcctcgatacgttcgaacagcgtgcggttacgcatcggtccgatatggttgagcccgccggcgaatacggcaacggttctgcccacattggcgggcattctgccgtgcagcgcattcaacgctccccaatgtgccgccgcatccgtgcccattgcgcctccggacacgaccagatgcccggcaacgactgcctgttcggctacggtgtgtgccacataccggccgtattcggtcacgtcccgtgaaccgacgatgccgaccggtttggcgcaactggtcaatgcgcgtggatcgcctttgatccacaaacacagcggtggcgcccaatcggagcgaatggacaggtcggccaactgcgagggccaacatggatggccggggccgataatccattgcgtgccatccatagtgaaccagtcggccagttggatgatgtcttgcgagggcaggtccatcatgcggttatgccagccggccagtgcattgcggaaggagcgcatcgcattcgccgacgccttgcggccccatcgggtgaggccatccacgaacatgcggtcaatgcgtgacagcgccgggccgcagattccagatggctggcttggatgggattgcgccaacgcgtgccagagggattcggcgctttccgcgcctttgagcgtggcgtacatcatcacatccgccccatcaagacagaacgtgagcgcggcgcggtataacgtatccgtgggaggcatgggaatggtgcgcgaaacagcgaggcccgtatcggtgtgatccacactgcctgcggtgccgccagattgtcggatatcagtagcgttactcatgtcatcctcgttctcatttcgatgccctgatggacgtcctgctcggtgggggacacgcggccggccagatcggcgagcgtccaagacagacgcatggcgcgatcggccccgcgcaatgtgagttgatgattggacagggcccgattgaccaattccatcgctttcagcgacgtattggcatgcagccatttgcccgaagcttgcgcgttgcacacccatccatactgtctgaaccggtccttggccacttgacgggcgcgaatcacacgagcttgtatcccggcactggactcgccgatcgtctcgctctgcgcggcaatgcgcgagaccggtggcaccgccatctgaatatccacacgatccaatatcggtccggacaatcgcgagaaataacgaatacggtctttttcccggcaagcgcaacgttcgccggtaccgtaatagtatccgcacgggcaggggttggccgccatgatgagttggaatgaggccgggtaataggtgctgccttttgaacgggaaagcgccacatacccggattccaatggttcgcgcaacgtctgcagggcgcgtgcgctgaattccggtgcctcgtccagaaacagaatgcctcgatgcgcgcgcgtgatcgcgccgggaacggcgatgccgctgccaccacccaccaaggccgccgtgctggcggtgtggtgcggtgcctcgaacggcggcatgtcggtgatgccgtactgaggcagtatgccgcacagcgaccgtatcgacgccacctccagttgttccgcctcgttcaacgggcacatgatgccgggcatacgtgaggccagcatggttttgccgctgcctggcggtccggtcatgatgagattatgtccgcctgccgccgccacttgcagcgcccatttggcatgttcctgacccagaacctcgttcatatcgccacaatcgttgggatggcttgtgggcgattgatccgtggtggtctcgtcggcaaccggtgtatcgggaatcgtataggtggcatcgccgcccatcagttcgatgagctcacccacatgcctcacgcccactacatccagtccatccaccattgaagcctcgtcaagattgcgatggggaacaatcattttgcgcacgccacgttcctcggcatgcagcatgatcgggagcagcccatgaatcggcagcaccgagccgtcaagattcacttcgccgagcacaatggtatcttccaagcaatcatgccctatggcacccgccgcgcataggacgctggccgcgatggccagatcatgcgacgaaccacgtttgggcatggccgcagggctcatgttcacggtcacgcgggtgtgcggccaaccgaatccagtggcttgacacgccgatttcacgcgctcgcgggcttcggacaacgatgcatccggcaatccgatgatgctgaagtatggcaagccagggctgatgaaagcctgcacttggacgatgaaggccttaaggccgatcagtccgaatgagagagtgctgccgatagccatgtctactcctttcgcaatgtgtttcgcaacgtggctgttttttgggggacgaattcagaaggcgttttcgatgtgatgcacgagcggtctgcccacccgaagcacgatggtgacgacatcgaaacggactgccgtatgcggcacacgattacgccggtcaagcagccaatcgcaggcggctttcctgagattgtgctgtttcgccggcgtgatggcctcttgcggatatccgtaatgcatggaccggcgtgatttcacttcgacgaacaccaccgtgtactcgggattgagcatcacgatgtccaattcgccgtaacgggtatgccaattgcggctcaaggtcgtccaaccgtgttcctccagccacgcggcggcatactgctcgccgagcgcaccgaactgtttgggcgtcagattgcggtcgcccatcgtggccgcaatccgttccgaaggcagcgttgcctgcggatcaggtgaagccagcatgggctggtgaaaggcaagaccggcgtcgatgccggacttcgtcgtcggctgggtaggtggtaaagcgttcatgattccactgtgcgggttacttatgtaagagcacaagcgcaaccggcaaatgtggatactatgacgcggtttggcgtgttgtggataacgtgtggatgaaaacccggttatccaccattagttcagaaggtttaccaaggctccccagccgacttacctgtgacgacagacaacccgccgagttgttcgctgaatacgtcagacccagtgagcggagaggggagccaaggtgcggtcacttcaccaaatcggtgagttcgccaaggttcagttcgaagctgacgccacgatcctcgaaatgcggctggttacgggtgctgaccatggcgtgtcgcacgaactcgccggcgatttcggccgactcggccaagccgcggccggccatcaccgcgccgcacagggcagatgcgaaggcgtcacctgtgccatgaatcatgtatggcagcttttcatgagccagctcgatcttgccggcaacaccggtggaagcgctggccacatagttgacgattttgccatcgccatggtcgatgcccttcaacaccacgttcttggcacccaacttcagcagagcaccaagcagctcgttaaccgtggcctcatcaatatcctggccaggatagtcacgcttggtgagaatgctcgcttcggtgaggttcggcatcaacacgtcggcaccatcggccagagcgcccattgcctcgcacagctccggtgtatacgtggggtacatttcgccggcgtctcccatcaccgggtcaaccagacgcagcgcattcggatattcacggtagagacgctgaatgatcgccacctgatcgggggagccgaggaagcctgaatacacgccatccagttccacgtcttccttctgccaggcatccaagtaaccggagagaatatccgtggtgtcgtggaacgtgaacactgcatagcgcgtgtgcgccgagaacagggcggtcggcaccgggcacacatcgcagccggcggccgagagaatcggaatcgcggcggtcagcgagcacttgccgtagccgcacatgtcgtgcacggcggccacgcgcggaatatagctcggatcacggtcatacagtgttacatcggtcatgtctgttcgaaccccttcaccatgttggcggaataattcattggcgatgtttgactgtagtcgttcgtcatgtaaaccatgtaaccgggcggcggaaaaaaggaacagacgtcatcaccgagcgggcaaaccgtcttggtgacgggtggaacaagcaatcatcacggacacttgagccatgcgcgaaaggcatggtagcgatatcaccgtgaccgcagtcgaccgtgaaagcgcatgcgtgcggcccggcgtgtcgcgataatttcaacgactttttcgtgacttctgacagtctctcacgtcaatgatcccaaggctttataagcccttataggcaagcccgataacgttcggcttgcgccgcgcggcccaaacgtcgtaacttcataaccaacacctcgccaaccgcccgaacacggcaggcgggtggcaaggaaaaatcctcgcgacctagcacaaccaaggagaaagacccatggccgagaacaacaagaagtaccgttttgagaccctgcagctgcatgtgggccaggagcaggccgacccggccaccgactcccgtgcagtcccgatctacgccaccaccagctacgtcttccacaacttcgaccacgccgaggctcgcttcggtctcgctgacccgggcaacatctacggccgtttgaccaacaccacccagggtgtcttcgaggaccgcatcgccgcccttgaaggtggtaccgctggtctggccgtcgcttccggtgccgctgccgttgaatacgctgtgcgtaatatcacccagtccggtgaccacatcgtcgccgccaagaacatctacggtggaaccttcaacctgctgcgccacaccctgccgcgtgacggcatcaccaccaccttcgtttccgccgagaacccgcaggagttcgaggacgccatccaggagaacaccaagctcgtctacttcgagaccttcggcaacccgaacgctgatctgccggacttcgaggccatctccgaaatcgcccacaagcatcacctgccggtgatcgtggacaacaccttcgccactccgtacctgttccgcccgctggagcacggcgccgacgtggtggtcgagtccgccaccaagttcatcggcggccacggcaccaccctcggcggtgtgatcgtcgaaggcggcaagttcaactgggccgaggtgccgggcaagttcccgaccctgaccgagccggacccctcctaccacggcctgaacttctacgaggctctcggcggcaccgccttcgtgacccgtatccgcgccatcctgctgcgcgacaccggcgccaccctgtccccgttcgccgccttcctgctgctgcagggcaccgaaaccctgtccctgcgcgtcgagcgccacgtccagaacgctctgaaggtcgtcgagtacctgcagaccgtgccggaagtcgagtccgtctcccacccgtccatcccgggccgtccggatcacgacctgtacgagaagtacttcccgaacggagcaggctccatcttcaccttcgatatcaagggcggaaaggatgcggctcgcgtcttcatcgacaatctgcacctgttctctctgcttgccaatgtggccgacgcaaagtccctcgtcatccacccggcttccaccacgcactcccaggagaccttggaagagctcgaggaccagggcattcaccagggcaccatccgcctgtccatcggcaccgagaacatcgaggatatcctcgatgatctgaagggcggcttcgaagcccttcgcgcttccggcttggccaagtgaggtcgacaggagggttgacggcccgatgagaaggggcgcgatgctaatggggtgcatcgcgaatcatcgagccgcatggggtgccttccgcctgatcgcttgacccaaggagtagaaagctcgcactgacgtcatgcagtgcgggctttcttgcgtctgtatgcctcacactgtttgcgcagaggcatgaatagtgtgagacctgagacgacataatcctcaaggatgagggccggcacacggccactagcccaattcagtctggcgcacgatggggcgcgccgttatttcttcataagttggaatcatcgtccgggcatagggcccggccaaatatggagaggcattatgaacatgcagaacccgtccgcatcgcgaggcatcgctattcaggccgtcgacttggtcaagaactacggcaccggcagcaatatggttcacgccctgcgtggcgtgaacgtgagtttcgaacgcggcaaattcaccgccatcatgggcccgtccggctccggcaaatccacgcttatgcacacgctcgccggcctcgactccgccacatccgggcatatccttttcggcggggcagacctgacccgcatggacgacaagcagctcaccttgctgcgtcgccacaagatcggcttcatcttccaaagcttcaacctgctgcccatgttcaccgccgaacagaacatcctcatgccactgactctcgccggagacaagcccgaccgcgcttggttcgacctgctcgtcgaaaccctggggctgaagcagcgcctgaaccaccgaccgaatgaactgtccggtggccagcagcagcgcgtggccatcgcccgcgcgctgattaccaagccgaagctggtgttcgctgacgagccgaccggcaacctcgactccgtttccagcgccgaagtgctcggcttcctgaagcgttcggtcaacgagcttggccagaccatcgtcatggtcacgcacgatgcggtggccgcctcctatgccgaccgtgccatcgtattcgccgacggacagatcgtggccgacgaggcgaaccccaccgccgaaacgatgaacgagctgcttatgtccgaacgcgaacgtgccacgcgcactgccgtcaccggcacacgcgccgacacgctcgcccgtcttgccggcgtaaaggatgtgcccaacctgcccatcaccgacgctccattgcccccggctgggagaaccggcaccatgcgccatgcccgcgtcgctgcacagcacgcttgctgagccggaaagcgagagacaggacacccccatgttttccatcactctgaaacttatgaagaaaagcgccaggatgctgattccggcaggcatcgccatcctgatcggcactgcgttcatcgccgctaccttcctgttcggcaacgcgatgaacgatgcgcttgccgcccagaataccgcccagctcggcggcgcgaactacgtgatcagcccggatagcggcaaggacctgaccgataaggaccaggactacatctacacgcgcacggttaacgacttccagcttgaccgcatccgcgccaccaaaggcgtcaaggacgcacgtgccggctacgcgggttccgtgaccgtaacccgtggcaacaagcatgccagcagctacgtcatcaccaccgccacaaaacgcacgctgctgccggtcaccatcacgcaaggagaccagccggcggacagcaacgagatcgccctgaccaagtccgtagccgaccagctcggcgtcaaggtaggggaccgtgtgaccgtcaactcgcaggcggcgcagtatgcgggcaagaccggcgattcggccggtaataccggtgacgctggtgatgagtcggcccagaacgccgatggcacgagctcgcacgacggtgattccgatgccgcgtccggcgcgtccgccccatccgacggcaccgacacggccgccgactccggcatgaccgtgcgcgtggtcggcctcaccgacgacccgaacggtgcctacgcctactacggtggcgcttccgtgctttccgacaacgtcatcaccgcaatggccggcagcaacgatttcggcaacctgcctgtctacctcgtctatctcgacatcgacgatgccagcgacacggccgcggcatccaccgtaaaacaggtcagcacactgctccctaagcatttcagcgtgcaatcccgtgccgcgctcgtcgaggaatccgtcaaaagcatgagctcgggcgaaaccagcatcaccaccatcttcctgctgagcttcggcatgctcgccatgctggtcgcggcgctcgtcatcgccaacaccttccaagtgctcgtggcacagcgccgccgcacactcgccctgctgcgcaccatcggcgcgaacaaaagccagctgtatgtctccgtgctgtttgaagccggtgtgctgggactgatcgcctccgcactgggagtgggcctgggcatcggactcatggccgcactatgccagtcgggcctgatgaaagccaccggcatgaccatgcgactggtactatccggtccggtgttcacggtgcctatggcattcggcatcattatgacggtgattgcctcgctaggctccgcgcgttccgctaccgccgtcaccccgctggaagcgttgcgacccatcgaactgaccgacacacgacgggccggtgtggtccgcgccgtgatttccatgctgctgattgtggccggtgcggcactgtgcgcattctctgtatggcagatgtccgagaaaatcgccggacgtgattcaatggccgacaagcagtatccactggtgttgctcgccgccatcatcggatgtgcattgatcttccttggactggtgctttccgccacgttctggctaccggtgctcatgcgcggcgtgggcgcgctggttgcactggccggtccgtccgccaaagtggcacatgcgaacattcagaagaacccgcgccgcgtggccgccaccggtgccgcactgcttatcggcgtgacgctggtctccaccatcgccaccggtgccgccagcgccaagcaaaccatgaacgaggcgctgaccacgcgctacagcgtcgacatgattgccgctggcgccgatatgactggcaaacaggccggcgaggcagccaaagtcaagggcgttcagagcagtatctacgcgccgacccgcatgatgaccatgaaggatgccgacggcaagagcctgagtgtgcttgtcgtgggcgtggatggcgtcgacgcgctgcgcaaggtggtgcgctccgatttgtccggtgtgaccattgatggcgattccgtactgatgcccaagtattccgccgctacaggcaaggatattccgctggacaagagcgttacgttcacggctggagcggccgaagcacaagccgatgccgccaatggtccgtccggtaatgatgcgaacggcagcgccgaaaacggcaatggacaatccggcggcacacagacgctgacgctcaaaccgcggaaggtggactatcgccgcattgcctccaactacgccgcggtcgccttcgtggacgccagccacttcaccaacggtggaatcaaggccgacgggcatatcatgcttatgcgtattgacgccgaaggcgcgggtgttgcgttgaacgacgtattcaccaacgtgcagaatgtgttctccgccagtgcgggtgttaccgtgaccggtccggtggccgaacgtacgcaatgggagaccatgatcaacggcatgatggcattgttggtcggtttgattgcggtggctgtgctcatcgccttggtcggtgtggcgaacacgctgagtctgtcggtgatcgaacgcacacgcgaatccgccaccttgcgtgccatcggcatgacgcgcggccaactgcggcgctcgctggcggtggaggcgttgctgctttcgctcgtctccggcgtggtgggagtggtattgggtaccctgttcggctggctcggatcctacatggtgtttagtttgtacggcgacaccgtgttcccgttcgaatgggccaccaacggtgtggtgctcggcgtcgccgcgctcgccgctctgctggccagcgtggcacccgcccgccgggccgtcaaaacgccaccagttgaagccttggccgaagcgtagagcaataagctccctcatcagagggagcttatttgttacaccagcccgttatcgtacgcgaagactacagcctgtacgcggtcacgggcgttgattttggcgaggatatgcgccacgtgggttttgacggtgggaagggagataaagagcttgtccgcgatctcctgattgctcagaccatgggcgatctccaccagcacctcgcgttcacggtcggtaagcagatccagttcgggatcggtgtatgctgggcgtgacgtattggaaccgtcggaagcggccccggcaggggaggggatgccggtcatcgagccggcaccgttgccggccgcaccgccagagacgccgacggcggaaccgtacacggcaccggagcgcgcgacatcgccggtcagcgaaccatgctgcgcgtaaccgtcctgcatcatcttttcgatgagtcgcttggtggcggaaggcgcgataatcgcattgccttggaatacagtacgaatcgaattgagcaacgtttccggttcggtgtccttgagcaggaagcccgaggcgccggcattgatggctgccatcacatactcgtccaaatcgaacgtcgtcagaatgattacgcgcgtcggccggtcgtcagccgattcggccgagacggtcgcgtcggcggccgggctggccgaatcggccgcgttgtccggcgcggcggagagtgaggtaatacggctcgtggcctcaatgccatccatgccgggcatgcgcacatccatcagcaccacgtcgggatgcagggattccgccaacgccacggcttgggcgccgtcggacgcctgcccgaccacctccatatccggttgcgaaccaatgaccatggcaaaaccggcacgtaccagctcctggtcgtccgcaataatcacgcgaatgcttctgctctcgttcatgctctccactgtatccgtttcctatcggagcgccgctccataaacaccctgattgttccctgagttcttattgggcaagtctctcaccggggtaacgttcccgcgtgttgcatctgactatccaacgaagccgccggtcgcaactgcatatccggctgcacaccctcatgggcctcgtcgctgaacccggtttcacgcaacactctcaacagctgacgcatatgagccaatgcggcgcgcccccgagcaccaatcgcggcaaaagccgcttcaatctgcatactatcaggcgcaggttcggcgttgagcatcaccagtccctcgtcagcctgcgcaatcaccgattccagcgtggtcagtacttcggtttgcatcgccgcactaatacggttgcgctccaagttggccgccagcaccttttgccgctcctgctcggctcgcagcgcctcctcgcgtcgcaacagcaccagagcgtttgcgccacgcgaacggctccatcgagccatcgcaatgcaggcaaaaccgaccaacatgattcccgcgcccggcagcaagccggacaaaaccagcctccattttgagagcatggaactaccatcgggcaaaaacagatggaacagctgactgtatccattccacccagccatcaccttgatgcccgcaagccacgaatcggctgccagcgccacgctcacccagcgccaagcggactctcgtccatacaataccgccgaatacacggataccatcgcaaacatattgatggtcaaaatcgatggcaagaacaacagttgcacagcagacagcaccgccatcgccagcgcgctgccctctgggaagcggcgacggaacgccaaaggcgagagcataataatcgtcagcgttatagtcggcacgcggttcggcgaatacggggcattgccgatcatttgcaaatcgccatacgtggcggaatcaaatagcgcaatcagcacgatagtggcgataacgtccatcagaagatagtgacgctcggtccactgcgcaaatcgacccacccagttcgactcatgcgtatctccttggtcgagtactttggggcgcgcccgatccatcaatcctcgtatacgcgagataacggttagcaccggatcctccgtatcggtgccagactgtggggcggcaggggagagcggaatcgtagccgccacaataaagccaccattcggccctgggccggcctgcacgctgccacccaacgactcaatgcgttcgtgcataccaaccaatccgtatccgggcttatgaccgtctgctgcagacgtcgcgccacggccgttatcggatacggtaatcgacagcacatcgtttgaccagatttcatcgatggtggctttagcaccctcgcccgcatgtttgcgcgtattggtcagcgcttcctgcacaagacggaacacggcggtttccgcgtcggcggacagccggtcaggttgcgctttgccggtcatatgccgggacaccaccagatgaccgtcaaacagcgaatcgatgtcggcatatccggtactgccactcgcaccgaacacattgaacagacgctgcatatcatgctgcgcgcgttccgcttcatggcgaatcgtacccatcgtgtgcttggcgatggccagatcatgcgcacccgcataccggccgccatccgactgcacaataatcgtggagagcgtatgtgccaccacatcatgcatatcacgggcgatgcgtgcgcgttcggccagcgccgcgatgcgcgtctcctcggcctctttcgccacaatggaagcgttgcgctcgcgcatggccgccagcgtggcgttgcgcgctcgctgccacaaggccatgatgatgacgctcagcacgctcgattcgatgaacgccgcctccatgccgaagtcagcgagcatcttggccccgcagttgacggcgccgcttgcccccacgacgccggtgaccgccgggcatgtgggcatcgtgatggcatcggacagccagccgtcgcggatgacgcgcgaaccggaggaaggtccgtcgaacagcggacccacgttgaaagacaccgaccagaccatcgccgcgaccagtcccatgacgaacgccgtgacgatgaaccgccaggaatgtcggggattgccgtacagaatcaccgaatacaccatgatcagggcgtagaaatcgaaatacatgatcgccgggccgaacacaagatgcgtgatggtcagcgccacgaacagccaggccgccggctccgggcaatacctgcgcagcatcagcggcacgaagaccggcagcgaccacagcgtcatcgacgcctgagttgcgggaaacaatatgccgcccgtcgaatcagggctggtgacgccgatgaacggcacgcagccggcgatcagcgctgcggcgagcaacgtgtcccatagcagtgtgcgggtcgactcccgtgcgcaccatgccctcacgcgcgccataatctccataacgcgcaaggctagcgtgtccggcgacgaaccggtatcactcttcaggaggatttatggactagagtcttgaaccatgacaatgctgagcaaatactacgtgcccggactggccatagaggaccattccatcgatgttccgctcgactggaccggccatgagccaggccaagcgttcgacggcgaaaccatcaaactgttctatcgcgtggtcaccgcgcccgaacacgtgcatgacgacctgcccctgctgattttcctgcaaggcggtcccggcggtgccggcccgcgcctcaacagcccgacctccgacggatggatcgaggaggccatcaggcacttccgggtgatcctgcccgaccagcgcggcaccggccgctcctcgcgcgtggacacgcacgccatggcccgcatcgccgccgcgcacgacgatgatgccgcggccggcgcacgagcccaagccgactacctgaagaagttccttgccgattccatcgtgcgtgacttcgaacatctgcgcctgaccgaattcggtggccgcaagtgggtgacgatgggccaaagctacggcggcttcctgaccctgaccacactgtccctgttcccggccggcgtaatcgccagcttcaccaccggcggcatcccgcacgtgccggccgacgccgctgaagtgtacgagcataccttcccgcgcatggtgcgcaagacgactcagttctacgagcgctacccacaggacaaggagcgcgtggccgccatcgccgacaagctgccgactactgcggaagtcgccgaattcgttggcaaactcaccgattccgtactgaatccgatggctggtaccgatgtggagcatcgacttggcgtgatcgccggcatggccgcccacggcttcccgctgatgccgaacggcgacccgctcaccgtcgaacgcttccagtgcttgggatccgactttggcatgaagccgagcttcgagcgtgtccattggattcttgacgacgccttccttgatggcgatggttccgcttctgccgactcgccgttgtctgacgaatttttgaccaaagtgatgaacgccacgtcgtcgcgcccactgtactggccgctgcaggaattcatctacgccaacggcgagcttgacgagcccattcgttgggccgcccagcgcgtgcgcgatggcaagcccgaattcggtgctgatgaacgcccgctcaacttcactggcgaggccatgttcccgtggatgttcgaacaggaggccgcattgcgcccgttcaagccggccatggacctgctcatggaagacacgcacttcggcgtgatctatgacgaaggtcagctggcccgcaatgaggtgccgctgcaggccgccgtctacttcgacgacatgtacgtcgattccggcctgcagctcgacaccttgagccgcgtgggcaacagccactactggaccaccaacgaattcgagcatgacggtctgcacggctcgctcgtcttcaagcatctctatgacgaagccctcaaccggggcgacctcgaagaactgttctgactcaaggaagcaagctccctctgatgagggagctctgtatacatgcacgaaaggaaaacgtatgactcagaacctcaccatcggttttatcggatatggcaacatggcccaggccatcgcccaaggcttcgttgacgcgggcgtggtcgccggcggccagatggtcgcctgcgccgcccactacgacaagcttgagaagaccaccgccgaacttggcgtgcgtccgttgcacaatgcgctggaagtggtgacggccgccgacgtggtcatcatcgccatcaagccctaccagatcgccgccgtcgtcaagccgctggccgacgaacttgccaagccgggcaagatcgtcgtctccatcgccgccggctggaatctcaagaagtaccaggacctgttcaccaccgaagacggcgaatccgtcgactcttcggacatccatatccagtgcaccattccgaacactccgatggccgtgggcaagggcgtgcttgtcaccgaatccgtcaacacactgaccgacgacgaaaccgaaaccttcgaaagcctgttcgggccgatcagcctcatcgagcgcgtggacaccgcgcatatgaacatcgccatggtggtggccggctgcgcgcccgccttcactgacatgtacatcgaggccttgggcgacgccggcgtgcagtacggtctgcagcgagccacggcctaccggcttgccgccaagatggtcgaaggtgtcggcgcgctctacatggccaccgaaacccatcccggtgccatgaaggacgccgtgtgctcgcccggcggcaccaccatcaagggcgtcgcccagctcgaaaaggacggtttccgcggctcggtcatcgacgccgtagacgccatcgtcggctgactgccaatcagagtttgcgtatattcgcatatcacagtcaaagccttcgaaccgtatgctcggaggcttttgcatatggccggttcaccacatgcaggttcaaggtgtccagcttctccctagacttggaatcatgtctcttactatcggaatcgtcggactgcccaacgtcggcaagtccaccatgttcaacgcactgacccgcaacaacgtgctggctgaaaactacccgttcgccaccatcgaaccgaacactggcatcgtaccgttgccggacaagcgtctgccggtactggccaagctggtccacaccgaaaaggtcgtgcccgccacggtgaccttcgtggacatcgccggcatcgtcaagggcgcctccgagggcgaaggcctgggcaacaagttcctggccaacatccgcgaggcggac

SEQ ID NO: 363 - DNA, 27851 bp, Unknown
  R42_10m  MAG No. k141_25183
agccaagaaaatgaggcgtatggcctatattggtgtctatgagaagcccacgcgaggattttgaggcggcaggcaagcgactgccttgggatgctgctgctcgcaatgcagcgctgtccgccaccgcgccagtctctgacgtcaaggcatccgccaatggcgccgacaatgccagcaatgccagcaatgctgaacattccgatgacatgcccaccgtgccgattcccgcacgcaaggctgccacgacgttcgacaccccctccaagcgtgagcgcatcgaggtcaagccgccgatcacccgattcatacgtcgtgccatcacccgcgtgttcggcgtatggtcacacatctccactcaggtggtgcgccaatggggctggtatccgcgagtggaaccctatgtgggttatggcaccggcgattactcgcgcctgatctgccgcacggtatacgcccccaagcatgcgcaatccggcgaactgatccgcggcatccgcggcatgcttgccgtgcccgcgccgcgcacccacgtgcaggccagcattgatgacacgccgctcaacaccgtgcagatcggcgtctccgaggtctatgacaaggtggaccgcacgcgcgatctcggcagcgaatacgccatctccgattccgccggatacctcgacctcgtggccgagcatcgtctggtgcccggtatccatcgcgtctcctacagcgtggccaaccgcaaacccgtgagcgccaacctgtacaccatccccgccagtgccaaagtcggcatcatctccgatgtggacgacaccatcatgatcacacaggccccggtgccatggaaggccgcgtacaacctgctgttcctcgaccccaagaagaaagcctccgtgccgggcatgagcgtgctgttcacccgcatcgccgacttgttccccggcgcaccgttcttctatctttcgacatcgccctggaatgtggagagttcgattcgcaacttcatcactgaccatggttttcccgaaggcccgctgctgctgcgcgacctcgacccgaggcccaagaccttcgtgcccaccggcccccagcacaaacttgagtttgccgaacaacttatggccgacttcccggacatgaagttcattctggtgggcgatgacgggcagaaggacccgaccacgtacgccaccatcgcccgcagatatcccggacgtgtactggctatcgtcattcgtgagttgagcccgcgcgaatcaaccggattggcgtcggtgacgggactcacctcgacccagccgactccggtaaccgatgtaccagtattcaccggcaccaccggctcgaacattctgaagaccatgctgccgtatctgaagacggtgttgcgataagcgcggcgtgatgaacgccgaatgcgtcccggtgtggtgcctcgcctataatcgcgtggtatgactgacgagagcacaaacgccgcggccgcgatgccgccttacgccaagcgcgagccgaagcgccgcgaattccacggtgacgttttcgacgacgattacgagtggatgcgagacaaagactccgatgatgtgcgcagctacgtagctgctgaaaaccagtactgcgagcgtcgcatggcgcatctggcggatttccggcatacgttgtttggagagctgaaatcgcatgtggaagagaccgatatgtctgttcccacgcgcatcaacgattactggtacttcacccgcacgcagcagggcaaacagtatggcgtgcaatgccgcatccccgtgcgcgatgccgatgactgggacccgccggtcgtggatccgcaaggcgcgcccggatccatgcccggtgaacaggtcgtttttgatgcgaacaaggaatccgaggggcatgacttcttccggctcggcggcttggatctgagcaaggacggccgttggatgctgtacggcgtggatgttgcgggagacgaacgatatgatttccgcattcgcgaccttgccgggctggagaccggggagccggtcagcgaactgcccgaacagttcaccggcattggcagcgcatgcttcacgccggacggccaatgggtgttctgggtggaattggacgattcctggcggccgctcgccgtgtggcggcatcgtgttggcacggcggtcgaatcggatgtgtgcgtgtaccgagaaaccgatgaacggttctgggtgggcgtcggcatcagttttgatgagcgcaatatcgtgatcggcaccggttccaaaaccaccaccgaagtgctgatgctgccggtggccacgcctgaaggcgaattccaagccttcattccacgtcagaacgatattgaatatgatgtgagctttgcctgttttgaaggcgcgggggagaacggtgcggatgtgccgctcgccgtggtctaccacaacgccgccaatccgaatttcgaaatcgacgtcattgacatgcgtggccatgagccgccgtaccgactcggcgaaggcgtgtgcatcgccgccgggtcgccgtacggctgtgaacatggtgagccggataagccgattaccgaggcatacttcaacgccgccaatccggcgatattgcagggtgcccacggtctgggcatcgaaggcatcgcgttgcatcgcaactttgtgtccctgagctaccgtgccgacggccagccgcacgtggcatacatgaccaagagcgcggctgccgccgacttcctggccggacggccgtggcggtttacggaactgctgccgcctgccctggaggacgactgggacatggtcgccgccgatcgcgaaaacttcaccggcgatcatggcgaaatcttgtggaccgaagatgaggcccccacggatcacacgtcatcttccgatggtgccagcgacgaccacctgcccggtgagacccggcgcttgtacaccatcggcgtcggcggcaacccatcgtatgaggcgccgcgcatgcgctactcgttcgccagctacacccgcccgggcgagctgcacgaaatcgattccgccaccggtgaagatgcgctgctgaagcgagccaccgtgttgggcgacttcaatccacgcgattacatggaacgccgtgtgtggattaccgcgcgcgacggcgaacgcattcctgtttccctcgtctggcaccgcgattgcccggcgcaggattcgccgatgttcattaccggatatggtgcatacgagatttcctccgatccggggttctcggtctctcgtctgagcatgttggatcgcggtgtgctgtacgccgtgccgcacattcgcggtggcggcgaaatgggacgcgcctggtatgaacaggggcgcagactgaacaagaagcattcctttgaggacttcgtggacgccacacgcgcgctgcagaaggcgcatttggctgatgcttggcgcaccgtggccaacggcggatccgctggcggcctgctgatgggcgcgattgccaatatggcgcccgaatgctacgccggtgttgaggcggatgtgccgttcgtggacgcgttgacctccattcttgacccggacttgccgttgaccgtcaccgaatgggacgaatggggagacccgttgcatgaccctgaggtgtatcagtacatgaagtcgtacacgccatacgagaatgtgccggtggccgtactcgagggcggcgacgacgaggctgccggtgacggcagtgctgatggggctgccgccggcgcgctcgccgccgcgcaattcccgagaatcttcattaccacctcgatgaacgacacccgcgtgctgtacgtcgagccgctcaaatggctggcccgtctgcagtccgccggcgtggacgcggtggctaagatcgaggtcgaggccggtcacggcggtctatccgggcgttacaagcaatgggaagaggtttcctatgagaacgcttggtgcatggatgtgatggggctcgctcattaggtcatttcgtcgttcattaggtcggtgtcctcttctatgtgagactgaaatgccgccatttcagtccctgaaatgaacccacgccgacctaatgaacactaaaatgacctaatgaatgtctcgacacgatacgcatgttggttgtgtccactagctgagcgggttcgggccggcaggtggtcgcgcgagtaggctccttgaactatggcaaagacatataaaatcgccgttattcccggcgacggtattggcaaggaagtcactccgtgggctcagaaggctttggaaaaggccgctgaaggcgtagctgacttcgagtatgagaacttcgacttgggtgccgagcgttatctgcgcgatggtgcgatcctgcccgaggacgaagaggagcgcatcaaggccaacgacgcgattctgctcggcgccgtgggcgatccacgcatcaaggccggcattctggaacgcggcctgctgctgaagctgcgcttcgacctcgaccagtacgtgaacctgcgcccctccaagctgtacaagggcgtcacctcgccgctcgccaaccccggcgacatcgacttcgtggtggtgcgtgaaggcaccgaaggtctgtactgcggcgccggcggcgcggtgcgccgcaacaccccgcaggaggtggccaccgaggtgtccatcaacaccgcatacggtgtggagcgtgtggtgcgttacgccttcaagctcgctatgaagcgcaagaagcacgtcaccctggtgcacaagaagaacgtgctcgtcaacgccggtgatatgtggcaacgcatcgtcgacaaggtcggcgaggaataccctgaggtcacccacgactaccagcacatcgatgcggccaccatcttcctggtctccgacccgagccgtttcgatgtgattctcaccgacaacctcttcggcgacattctgaccgatgaggccggctccgtggtgggcggcgtgggctactccgcctccggctgcatcaacgcctccgacgagttcccgtccatgttcgagccgattcacggttccgctccggacatcgccggtcagaacaaggccaacccgaccgccgccatcctctccgccgccatgctgctcgagcatctcggctttgatgatgcggccaagaagattcacaccgccgtcgaagcggacatcgaggagctcggctccaccgtgcgctccaccgaccaggtcggcaaggacattctggcccgcatgtgatgtcccacttggctcccctccagaggggagccaagtttatactgagttgcatgcaaatgcgacatggggaatgcaaaaccgttggcggcaaactagtcgccgtgaccgtatccgtcgatgatgacggcaccgcacagtcatgccatatcagcggtgatttctttattgaatcagtttcggatgccgaatctcatgctttgttgcgtgacttggaacaggctctaattagtgatgattcattgcggtccgtattggacgctcaccctagttgccaaattatcggcacagatgaagttgccatcaaaaccgcatatagccgagccgtaagcagcaacttgcccccgctggtgggggctcccgcgcagcgggtgggggcggtcggccccgatgcgccgaacaccccggcatccatcaatacacaaaccaagcagcccgacaaaagctctgaataccgggagcgctggaacgccctcagacctcaactcaccgtgatccacgaccatccgcgtactccggacgagcaaatggccattgacgagacctgggcgcgtgaagtcgcagcaggaacacgacagccgaccatccgattatgggagtgggtgggcccggctgtggtcatcggccgtttccaatcggcccaggacgaggtgaatctggacattgccgagcagctcggtttcgacgtggtgcgccgttgcacgggtggtggcgcgatgtttatcgaaccgggcaacaccattacctattctctgtatgcaccgctcgatttcgttcagggcgtaagcatcgaagaatcctaccggctctgtgactggtggctggtcgaagcgctgcgcgaacttggcttggatgtgcggttcgcgggcctcaatgatatcgcctcgcagtacggcaagatcgggggagcggcgcaacggcgcttccccgtaggctcaggcggcgcggtgctgcaccatgtgaccatggcatatgacatcgatgcggccaagatgagccgtgtgctcaacaccagtcgcgagaagatgtcagacaaagcggtgaaatcagcagtcaaacgcgtggacccgatgaaaagccagacgggtctcagccgcgaacacatcgtcgaacaccttattgactggtttgcggcgtgatttcaccgatggccgtatacgattttgccggtggccgtgcgtggttttgtcatgggcgagcgcggtaaccgcgacagtgccgtttttcgcggtaacacattcgtcagcatgtcgtacggctatcggatcgcgccacacatgaagtgacgaatgatggcatgcttctgacgaaacctgtggggcgcgttacaatatgacggatggccgacgacggtcgtaggacaataaggatggtgcgatgagcttggaaacgccaaacgcttttgctgacgaggagaacatcctgctgcatacggcattgttcaagcaggtatcgccagccgaagccgaggagctgctgccgcatttgaagcgtgcgaccttcgataagggcgactatatcttctccgaaggcgataccgatcagcgcatgtatctactggagcaggggcgcgtcaagctgattcgcacttcttccgatgaccgtgtgcagctgctgtccatccacgcgccgggcgaagtgcttggcgagattccggtattcgaccctcatggtggcccgcgcactgcgtccgcggtgtccatgagccatggcacgcgcgtggtctggctggagcatgatgccctgttcgcatggcttgatgagcatccgcgtgtggccatcgacatgttgcaggtcatggccaaccgccagcgcggcaacaacgaacgcatctccgacttggtattcatggatgtgccggcgcgtctggccaagacattgctcaacttgggctcacgtttcggcgagccggtggaacagggcctcaaagtgccgcatgacctgactcaggaagagctggcccaactggtgggctccagtcgtgagaccgtgaacaaggcgttgatggacttttccaaccgcggatggatcgcacgtgacggtcgatcgatcatcatcttccagccaggcatgctgattcgacgctcgcggcgctgaccgttcggctgacttccagccaatgttacgctagtgcggttcttgtgatgatatgttcacggaagctgaccgcgagcccggttggtagggcaccccatttagaatggggcccatgcccaaaaagaagtccctcactctccaacgtgtgcttgttctcctcttggcctatatcatgcttgccgtctgcggtggcgtggcggccagcgtgttgtttgtaccgggtgtggtcggtgccaataaagccgccaaagcggtgattccgtcgctcaaggtagaaaacgtggacttcgacgtgaccggtctgccccagaagtcgacgatgtacgcgcgagacggttccaccgttatcgcgacgttctacaaccaaaaccgtatcgtcgtgccgctgaagaagatttccaaaaccatgcagcaggcagtggtggcgcgcgaggaccgtcgattctggactcacgccggcgtcgacgtgcaaggcgtgatgcgtgcgttcgtgcagacctacctcgtcaaaggctcccagcagggtggttcgtcgctgacccagcagtacgtcaagaacgtgctgctcatgcaggcgatcgaggacgacgacccgatcgcccagtaccatgccaccgaagacaccgtcgcccgtaagattcgcgagatgctgatctccgtgcagatggagaagaagtattccaaggccgagattctgcagggctatctgaacatcgcccagttcggcaacaacctgtatggcgtggaaaccgcagcccagcgctacttcagcgtgtccgccgccgatttgaacgtggtgcagtccgccaccatcgcggctatcaccaagaacccgagccagtacgatccgctggtcgaggagaaccagaaggaaagcgagaaccagcgcaacatcgtgctcaagctgatgctgcaggaggggtacatcacccagaagcagtacaccgaagccgtgaacacgccgctgaaggacacgctgaaggtgcaggccgtgaacgtcggctgccaggacaccggcgactacgcatacttctgtgatttcgtggtgcatcgcatccagaactccgaagaattcggcaagactcgtgcggagcgtaacaagttgctgcaggagggtggcctgaagatcgtcaccacgttggatgtggaagcgaattccacgatgatggagaccgcgcgtaataccattccaccggacgatcccagcggcatggaaatagccatggccgcagtcaaaccgggaaccggcgaggtgctgagctttggcctgaatcgttactatgacgccactccggcagccgcgaacgatccgaccaagtcgggccagaactatgccgtcgatctggtggacggcggcggctccggttggaccattggttcgtcttggaagccgatcaacctgattgcgtggatggaagcgggccattccatcaacgacaacctccagacctcgacgtcataccccactacggacttcgcctgcagtaactattcgggcggtgccgattcgtggaacgtgtcgaacgccaggggcacaggtacagtgaacccagaaagcccattcctcggtctggtccgttcgcataacactactcaggcttccatgggtgccatcctcaaactgtgcaaggtggcggacaccgcgactgaactgggataccatgacgccgccacgggtgagaccatcgacaaaacccaggtgtatacaccatccatgatgatcggctcggtgaatgtgtccccgctgaccatggcgagcatcttcgccgtatacgcctcgaatggtgtgcaatgcaacccgattgccatcagcaaggtgaccgataaggacggcaacgatctcaaggttccatccgcgaactgccatcaggcggtggataaggacatcatccaaacactcgcttataccctgaaccaaggtacggtgcggccggatggtgccggttggtcattcagattggctgacgggcgtaagacgtttggtaagaccggtaccagtgaggatcttgcggtgtccggtggatcgttcattcctaatcagattgcggcgttcgctgtggtcggcgatgcacagaacccgtacaccaaccgtatttccaacattgccatcaacggccggtacaacagctattgggatggttcgacaatcgcgggtccggccgttaccaacttcttcaatagctacatttccaagaagaaaataccgattgacaacgattacggccagcccgtctcgaagtacaccacgactggcaagtatctgggcattggcggacgaacgttcagcgtgccgcagaccactacgaatggcaacagccaatcgcagacgaccaccaatggtcaatcccagtcgcagtctcagtcgcagaacactgggcaaaacaacacccaaacccagggcaccaattcagagcggtcgaatgatggccagtgattggtgattggcgtttgacatttggtgattgcaggccggctgagtctacgtaacatagtcgactgcgatacccaaattacgtagtttgcgggcgttacctgtttcaggtgacgcccgttttacaatacttaatgacaacgccagcgcgttcatcgaatattcgccatgaacgcgcattggaaaggggaacgatgagcaacgacgatctgacgcatgagaattttgattttcgtggattcgacgtgccggatctcaaagcggtgacgctggcttcgtcttcggacggcgaacagtccaagcagccgaagaccaagcacgaggatgcatcgaggaaccgtaggcacggtaagaagaagtcaaaatccgacgcacggtccaagaagcgggccggcgcgggcaagacgagcgaatcgtttgatgattatgaggattatgaggaaagggaagctgtgagcaaggcagataagaaagccagcaaggaccgtccgggactgtttgcgccaatgacgctgcgcgaagtgaccgtgcgtaatcgtatttggttgccgccgatgtgcacgtattcgtcgttcgcctgcgatggtaggcccacgccgttccactaccagcattacgtgtctcgtgcgttcggcggattcggcatggtgatcgtcgaatccaccgccgtggctcctgaagggcgtatcacgccgtgcgatctgggcctgtgggaagacgggcagattgatgcttggcgctggatcgtggacggtattcgcgaggcgggtgcggtgcctgccatccagctcaaccatgcggggcgtaaggcttcgaccggttgcttcgccgttggttacgacggtcagagtgtgccggaggaggcgggcggctggcccaccatggcaccgtctgaaatcgcgttcggcgggctgcgtacgccgcgcgcgctgtccgtggatgagattcatggtctggtcggtgcgttcgccgcggcggcgggccgtgcggtggccgccggcttccaggctattcagattcatgctgcgcatggctatctgatttctcagttccttgacccgctgagcaatgagcgtgatgacgaatatggtggcgatttgaccggtcgctctcgtttcctggtcgaggttgtggatgccgtgcgcggggccgtccccgagggcgtgccggttctggtgcgcatttcggccacggattgggccgctggcggttgggatttggatcagaccattgcactatccaaggtgctgaaggagcatggcgtcgatgtgatggacgtgtccactggcggcatcatgtcgggagtgtcgattccggtcaagccgaactatcaggtgccgttcgccgagcaggtcaagtccaaggccgatattccggtgaccgcggtgggtcttatcaccaagccgaagcaggcggccaagattttggcccgtggcgaagccgatgccgtggaaattggccgcgccgcattgcgcgatccgtactggccgttgcgtgcggccaacaagctgggcataccgtccacagaggtcccctacgccccgcaatacgtggccggtgcgtactgaatcctcatggggcggtgactttcccatggggcggtaaaaccctcatggggcggtaacccaaaacggcggtattctgcggaatgtgaaatttggctaaccgccccatgggacaatcaccgccccatgagggttttaccgccccatgggtaatagggcaatatgtgagttcactccacgtccacgccgacggcgtcggagacgtgctcgaatccgtcgcggcgcagcagctgggccagaccgcgcttcaacacggtgatctgctgcgggcctcggtacatcagcgagctgatgaacatgaccaggctggagccggaacgaatcttcgcataggcttgctcgggggtaaagacgccaccgatgccggcgatggcgaaccggtcgccatactccttatacaccttgcgaatcagctcggtgctggcgttggtgcacgggccgccggacaggccgccctcccaatcgcgcggaatctcgaggccggtgcggtccttctgcagattggcgatggacagcccctgcacattgtgctcggccagcacatcgagcagctccttgtactcgccccacggcttgttcaacggcatcttgaccagcgtgggctgcgggcggtcgatcttgtcgagcgccgtaaacagacggtcgagcgcttccggagtcgtggtgaacggttcgccgacgtgcgtgttcgggcaggagacgttgacctccaccatcgcggtgcggccggcggcgcggcgcattgaaatgcagtaatcctcaatgccttcgtccaaatcgccgcactggtcgtcgttggtgcgggcgatcgacacggacagctgcatctggcgggcctgagtccaagccttctcggcgcgctcgatgaccttgtccgaaccgatgttggcgaggccgacgtgcaccatcatcgaatcgtattcaggcagacggtggaaccacggcttggcgttgcccgggcagggacgcgaggtggtggagcctacggtttcaaaaccgaagccggcatggtccagcaccacgggcatgtcgcagttcttgtcgaggccggcggacaggccgaacgggttggtgaaatcgacgcccatcacattcgtttccagaatggggtcggtgtagtcgagcatcagctgctcggcgagcagcagcggcgggacgttcttgacgacgtggcagaactcgatcatctgatcgtgtgcctcatcggggcggtggttgaacacgaagttcggtttgatgatgtgcttgtagccgaaggtgaacagatcggtggtggctttgttgacggcgtcgtgccagaagctttcagaaacgtaagtcataccgcctattgtctcacgcttgggctggtgcggctaggcgattcctgcctaggcgaattggggaaggggctaccgcgtgtcgaggcgcacgcaggcgtcggctcggcagaagatacatgaatcgggatgcaccaggtatcaggcgtgactcgccgctgagcaacgcgctcgggagagtcgtcggtcgtgagtcatcgcgctagtggtcgctgcgagaatatcggttcgcacaatgtgcgattttgcgcggttttgtggaaatgaacacctgaattgcccggaattttcgagagattgtccccaaaacgctcaagccggtttggtttgtgagcttttgtgtgcgataatgttcacatgatttcgtcacaacgtcagcacctcatcttgagcaggttgcgcacgcgcggggcagtgcgcattacggcgctatcgaaggaactgggtgtgtcagcgatgaccatccgccgcgatatcgccgaacttgccgacaagggactgctgaagcgcgtccatggcggcgcggtgactaccagtaccttgctcagcgaacccctgttctctgtcaagtcccagatggatctcggcctgaaggacgccatcgcccaggaagccatcaaatatgtggctcccggcgatgtgatcgccatcggcggcggcaccacggcctatgtcttcgcccagcatctgctcgaatcgcagcagtccagcggcatcaccatcctcaccaattcgattcccgtggccgaactggtccaggccctcgaatccaaggacgtggaggtgatcgtcaccggcggcgtgatcacccgatcgaactcgcttgtcggtccgatcgcggacaaggtcgtcgcctcgctgcgtgtcaacaccgtattcctcggcacccactcggtgtcgattccccgtggcttcctgatgccgaattcgctggaagccgcaaccgatatggcgatgatggacatcgccgatcgtaccatagttttgaccgatcacaccaagtggagctgcacatcgctgtcgctgtttgcgcgcttcgaccaggtggacacggtcattactgacgacgggctcgatcccgactccgccgccaaaaccaaggatttggtaaaggaactcgtgctggcccaccagagcgagatcattgaggaaagtgagtaaacccatggctgatttcgccaactacacccccggggagtatgcgaaggagcacatccgcatcacgccgacgacgcttgccgacggtcgtgacttcttctacctggacgacgaccccgagttcgtctccggtgccaagacccgcgagctcaaggacccgcgcccgctggactaccgtttcgccccgcacctggacgccgacggcaacgaagtgccgtacgccgccccgcagatgcgccgcgacccgctgaccggcgactggatcccgatggccaccgcccgtatgaaccgcccgatcaccgccggccccggcgctaccgccaagggcaacccgctggccgcccgcaagcccggtgacccgtaccaggacggcgaagtgccggacaccgactacaacgtcgtcgtgttcgagaaccgcttcccctccatggtgcgcgtgcccggcgtctccgaggacgtgacctacgttgacggcaacccgctgtgggagaagaagctcgccgccggccgctgcgaggtcatctgctttgacccgaacgaggatggcctgccggccgatctgccggtctcccgcctgcgcaccgtggttgaggcctgggccttccgtaccgccgaaatctccaagatggaaggcatcgagcagatcttcccgttcgagaaccacggccaggaaatcggcgtctccctcgcccacccgcacggccaggtctactgctacccgttcatcgccccgaagatggagaaggaactccagcacaccgaggcctaccacgagaagaccggcggcaacctgcttaaggacatcatgaacgccgagctcgaagccggcgaacgcatcgtgatgcgcaaccacagctgggtcgcctacgtgccggccgccgcccgttggcccctcgaggtccacgtggctccggtgcgcgacgtgctcaccctcgaccagctcaacgacgaagaacgctgggacctcgcctccatgtactcgcacctcctgaagcgcggcaacgccttcttcgacaagggcgacggcaagggcatggatctgccgtacatcgccgcctggcaccaggccccgatccacgacgcccgccgcgagaactaccgcctgaacctgcagttcttctccttccgtcgtgccgccaacaagatcaagtacctcgctggctccgaatccggcatggccgcctggatctccgacaccacgccggaactcatcgccaagcgcttccacgagctcggctccatcgacatcgccgactgatagaaagaaaacatcaatgactgctgttgaattcattgagccgctgacccatgaggaaggcgtctcgcaagccaccaagctgttcgtcgatacctacggcgctgcgcccgagggcgtgtgggctgctccgggccgtgtgaacctgatcggtgagcacaccgattacaacgccggcctgtgcctgccgatcgctctgccgcaccgcactttcatcgccctgaagccgcgcgaagacaccaaggttcgcgtcgtctccggcgtggctcccgacaaggtcgccgaagctgatctcgatggcctcaaggcccgtggcgtggacggctggtccgcctacccgaccggtgtggcctgggcgctgcgtcaggctggtttcgacaaggtcaagggctttgacgccgccttcgtctcctgcgtgccgctgggctccggcctgagttcctccgccgccatgacctgctccaccgctctggctctggacgacgtgtacggccttggctacggcgattccgacgccggccgtgtgaccctcatcaacgccgccatcaagtccgagaacgagatggccggcgcctccaccggcggtcttgaccagaacgcttccatgcgttgcaccgccggccatgcgctgctgcttgactgccgcccggagttgaccccgctggagaacgtctcccagcaggagttcgacctcgacaagtacaacctcgagctgcttgtggtcgatacccaggctccgcaccagctcaacgatggccagtacgctcagcgtcgcgccacctgcgaggaagccgccaagattcttggtgtggccaacctgcgcgttaccgccgacggcatctccaaggccgatgaccagttccaggccctcaaggaaacgcttgacgccctgcctgacgagaccatgaagaagcgcgtgcgccacgtcgtcaccgagatcgagcgcgtgcgttccttcgtgcgtgccttcgctcagggcgacatcaaggctgcgggccgtctgttcaacgcttcccacgattcgctggccgccgactacgaggtcaccgtccccgagctggacatcgccgtagacgtggcccgcaagaacggtgcctacggtgcgcgtatgaccggcggcggcttcggcggctccatcatcgcgttggttgataagggccagggccacgagattgcacagaagattgctgaccgcttcgaaaaggaaggtttcaacgcacctcgcgccttgccggcgttcgctgcggcttccgcgagccgcgaggcctgatctcggaagctgatgcaaaaacgcgcgttggcgcacgtccatgaaaaaggacgtgcgccaacgcgcgtttttgcatgatttacttgtgggccagatggtgcacagcgtatcccacgacgatggccagcaggcacgatgccgaatgcttcatcctggctcccaggtgcggctactgtttggtttggtgctgtctgatcgtatccgtgcgcttcttcttcctcctgaaggaggggagcaccttttgtaagtagcggccgacttggtggccgtcatgttcggctacgcttttgtgcgtacaacggacgggttgtacgtgtatttgatggaaaaagatacgttatacgagtaacggcgtgtcgcgatgtgggtgattccggtgttctgcgagaacggcagtatggagccgaagtttacgtttgcggcgctgggtggactggtcaatgagagtgttaactattgagataaacgattaacgtttgacattaaacgattaacgatttatagtgttgaccaccgcaaagaaacagtcacaaagcaagtggctgacgggctcgtacaggtgcgtcttacatcggtacgaggaggaaacatcaaggaagaaggagcctaatcatggcacgaagaagtgttcgcctgttggcatcaatagctgcagtcgcgactatggtcacgacgtttgccgcctgcggcaacaagcaggccaccacagatgagaatggcaagccgattgtcaacattctggttcgtcgcaacgtgaccgaccatccgatgcaggacacccagtacaccaaggatctggaagccgcctgcgactgcaccatcaagtggcaggaagtctccgacaacgcgtggggccagcagaagagcgccaagatggccgccggtgaattcccggacattggcttgagcttgtttagcatggtggatgcggccaagtacagcacctatttcgaggatctcaagccgcatctggacaagatgccgaacgtcaagaagttcctcaaggcccagccgggtgccgcgaagtacgttaccgatggcaccaagatcgccatgctgccctccgaccgcggcaagggttacgaggtttccggcactcacatgttcatcaacaagacttggctggacaagctgggactccagatgccgaccacttgggacgagctcgagaacgtgctcgatgcattcaagacccaggatccgaacggcaacggcaaggctgatgaggtgccgatgaatatccgcagcctcggcttcggcctgtggagccctctggcgctgatgaactccgaaggcgtggtcacctccttcatgggcggcggcgcttccgaacagggctactatgtggacaacggcaaggttaagagctattacacctccgacgcgctcaaggacgtcgtctcctacctgcacggactcatggccaagggacttatcccgaaggatgtgctcacccgcgacgcctcgcaatacgcttcacagaccgtcagtgacggcaagaccgcgctgaccggcgtctccttcggttggtccaactacgccgaatacggcgacaagctcggcgaccagtacgtcaccctgccgccgctgaagaaggacgcctccacgcccgactcccaggtcaagtgggattattcccaggacgcctgccgctgggcctactccggttctggcctgaccgtcaacccgaacgccgccaaccaagacgccatctacaaggtcatcgacgccatgtatggcgagaagctttccgtggccggtttcttcggctctattccggatatcgtctccgatgacggcgaccaccagtacaccatcgacaaggctaaagcctacgccgaatatcctgatacccgcgccgtcgccctgcaggaccgcttcggtggctggatccgcgacgatgtgaagatggtcaacgacaccaacgccgaccaggtcactgcgtccgacttggccattcgtgaggcgcgcaaccgcgtcgacggcgtcaaggatgtcgtaccgatttacgtgcgcccgaataccgaggattccaacaccctgcagaacaacaacaccgccatctccaactacgcgaacaaccagatcgcgaagtgggtccagaagggcggcatcgacaaggaatgggatgcctacgtgaagaaggtgtccgaaccgaccctcggcctcgacgccaacatcaagatttggcagaagtggtacgacaagtacaccaagtagccaagtaataccgcggggtccatcgcacgggttcgtttctctcccgtgactgccgccggaccccgcacttttgttctctagcaatcatcctaaattggagaccaacatgagtgcacaaacatcgcaaggcgttgctgcacggaccgtggcgatggaagcggctcccgaccgcaagaaaccaggtctgctcgatcgcatcgccgaccatttacgtcgctactggcagttgtggattctttccgctccggcattgttcttcgtgggactgttctcctacgtgccgatgtggggcatccagctcgccttccgcgagttcgatccgaccaaaggcctgaccggcggcaaattcgtcggtttcaaatacttcctggaattcttccacaacccgctgtttggtgagattatgaccaacaccatccgcatttccctgtggacattggttatgggcttcatcttcccgattatcctggccctgctgatcaaccagatcggttctaagaaaatcaaaggtttcgtgcagacgattacctacatgccgcacttcatctccgtggtggtcatcgtctccatgctcaacatcttcctgactcctggcaccggaattctcggtcgcttcttcggcgacgaatcactgatgggttccaccagcgccatcaccgcggtctattggatttccgaagtctggcagcatgttggttggaactccatcatctacctagctgcgctcgccggcgtggacacatcgctgtacgaggcggcgaagatcgacggtgcaggccgtttgcagttgattcgctacgtcgatattcctgcgatcatgccgacatgtgcgatcctgctcatcatgaacatgggctccgtgctcaacgtgggcttcgacaagatctacctgatgcagaactcgctgaacatgccggccaccgaagtcatcgccacatacacctacaaaatcggtattatcaacggccagtactcgtactcgacggcaatcggtctgttcaacaccttggtcaacttcatcttcctgatcaccgcgaatgcaatcgccaagcgcgtttccgatacgagcattttctagaagggttttatcatgtctgcaacaattgaggctgttacccagaacaagaacgacattccctggaacaagcacgtgcgtcagaagcagaagccgggtgactgggcggtgtcgggcatcatcaatgtgctgctgctcctgaccattgtggcggtgctctacccgctgtggttcgtggtcatcgcatcattttcaaatccgaacgccgtggccggcggtgaagtgctgctgctacccaagggtgtgaccttcgctggctatgctaaggtgttcgccaaccagcgcatctggcagggctatctcaacaccatcatctattcggtggtcggcaccgcggtcaacatggcagtgaccattccctgcgctttcgcgctatcccgtcgcgagttcaagccgcgacgcgtgatcatgttcctgttcaccgtgaccatgttcatcgccggcggcctgattccgaactacctgctgtacaagagcctcggcatcaacaacagcatgtgggtgttcatcctgcctggcgcggtttccgtgtacaacgtgatcgtggcccgctccttcttcgagacctctatccccgaagagctcttcgacgcggcccagatcgacgggctgagctactttggctacttcttcaagattgtgctgccgttaagctccgcgattctggctgtaattggtctgtactactttgtcggccactggaacgacttcatgacgggccttatctacatcaccgacgacacgaagcagccattgcaggtggtgttgcagcagttgctgctggtggcgcagggtactggaaccaatgtcaacgcggctgcgcagcagcaggccgccgatcagatcaagttcggcatcatcatcgtctctaccctgcctctgcttgtgctctatccgttcttgcagaagtacttcaacaagggtgtgatgctcggcgcggtcaagggttgagtcaaacgcaatccgacgagagacaaccaatccaaaagccagccgatagaaaggattcgctatgcttgcccgcttctctgtggcctacgagcggttctgccgtctgctagtcgcgattttcgtggtcaacgtggccatactcgcgcacactctgatgggagccgtcgtgctgggagttttcccctcgttcgcggctgcgcaggctacgttccgtgcgtgggtgctttctgaggaccgttcaatgcgggccaaggaggtttggacgacgttccacggcttctggaaaagcgaagtcaagagtgcgaatcttttcggttggcctttgattattctctgggccgtggtcatcgtcgactactacgtgatgaactggcatgctcgcggcgatttcgacatcatggtttccggcgtgctgctgctcatcatcgtagttttggcagtgttctcgtccttggtttgggtggtacgcgcgaactatgcggagcgtcccgtctggattgttcgtacaacactggcgatgattgtggcacgcccgttgtgcagccttctgcaggtcgggctgctgattctcactgtgcttgtatgggtgcaatggtctggaattctcatggtgttcggcttgtcgctgccgatgttctgcacagcttggattgtttattcattcggccgtctgcctggaatggacattcatgaccgcatggaacagagcacgggccgcgcccgaaaccagacatcgtgacatgttcgaaaaaaaggggggtgataaaatggtacagtcgtcggtaagtcaacgagtgaacaggtccaaacgattggtgtctatcaaagacatagctaaggaaacgggtgtttccgtatgcactgtgtctttggttatgaacaacaaggatcacaatcgcgtcagcaaggcggttgcgcagaaaatccgtgcgactgccgagaacatggggtacaagcctaattccgtggcgcgcaccttacgcaccagcaaatccaatactctgggattcgtcaccgatgagatagccacgactccgtatgcgagcaaggtactcgaaggtgcgcaggatgccgcgagcaagctcggatacatactgcttaccacgaacaccaataatgacgccgaactcgagaaccaagaaatatccgccctgctccgatataacgtggatggcttcctatacgccatgatgttccaccgcaaagtggacattcccgaagtcttggaaggcagcccgaccgtggtggtggacagtgaggatgcagcggggcgagttccctcggtctaccccgatgatgaactggcggggtatgacgccaccaaccgtctgatccaagctggatgcagacgcatcgtctactacggttccgcaacatccatcgtcgcgcaagagcaacgtctgactggttaccgacgtgcgcttgcggaagcgggcattccattcgatgacgctttggtcgtcgaagtatcggaatttactaacgcggacgatgaagcggcgcgggtgttcgacgaaatcaagccggacggcatcttttgtttcaacgatgtgcgcgccactttcatctacgaagccgcacgcgaacgcggagtgcgcatcggcgctgacgtgtcggtgatcagcatcgataaccagccgttcatcactaatgtgatcaaaccatcactgactacgctggaactaccccattatgagatgggttttgaagcggttcggcaacttgtcaccatacttgacggcgacaaggccgtagccgatcttgagtccgatcgtggcatggcggtgcagaggcaacgtgatggcagcaaaacagcattgcgctgccgcatcatcgaacgcgattccatcgtgtcgtgacggacgtttcctttttccgtatttgtttttctaattatctgtttttcaatgcgtagccacatgatatctgatcatgtggcgctgtggaggaaattattatgcctgacaactattccgttgccatcgaaaccggcggctaccgcttgctggaattgttcgccgaaagatgcggcgatgacgctgccgtcaccattacagacggggacggccatcaaatcgccagccatgccatgccggtggccgagcgtcgccaccgtttcttgattccggtgccgacaaacgtgtgtctcacggtgagagcgcgccaactgaccgtgcggttcgcctacttgtccgagtgtgagaatcttcttgatgaaggcgtgcgtttcatcagcatgaatccatatgacaatgaatgggatacgcagccgacgctggatcagatctatgatcgtttcgctcgccctgcggcgcatttcgagccattcgctcgctggatgaatgatcctaacggcctgtgtcgtttccaaggacgctaccatctgttctaccaattcaatccgtatggttttggctgggacaatatgcactggggccatgcagtgagccgcgatctggtgcattggacgcatctgccaatcttcctcgaaccgcagccggagctgcatatcgacgaacgcatcgttggcggcgcgttctccggatccgcggtgacggtggatgcgtgtgacaatccctgcaagggtgatgatgcggccgctattcgcctgtatctaacccggcacctggagactcgcggagacgaatcgtctgttactgaataccagaccacctgcttgtgtgaggatggcgtgcatgtgagtgtcgaatctccggtcgcgttgcgcgttaacgatggttttggcttcgatttccgtgatccgaaggtggaaaccggcatgggcggcgaggcgatcgatccggaacgcgcttacatggtgaccgccacgaatctgccggtcgccgaattcgatactgatgctgtgtcctccgcggcgcctggcatcagcgtacagggtacagacggctggtttacgtgcggtccgcaaggcatgcccggcaccgacaagcccaatatggatacggtgcctgccatggcgctcttctccgcgaagaaaccgctcaagcgcaacgtgacgtggcagtatgaaggaccggtgctcgccgacttcggccaccagctgtcacgtacctacgaatgtcctgacctgttccagctcgacggcaagacggtcgccatcggagctttgatgcactaccgtgacaagcaaggtcgtttccagcaggtgcgttggtatgttggtgatctcaaggacaccgccgatggcccacgtttgcaggtagggaacagcgattggtgcgatttcggtaccggctactacgcgacacaaagctttgctgccgacgacgggcgtcgtatcgtgttcggctggtataccgactttcccgcgatgcgtgtggaaaagccgtgcatcgctaacggcatgatgtcgctgccacgtgaactgcacgtgcgtgacggccgcttgaccagccgtcctgtcaaggaagtgtacgagcagctgctaggcgatcgtttggaagcgcatgcagacgaaaacgggaccttctttattgtgccgaacaacgcgtattacacagacatgcatctggctgacgatgacgatttcacaatgctcatcgcgactggtaccaattccgccaatggtaattcgatggaattgcagctgcagcgtcgcgacggcgtgacccgactggtcacgaagggaacagtcgtggacgacatcgatttcgatagcggcatcgccgatgtgcgtcgcgtcgaaatcttcttcgaccgtaatgtggtggaagtcttccttaacaacggcgaagcggccggcagtatgctgttccaaggtgcggacggcgatggcgagttccgttttgttgctgacggcaaggtcgattgcgtggatgtgcgtgtgcttgacggcatctggcggtgacatacagttgctgcagcggtaggtggtaaccggcagtcatctcagtatgtaaggcaaaacagacgaaaggcacgtgttttggcacgtgccttccctatacttgagggcacgtccggcaattcgccaagacggtaactggatattcacacctcacgtttagggagttccatgaacaaggcaatcatcaccgtcgtcggtcaggatactgtcggcatcatcgcacgcgtctgcacatacctttccgaacatcaggtcaacgtgcttgacatttcccagaccatcatcgacggttacttcaacatgatgatgattgtcgactacgccaacgcggacaaggacttcggcgcgatggtcggcaaccttgaggacctcggcgacgacatcggcgtgcgcatccgctgccagcgtgaggaaatcttcaccaagatgcaccgtatttgaggcggcccgctcagcaggccgccgcacgcgaggaggcggaaagcccggtgggctttccgctgacggagccatccttatccctctgatgagggtgaccgccaaactagtctttaaatatcctgtaaggaacaaaccatgctgaacatcatggaggtccacgagaccaatcagatgatcgagcaggagaagctcgacgtccgcaccatcaccatgggcatctcgttgctcgactgcgcctcggacgacgtcgacaagacctgcgacaacatctaccgcaagatcactacctatgccaaggacctcgtttccaccggcaaggccatcgaacgcgactacggcatcccgatcgtcaacaagcgcatcaccgtcaccccgatctcgctggtcggtgccagctcctgcaagacgagcgaggacttcgtcaagatcgcccacgcgcttgacaaggcggccaaggaggtcggcgtcgacctgatcggcggctactccgcactcgtctccaagtccatgaccccggccgaggagttgctcatccgctccctgccgcaagccctttccgagaccgacatcgtctgctcgtccgtgaacgtcggttccaccaagaccggcatcgacatgaacgcggtcgaactgctcggccacatcatcaaggacgttgccgagcgcaccgccgacaacgactcctacggctgcgtcaagttcgtggccttctgcaacgtgcctgacgacaacccgttcatggcaggcggcttccatggcgtgaccgaaggcgacgcggtgattaatgtcggcgtttccggcccgggtgtggtctcccgtgcattggacgaggccaagggcaaggatttcgagttcctgtgcgagaccatcaagcgcaccgcgttcaagatcacgcgcgtgggtcagcttgtggctcaggaggcttcccgccgcctcggcatcccgttcggcatcatcgacctgtcgctcgccccgaccccggccgtgggcgactccgtgggtgaagtgctggagaagatcggcctcgagcaggtcggcgcaccgggcactaccgcggcgctcgccatgctcaacgaccaggtcaagaagggcggcatcatggcgtcctcctacgtgggcggcttgtccggcgcgttcatcccggtctccgaagacaagaacatgatcgacgcggcaaccaatggctgcctgaagatcgaaaagcttgaggccatgacctgcgtgtgctccgtcggcctcgacatgattgccattccgggagacaccaccgcagccaccatttccggcatcatcgccgacgaggccgcgatcggcatggtcaaccagaagaccaccgccgtgcgcgtgattccggtggaaggcaaaggcgtaggggagatggccaacttcggcggcctgatgggctatgcgccgatcattccggtgaaccagaccagctgcgaggccttcgtgacccgtggcggccgaatccctgcgccgattcacagcttcaagaattgattcggtagggtatctgctttcagagaggtacatttggcccctcgcggagagctatctgctttcaaagaggtacctatatgcggaaaccccgggtatgagcgttggaatatcaacactcatacccggggtttctcgattgcggtacctctttgaaggcagatagcattctgcaaacgctcgaatgtacctctttgaaggcagataccagctcgaattacctttctggaggtctattcccgtttcgaggggctgattccgacctttctggaggtctacttccgtttcgaggggctggtatatatgaagaccccgagtacaagcattgatatttcaacggccatactcggggtctcgtcctttgacagccccttgaagcggcagtagacctccggcggatgccaaatccgcccctcgaaacgcaggtggccttatattcagcgttcatcactgcgcgaagctcagtgtttccgctctcgcgcctgtcggcgttcgctcggcgtcgttactcgaaggcccaccgggccttctcctcacgctccgcccgcaaaattgagctggcgccaggcttcgtagatggcgatggatgcgcagttggtgaggtttagggaacgcagggacgggcgcatgggcagccgcacttgttcggccacatgagggccctccatgatgtccatcgggtcggggatgtcgccgggctcggggccgaacagcaggatgtcagtcggcttgtattccacctcggtgtagagcttggtggcgtgcgcggtgaacgcgatgatgcgcgaattgggcatcgactccaccaggttgtcgaaattcgggtgcaacaccacgtgggccatgtcatggtagtcgaggcccgcacggcgcagcttggtgtcgcgcaggttgaagcccagcggctccaccagatgcagaatcgtgccggtcactgcgcacaggcggatggccgaaccggtgttgccgggaatacgcggcgagtaatagcacaggtgcggcgtcacggtttcggtggcggcggccttctcggcggaaagcatcgcgtccaccacggagatggggttgccgtgtgcgtcggtcaccagctcgtccggcccgtaattcgacttgcgatagccgtattcgaacattttctcgactttggtttcgggatttgctggattcggtgtgctctgggggttgtgttttgcctcgttcgtcatagctgctaagaataagaacgatgaacgacacagcaatttctttgcgattgggagcatggtgggaggccaatgcgcgtgacttgccatggcgcttcggacgggccacgccgtggggcgtgctggtcagtgaggtgatgagccagcagacgcagatgagccgtgtggtgccgtattggaacgattggatggcacgctggcctgacgcccgtgctcttgccgcagcacctaaagccgatgtgatcaccgcatggggccggcttggctatcctcgccgtgcgctgcgattgcaggaatgcgcccgcgtggtggc

SEQ ID NO: 364 - DNA, 9711 bp, Unknown
  R42_10m  MAG No. k141_25239
accaccacattgaggttcgggccggagcggcccacggaaatcgtgatatggccatccttgcggccttcgaacccatgctccaccgaattggtgatgagctcggtcagcacgagggacagcggcgtggcatcctgagcgggcatcatgccgaacttgcccatgtagttgatatcgatgtgctggtctttcatcgtggctaggtccacggccatgcgcagcaggttggcaatcaccttgtcgaagtcgacgacctcgtcggcggtctggctcaatccctcatgcaccatggcaatggtctgcacgcggcgttgcgcctcctgcaattccttcttgacctcatccgacttggtcttacgagcctgaagcctcagcaatgcggagacggcctgcaggttgttcttgacacgatggtgaatctcggaaatcgtagcgtccttggtctgcagctcctgctcacgacggcgcagctcggtgacgtcacggcatagcagaatcgctccgatacgaccgttgttgtcatataagggcagcgagcgtatcgagacggcggaacggttggcgttgagttcggagtcgaccgcggctttgcccgccagcaccaacggcagggtttccggaacggggtcgttctccttcaacagctgtgtgccgagttcgctgaggtaatggccaggcatggtggtcagcaggccgagacgcctaaagcagctgatggcgttcggggctgcgtatcgaaccacgccgtccatggtcaggatgatgaagccgtccgccacgcgagcgatatggcgctggctcatcaccgaatccttgtaggggaactggcctcgtggaatcatctcgtacagctgtttgcccgcgttaatgctttccgactcatatcgaccgttggattctcgtgtggccatattggtctcacgcacgaccaagcccaaggtcttgccattgtgccgaaccggcgcgtacacgttgcagacggtcgccttgcccacggttctcaataccgtggagcggaacaccacgctggagagcatggcggcgtccaattcgccgaccatgtcatccggcatgacgtttcccaccacgtcttccgcccgtagcgtcatcacggtggatgggcggcattgttcggccaccacgtatttgccgtcaccgttctgtaccagcagcagcaggtcggcaaagctcagatcggcgatcacctgccaatcggcaacgagatgatgcagccactcgcggtcctcgtcgtcgaagtcggggcgcgttgcaaggatgtgtgaaaaatcagccatgcccctatcatacgcagacacgtcgccgccattgcggcaagccacacgggcaagtatgacgactattacgacatcgcatcttcaataccgcaccaatcgcgttgcacggctgcccgccgttcaggcggtcatcgcctcatacacctgagaggacaatgcggcgatctgctgctgcgcggttcccgagaccactcccgaggtcataaccaccatcacataatcccgttctgttccgtccgcggccttgccccacaccacggcggcatcattttccacgccggccagttcaccggttttattggccacctgaatgccagacggtactccggcgggtattttggcgcgtcgcgtctgcccgagcaatacgtcaagcatggagcggctggcttcggcggaaaccagtttgcctcggtacaatgcagcgaggaatctgccgcaatcggaagccgacgtccagttctcggtgccggtcccgtctgtgccggcatcggacaacacccgcaactgcttggatgagctgaagccgtatcgggcggccgtaccagtcacccgttgcatgcctgtggccatgtcgccatcgccgaccatcaataccagctgattggtggcagcgttcgagctgacggtgatcatctggttgatcagcgaggtggtatcttgcccgcccgcggccaaggtgccggcatgttgcttatcgtacacggcaagcatcacgtacagtttgatatccgaagccgccaccatgggctggccgccgacgctcacggttttgcccgtggccagatcctcgacatacaccgaccaggtgcctccattgccggccacagctgccgtgaccgccgaggacacatctgacatccgcttctcttccgccaccgtggtcaggtcgggagcaggtgccgccttgcgctccaaggtgacatgcacagggcgttgttcgtgtttcgatgacgccgttgacgacgatgccgacgctgttgccggtgagtccgatgccgaggcgacgggcgatgttttggcgtgcgatgcgccgagaccgttatgcgcgtacatccatccaccgacgccgattaccaaagcggcgatcagggcggcgatcaggatcaatcccacgacgctgcctgttgcacgcgtgtcgctactatgcttggtatgccgagccaccgtcactgccccaatgtcttgtcaacactggccagcacccggctcatcaggtccgcggccaccgactgcccctgatattgggtgacaacggccacggcggccttatgaccattggcttcgacgatggcgaagtaattccaggtgtcctggatgccttggcctcggtgggcatgcacgatcatgtcggacggaatggttacgccttcggaagcaatgtccacgttcatcaatgacgcgcctcccttggcgtccactgcggcgagcatgcgggccgcatcgcgggaggaaccgtaattctcataaccggcattgctggccgccacatcgccgaaatcgcggttgaacgaggtgcccttatacccatgcgaagatgcccacgaattgacgccgctccagccacctaccgccgcggccgccatattgccggcattgttgtccatggaacccatcatcgcgtttgcctgcgctttggcgttgtcatcgccattgtcctgggccgcaagatagaccggcagatagagaccggcagccacgaattgcttgccggactgcgacgtggtcgcgatggtggcgtcctctgaggaatcggcgtatgttccatcgatgaccatggcggagacggccacatcggaggacgagtatgaatccgcgatgtcagacaactggctggatgtgatcaccggagtggaaggcttcgacttctccgtcgagcttttcttggacgaatcgtcgctgttcttgtctttggcgctatcagacgtgttcttcttggccttggacttggcgtcagaggaatccgtcgtgccatcatcggcggaatccgacgcatcggacccggtcgactgtaccgatgtttgcgcctgcggctgagctccccacaatcccatgctatgggtgacgaacaagccgatgaccaacgccacgacgcaaatcagcgcgatgagcacaatcaccaccgctttggtgtgatcgccgccaggacgcccggcgggaggttcaggagaagcaggtgccgcagggccagcggtcatgggtcccggtgccataggccccggcaccgcggaacccggcgccgttggcggcgcgacggcgggcaacggcgccgccggctgcttcaccagcgtcagcgcgttatcgtcataggcaggggccgccggattggcctcgggctgctccaatgggcttccgcactgcgaacagaaggcatttccttgctcgttggcaaacccacactccgtgcaatacaccatcaccgaaccccttattgctgtgacgttctcatcttcggattccatagtatcgccaccattgggtaatagtgttcgtgtgagtcggtattgacaagcataaaagttacgctaacgtaggttacggcagcgtaagaagcgtatcgtcaactcgtgaaacgggggcatcaccatggcatcaacaaccgacgacgcggaaaagacgatgcatcacgacgctcataacagcgcgacgattgcagaggatgccatcatcgcatccaagcgtcaggcggctatcgaggcgcgcgaacaggcgttgcaggccaaggctgatgccgtacgggccaaggcccagttcaaggccgaggccattcgagccaaagccgaggagaaggcccggcacaagctcgccaaagcggagcaccgtgcgctgaaaatcgagggcattgcccctgcggaagtggaacgcaagattcgtctcgacgtgcacggacgaccaaagccgttgatgcgcggctggattcacgcgattgccgctcccctgtcattggcggcaggcatcgtgcttatatgcctggcacatggcgcgagtctgaagtgggcgtgtgccgtgttcatgacagcgtcgctgattctgttcaccaattcggcctgctaccatctgggcgattggagcccgcgcgtcaccgatgtgctgcggcgtatcgatcatgtcaacatcttcctgctcattgctggcacgtataccccggtttcgtttgcgctggaaccgttctggcgcaatgtgatcatcatatcgatgtgggcgtgcacggccatcgccatcgtgattcatgtgatctggatcaatgcaccacgctggctgtatacggtggtgtacatcatcttcggcatctacggcctggcttatatggtgatgttctggaattcgccgtatgcggggccagccgtggtggtgctgctgtgcgccggcggtgcctgctacatcctcggcgccatcgtctacgccttgcgcaagcccgacccttggcctcgcgtcttcggcttccatgagattttccactgcggaacggtggccggatatgcctgccatatggtggccatctacatggtgatcgtctcgctgtggcaataaacgctacgacatataagtatgcccccgcctacgggggcatactagtcacttataactcaggccagcggcttggcggccttgaccgtcacggacagctcgcggccgttcggtgcggtgtaggaaacgacgtcgcccaccttggcaccttcgatggccttgccaatcggggaatccggggtcatgatgtcgtagtcggtgccggccacgatgtcacggctgccgagcacgtaggtcatctcgttgccgttgagctcgatggtcaccacagagccctcgcccacggtgccttccggggcattctcgatgatcttggaatcgcgcagcttgacggtgagctcggtgatgcggccctcgttcttgctctgcgcctcacgggcggcctggtagccgccgttctcggacaagtcgccctcggcacgcgccacggcgatcttgtgcgcgatttcctcacgcagctcgccttcacgatgggcgagctcttccttcatcttgttgtatgcttcctgcgtcagcaggtagaccttgtcctcagccatatcgtcctcctgaaccgttgtcgatgctgaaacaattttcgttatttatgacaaaacgccggctatgaccccggcgttcgtcatgtgctgacctatggtcagcgggtggaaatgatgtcgatgacgaacaccagcgtgtcctcgccgccgatgccggcctgcgggatgccgcgggaaccgtagccgtattccggcggaatggaaaccaccagacgcgagcccacgttatggcccggcacggtctggtcccagcccttgatgacctgtcccacgccgatgccgaagctggcgggctgatgacggtcgaagctggagtcgaatggggtgtccttaccccacaccacgccgtggtagttcacggtgacggtgtcgccgcgacgcacgatcgggccgtcgccctcggtcagctccacaaccttgaggcccttcggggcttcgggcgccgggaactcgataacgggcgtggtgccgaattcggcgttcacctgaggcatctgatctgccattagtcctccttcaaagacacaatgcgccctaccttagcaccatcggcgaatcggcggtagtccttcatccctgtgcgatacgacacgctggccgtatacgtcgattccggtcatcatgctggtgaataccagacatgtcaatcagcattcgacgacattgacggcaagcccgcccttggaggtctccttgtatttggccatcatgtcttcaccggtctgcttcatggtttcgatggcctgatcaagggtcacgatatgtgagccgtcgccgagcatggccatacgcacggcgttgatggcggtgttggcggccatggcgttgcgttcgatgcatggaatctgcaccagtccgcccaccggatcgcaagtcaggcccaagttgtgttcgatgccgatctcagcagcattctccacctgttccggcgtgccgcccatgactgcggcaagtccggccgccgccatcgaacaggccgagccgacttcgccctggcaaccgacttccgcaccggaaattgaggcgttgcgtttgaacaggtatccgatggcaccggcggtcagcagaaacgtgaccacgccctgttcattggcgttgtccacgaaatgccagtaatagtgaagcacggcgggaatgatgccggcggaaccgttggtcggagcggttacgatgcgcccgcctccggcattctcctcagagacggccaaggcgaagagatccacccatgcggcgtcggaagactcgagcacggcgtctttgcgccggctatcgcggcgcagcacatcggaattcgaagcgagacgccgatacatcttcggcgcgcggcggggtacgtcaaggccaccgggcaatgtgggctccgccgaggtgcatccgtggtccacgcaggcgcgcataacacgccagatggcatcaatatcggatcggacctggatgcctgagcgtgaagcggtttcgttggcccatacaagttcggcgatgctgagatgatgttcccggcacaacgacaccagttcggcgcatgatgagaacgggtagggtgcctcgacgccgaaatcagtggatgatgattcgtccgcgtcggcaaaggaggtgccttccggaggacgttcatgaatgccgatcatcgggtcttcgggagcgcctttgcgcacgaatccgccgccgatggaataccagacctgttcgtcgaccaagcttgcggcggcgtcgaaagcctggaatcgcatgccattggggtgcgcggccatgcgcttccattgttcgaacaccacgtcgcggtcgtagtcgaaatggatgcgtttgaggccggcgaggttcagagtatcgtccaacgcgcaggtctcgcggatgcgcatcatgtggtcggtatccacggtggccggcagattgccttcgagcccggccatcgcagcacgatcggtgccgtggccgagaccggtcagcgccagagaaccgtaaagcgtgattttgacacgtgcggtgcgatcgaccaaatggtcggccagcaacgaggaggcaaaggcatgtgccgcgaccatcgggcctacggtgtgcgaggatgaaggtccgacgccgatggtgaacatgtcaagcacactgaacatttggctccttctcccctgctggttcggcatgccggtgtcaccaggcgtcatgccatcacgatatcgtattccagcctagcgcccggaatctttcgctttgcgcgatgatggccgcgcgcgtcgtgccggcgagcgataagtcagtcagtgagatagtgcggagaacatcataaccagtacgatgataccgatgatggccaatacgatctgcaccaccatcagcccgatggtcagtcccttcttggtggcgattttgggtgcgtacgcctgtgccaacaggaaggcaatgaagccgaacaccgcgtagttgacggtcagggccatcacatcgctgttcgacaacaccacgccgttcagcggctggttcagcgtgttcatcatcgtgctcatcacgaacatgccccacacaccgtagccgattaatccgacgacgccgtacagccatggcttgagtttgtcgttggcacgcagggtcagggcttcggcacaccacaacagggcgaagccgacgatgtaggtgaacgccacggcgatcagtatcacgatagtcgcccacggcaggagtgcggccacattgccgatcatggacagatagaatcccgagcaggcgatggcaccaacggtgagtgcagtgcccgcaatgacggcttgggcaagcatggtgggcagggcgccttgttcgactcgttcgacatcggtccagcgtgaagccatgtggattcctcgtttcatcaggtacatcgtcacaacgccacatagcctaacggccttttgtttcggccttataagctctccacatagtaagctgcgagcccctctgacgaggggagctgtcggcgaagccgactgggggagagaccgcggcacagccgcaaaaaacggcatcggccacaggccgatttcaaggtgcctccggtgggactcgaacccacaagccgaagcgatcgattttaagtcgactgcgtataccatttcgccacggaggccaacttttctattataagctatctcctgccctgagcattgcttgcgggttgctgcgcttcgtgcagccgtcgcggcatagccgctcccttcgcctacaaacagcccagtgggctgtttgtagcagccggtagcgatagcgtcgccggcgtcgcatataacgcaaacagcccaccgggctgtttgcttaacggctcagcccgctggaggcacttaccacttacgctattgagccagcaaccggcgaccataatcgagcacaatgccgtccagcagcccgtgttcgctggcgacgaacgaatcgatggcttcaccatgatcggccttggcggcttcgctgacacgcgccagcacacggctccagaccacagcgccgccgccgaccacatcgatacggccggggtggatggtcttgtattcgcggcgctcggcgcgcgtcatcctaaggaacttgtcgtccacggcataggcgtcttcaaggctcaaccgatgcccgtcgaccacggtgtgatcgtattctttcaatcccatagccaaggcggtcatcgtggtcaccgtgccggacacaccgatgatggtacgggccttgcctgcgtccacggtgcggaaggcctcatcgatatgctcgtcgatgtccgcaacggcctcatcgatctgcgcctgggtcggcggatcgttggtcagatgacgttcggtcatgcgcacggaaccgatgttcatggagaatgcgccctgaacctgggtggtgggcgcactgacgccgtcgccaccgatgaccagctcggtggacccgccgccgaggtcaaccaccagatagggggcgggcagatcgtcgcgattgaccacggaagtggcgccgaggaagctcaggtcggcttcttcagtgccgggaatgacttcggggcgcacgccgaggatacgttcgatctcatcttcgaattcctcgcggttttctgcatcgcgagtggcggaggtggcaacgaaacgcaggccgtcgatgggatgctcggcaatcgcaccggcgaattcccgagcagccgcataggcgcgttccaacgcttcgtcggcaaaacgatgggtcttgtccacatcctgaccaaggcggatcacacgcaggatgcgcggcaccacctcatgcatgccatcggcatcgacacgtgcgattttcagtcgaatggagttcgtgccgcaatcaatgccggcgacggttacggattccttgctcattgccttctcctcgtatcccttagtgcgtatgaatgg

SEQ ID NO: 365 - DNA, 55069 bp, Unknown
  R42_10m  MAG No. k141_26005
atgaggcaggtgaagccgcggtccttggccaagacctgggcttgcggcgtgatggtttgtgcggcgaaaatgccatgcaccggggccagcagcggatcgcgattgagcagttcgcagtagcgagtcagctgctcgacgccatcaatgccgccgtgacgtttgatttccacagccacatgctcgccctcggcattcacggccatgatatccaccggaccaatggcggtagggtattcgcgacgcaccagcttggctcccttgccgatacgctcgatctgctcggccagatagcgttgcagatggtcttccacgccatccttgatgagacccggatcttcgcccagatcataggtttggtcggaatagatgtgttgcagcgtcacttcaagaatgtcagagcccttgtcggcgctgacacgtagcaccttttccggctcaccagcggcgacactttccggggaatgcgtcgcggaatcaccatccacagccccaccagcgacactttcccgggaatgttgcgcggatttggcggctgggtcgatctcacgaatcgtgcagggcgcggtcatccagttcagcggcttgtaggagcccaattcggagaaaatcaacaggctggaatcagccttgatcagcaatacacgcttggccaggggcagtgaggcgttgaggcggcccgaatactcggccgaacagtcggcaacaataactcgcataggccaccactgtagcgcaacacatggcatacatagcaaaaggggctctctggaaaaccagagagccccttgaggagttggttcagatcactcggcggtgccggagtactggacgtcgtggccgcgctcgaccgccacggtgagtttgttcgagtcgaaggagatgaatccgtcggtcacctcgaacatgtggcgatcgccatcgggctcaaccacggtgagcgtaccctgcttgatcaccgtgagcacaggctcatggtcgggcaggatgcccatgccgccctcagaggcgggaatggtcacgctcgtcgcctcgccgtgccacacagggtggtcagcggcgacgatgttgaccttcatcgtggttttttccgcagccatcacgcacccagttccttctgcatgttgtgccacttctcttcgagatcatcgatgccgccgataccggagaacgcctgctccgggacgtcgtcgtacacgccgtcgcagatgcgggtgaaggcttcgatggtctcgtcggccggcacgtaggagccggggcgaccggtgaacttctcggcaacgtagaagttctggccgaggaactgctcgatcttacgagcgcggttcacggtggtcttgtcctcttcgccgagctcgtcgataccgatcaaggcgatgatgtcctgcagctccttgttacgctgcagaatcgccttgacgcggttggcgcagtcgtagtgagcctggcccacgtaacgcggatcgaggattcgcgaggtggagctcagcgggtccacagccgggtagatacccttggaggcaatgtcacgagacagctcggtggttgcatccaagtgggcgaaggtcgtggccggggccgggtcggtgtaatcatcggccggcacgtagatggcctgcagcgaggtgatcgagtgaccacgggtcgaggtgatgcgctcctggagggaacccatctcatcggccaggttcggctggtaacccacggcggaaggcatacgacccagcagggtggacacctcggaaccggcctgggtgaagcggaagatgttgtcgatgaacagcagcacgtcctggttctgcacgtcacggaagtactctgccatggtcagtgcggtcagcgggacacgcagacgggtacccggctgctcatccatctggccgaagaccagtgcggtcttctcaagcacgccggcctcggccatttcgccgatcagatcgttaccctcacgggtacgctcgccgacgcccgcgaacacggacacgccaccgtggttctgagccacgcgctgaatcatttcctgaatcagcacggtcttgcccacacctgcaccaccgaacagaccgatcttgccgccctgcacgtacggggtcagcaggtcgatgaccttgatgcccgtttcgaacatctgggtcttggactccagctgatcgaaggccggcgggttgcggtggataggccaacgctcggagacggtgatggtctcatccggcttcttgttgaggatgttaccggacacgtcgaagacgtggcccttggtcacgtcgccgaccggcacggagatcggggcgccggtgtcggagacggaggcaccacggaccaggccgtcggtgggcttcagagcgacgcaacggaccgtggaatcaccgaggtgctgttcgacctcgagggtgatctcggtctccttcgcctcgccttcttccttggcgccggtgttgacgatcgttactttcagggcgttgtagatgtcgggcagatgacccaccgggaattcaacgtcgataaccgagccctggacgcgggtgacgcgaccgttggtaggctcggccgcagtggtctggttgtcagccatatgcgttcctactcttccttcttggtcagcgcgtcagcgctgccgatgatttcggtaagttcctgggtgatcgaggcctggcgggaagcgttgagcttgcgcgtaaggtcgtcgatcaggtttcgtgcgttgtcggttgccgtgtgcatggcgttctggcggcttgcggtttccgacgcggccgcggtcagcaggcactcgtggatgcgggactgaatgtacttcggcagaatcgcgtccagtaccttttcgaggctgggctcgaaagtgtacagcggagcgacatccgcagtagccggtgcctcttcatcaggatcgggcaccttggtctcgtttttcacgatttcgaccggcagcatgcgcagcacgcgcaccttttgcaccaccatgttgatgaactcggtgtagacgatgtagagttcggaaactccacctttctcagccggcttcatgtaggcgtccatcaaagtgttggagatcgtttcagcaatttccacgccgggctggtcggtgtcgccttcccacgtcgccgcgatgtcacgattacggtacttgtagtacgtcgaaccgcgacgcccgtacacgaacagctccggctgcttgcctgccgcatcgaggcgggacagcagcgactccgtttcacggataatcgaagaggtgtacgggccggccataccacgatccgaggtgagggcgagaacagccacgcgcgggttcttctcgtccttcaccgcgatcggatgcgtgatatgggtgtgggccaccaacgcttgcacggcatcgaaaatcgcatcggtgtacggcttcgcgttcagggccacatcacgggccttggcgatatgcgaagacgcgatcatctcctgagcgttgaagatcttcgccaacgactcggtggagtggatgcgtgatttcaatgcgagttgcgagcccatggcttacttttctcccgccacgatcttttcctgatcaaccggcgcggccttgtcaacgtccggcttcttctcgaccagcggcttgccggcggaagagacgaacgtcgaacggaactcgtccacggccttatcgagggcagcctcggtgtcggcggtgaattcctcggtctcgcgaatggtcttgaggatatcggtgttgtggtcgatgtagtccagcagtccctgctcgaacggaaggacgtccttcaggtcgaggtcgtcgagcttgccgtgggtgccggtccatacggacacgacttcctgttccggcgagtacgggtggaactgcggctgcttcaacagctcggtcaggtgggcaccacgggtcagctgggccttggaagccgcatccagatcggaggcgaacatggcgaaggattccagcgaacggtactgtgccagggagatcttcagcgtaccggagaccttcttcagagccttggtctgtgcggcgccaccgactcgagagacggagataccgacgtccacggcggggcgctggttggcgttgaacagatcggactgcaggaagatctggccgtcagtgatggagatcacgttggtcgggatgtaggcggacacatcgttcgccttggtctcgacgatcggcagacccgtcatcgaaccgccgcccaggtcatcggagaccttggcgcaacgttcgagcaggcgggagtgcaggtagaacacatcacccgggtaggcttcacgccccggcgggcggcgcagcagcagggaaatcgaacgataggcctctgcctgcttggacaagtcatcgaagacgatgagcacatgcttgccgttgtacatccagtgctggccgatggccgagccggtgtacggggcgatgtacttgaagccagcggaatcggctgccggggaggccacgatggtggtgtactccatggcgccggcgtcttccaggctctgcttcaccgaggcgatggtggagcccttctggccgatggccacgtagatgcagcggacctgcttcttcgggtcgccggattcccagttggccttctggttgatgatggtatcgatcgcgatggcggtcttaccggtctggcggtcgccgatgatgagctggcgctggccgcggccgatcggggtcatcgcgtcgatggccttgaggccggtggacagcggctcgtcgaccgggtggcggtgcatcacgtcgggggcctgggcttcgaggatacgacgaccctcaatgccctggatctcgccgaggccgtcgatcggcttgcccagcgggtccacgacacggccgagatagccgtcgccgacgggcacggagagcacttcgccggtgcgtcgcacttcctggccttcctcaattcctgcgaaatcgccgaggaccaccacgccgatctcacgggcgtcaaggttgaacgccaggccgagcgtgccgtcttcgaacgtcagcagctcattggccatgcaaccaggcaatcccgtcacgtgcgcaatgccgtcaccggccgtggcgacatagcccacttcctgggtgggggtgtcgctcggcttgtacgacgacacgaagtcgtcgagggccttgcgaatcgaggcgggatcgatggtcagttctgccatgatcactccttctattggttattgttcagtcaagtctttgcttgtgtgtggtgttggacggattggctcggccggtcaggccggagtcgcctccgtctgcaccttgcgatgcaggttctgcagctgtgcgaccacggtgttgtccgtgacttcgtcgcccacctgaatgcgcatgccacccagtacggtcggatcgaccaccgagttgatgtgcacctggcggcccaccttggcggagtagacctcgaccagtcgctcaatctgctccttcttcagcggggtggcggtggtcacggtgaccatcgactcgcccatgtggcgggagaacttgttgatcagccactggatggtctccaagtagcggcggcggcgcaggttgcaggtggcgtgttcggcgagcctcatggtgaccttgttcagggtcttgccggagaacacctcgcggaacagcttcacacgggcctcgctggtggcctggcagtcgtacagcttggagcggacgaccggcaggttcagcagtgcggaatgcagctcggacagctcgatggatacctgcagcgtggcgtcggtggcgtcagcgtagtacatcatggcgtccacgccgaagtcctccaccgcgttggcgatgtcgcgcgcacggctccaacggcgggagaccaagtcggtcatgatctccatggtcataggatgcgcgttgtcaccgagcagtcccttcaggacggccaccttgtcggcgaccgggcgggacgggtcggtcagtgcgcgttccagctgaatgctgtcatcgagcaccttggtgatcgtgaacagttcgttgccgatccgccacgcgtcctcacgggtgtcgcgcagtttcggggccagcgaatcacgcgactcgcggtctgcaatacgtgatgcctctcctcgcatggtcacctccctttctggttacggatggtcacggtcacttcttggcgcccaggtcgtcgatcatcgaatcgatcatcgaggactgcacgtcgctgtcttccagcttggcaccgaggatcttgccggccaaggcggtggcaagtgcgccgacctcgcccttgagcgagacgatggcctgctggtgctgagattcgatcgagcgctgtgcggatgcggtgatctgggccgcatcggactcggcgcgggaacgagcgtcggcgatgatgtgggacgcttccgcacgggcgtcgtcgcgaatcttggcggcgtccacacgggcggtgctcagctgggcctcatacttggccttggcctcgtcggcgtccttcttagcctgctccgccttggcgatgttaccctgaatcttggcggcacgctcgtcgaagatcgcattgaacttcggcatgaagaacttgtagaagaacaccgcaacgatgacaagaatgatcagggaccacacaatgtcataggtctcgggaatgaacagatcaattccgccttctgcgagcgtcattatgaagtcctcctttcactggtggattcgttttgccttctgtattcgactgagaaaacgttcgatcagtggaacatcagggcggtaacgaagccgatcagtgccagcacctcgatcagagccaggccgatgaacatgatggtctgaatcttgccggacatctcaggctgacgagcggtggattccatggccttgccgaagaggatgcccagaccgatgccagggccaaccgcaccgagaccgtaaccgatgacggacaggttgccggcgaccgctgcgagggtgatgatatccattgtgtttcctttctaacgtacttggcgacgttataaatcttatttcgttcggtcctgcctacctaggcgaggccgggttccgaaagagggggttgaacctcactcctccgggaagcttaggttgatgtacacggtggaaagaatggcgaagacgtaagcctgcaggaaggcgacgaacgcctcgaagcacgtcatggcaagaccgctgacgaaccacatcgcgccgactgggatgccttgcagcttgttggctgcatcgacgatccagtactgtgcgaatgccaggcaggtggcgaccatcaggtggccggaaatcatgttggcgaacagacggatggtcagggaggccggacggatgaccagcaactcaaggatgttaatcggggtcaacaggatgtagaccggccacggcacaccgggggtgaacagctcgtgacgcagataatggccaagaccttgcgaacgtgcggcggcgatccaatactggaccatggtccagatggcgaacaccagcggcatgaccacagtggcggtggccgccatgttcatacccgggatgatgccacacaggttgaagatgaaaatcgtgaagaagatggtggtgatcatcggcacgtagcgcttgccgcgaacctcgcccatcacgtcatagacgaccttgtcacgcacgaagtcaagaccgtattccaccacgccctgccaacggccggggatgagcttggcgcgctttgcggtaagcccaagcaccaccagcagcacgaaggtggccacgatgcgaatcagaataatgcggttgatggcaaacggagttccctggaacagaatctccgggggaaggaagtcgttgaccgagggcagatgagcaccctcgtccgccaacagcaatcctgcgctgagcgaaccgaccatatcacgcctcctgctttttcaatgtcaggtgtcagtttaaacccaccgggcaggcaaatgtgacgtgctcgttactttcgtctttttcgtctcctcggtgtggagcctgccgggcgtggacacggagtctgcgctgggcattcggctccgaatgactgaagagtgattatttgcctgcgtctagacaatgtcaatactacaccggcgcgtcttctggaatcggcggcggcgcaaggtttttcggatgttgcgcaagcgttgtgcgctattagtcataatacgaggatgtgcggcatttgcgctaccctctgatcactccgtatccgtcgtgggcgaacggcttgaaatcatcctggcgcggcccgcccggctcatgccgaatcgaacgatcagtaccgagcttcttctcagccctgagctgcggcacctcggtcaggtcgtacggcgtggtctggtacacccagttgagccagttgcgccacagcagattggcgtgggcacgccagacgaacaacggttccagcttcggatcgtcatgcgggaagtagttcttcgggaagggcacgttggtcatgcccttggccatatcgcgctcgtattcctcggcgagcgtgtacttgccgtactcccaatggccgagcgcgaacacttcggagaagtcacgtgtggcgattaggcccgggccggactgcggcccccaagtcaagatctgaaggtcatggttggcacgtacctcgttttcgttcacgccggcgaggcgggagtgcggctgcagatcaatctcgtcgaagccattggtcaggaagcagtattcgtcctgcaggtactgcgggaatacgccgaaaatcttctcggggtaatccaccttgtggatgccgtagcggtagtacagtgcgcccatcgcaccccagcacaggtacatggtggagaacacatgggtggaggcccagtcgagaatcgtcttgaactcgtcccagtagtccacatcttcgaacggcatatgttctacaggcgcgccggtgaccacaaaaccgtcgtaatagttgtctttgaacgcatcgaggttttcgtagaacttgacgagatgatcggcggaaacgtgcgtggcctcatgcgtggaggtcttcatgaagtcgatttcgacctgcagcggcgacttggaaatcagacgcagcagctgcgtttcagtctcgattttcttaggcatcaagttcaggaccaccagtttgagcgggcggacgcgctgacgctccgcctcgggcttctccagagcgaagatgcgctccgaatcgaggatatctctggccggcaggccactggggatcttgataggcatgttcctattatgtcaatattcgggataacgcttcagggcattcctataacggccatttatggcgcgttatcaccccgactccggctccgccccaaacccctcgctgcgtgagccgattcacgttttagaaccgtgggaaaatgacacgacacgccgatgttgactttctggaatctgcacctattgtagatagagctgtctgagagacaagccgacgcggggtggagcagctcggtagctcgctgggctcataacccagaggtccatggttcaaatccatgccccgctactgcgggcgaggccgtcacgattattcgtgacggcttttcgtttatccgccgtcgtgccctacggggccgcatatccgatcggggcgatgatgtcctgtgaaaaaaacaacatccaagcccgctctgggcagaatcaatcaatctatggctcgactccctcaaggcggcgggctactcccccaacacgatcggcacgcgccgatgccagatgtccgcattgtcgagggcgcttaagggcgatctagggacgtggagggcgacgacctcgccctgctgatccgatccgccaacggctatctgttccccggccggtggagcggccacgcctcggtcgagaccacgcaacggtacatcgccatgcccgacgaccagctgcacgccgccgtggaagccacgcgcctcgccgcctaggaggatcacgatgttccgtttccccgactcgattgtggtactaaattgattatggtactaaattatggtaccataataagcatgatcgaatgtgaaccgtcagccttcaagcactggttcacacagccacagatcgactacatattccggcatccggtggccgtgttcgaggtgcagtcgagacacgccggcgacagggtcatggcgatcctcggacacccggacgagttcagggaacgccccgtggagctgctggtatcccagcgcacccgcaaggtgttccacgcgatggactgccgccgcgaatggctctacaagttcgacgactaaaaaacaccaaggaggacatcatgagcaacgaaacagactgggacgagctctcggacgaatacaccgagcacacccccgccatcatcggcgagaccatccgcccgcaaagggcgatcacgatggatgacatcgacgacatcttcgccggccgccccctcgccgaccagccccgccggaaggccgacgtgctctacaaggcatacctcacgcccgacatggacgcacaggtgcgggcacaggccgaacgagagcacatcggcaagagcgctctgatccgcaaggcactggccgcatacctgaccgccaatcaggcacagcccgcgatggcctgacccatatacggcgaaaagcccccgaacctgccgcgtgatacggttcaggttcgggggcttcttgttattcggccttggatgccttggccttgagggcgctggcgccgatgacgacgccgatggtcagggcgacggcgctgatggtcgtcgcggccggatcggcccacgtccagccccatacggggccgaaggtctgcacggacggtcacggtacgggacggtggggcgttgctgccggtggcgacgctgccgccgccgttgtaggtgacgacctgaccggggcgatatggatgaaaggcgatcaggcagctacggtgcccagggaagtcggcgatcataaacgtctcgtcgttttcatcgcggatcttcagttgtctaatccacgggaggcgacaggcgtgaagtttctcaacgaagcggaagccgggcacaagtcgtatgtcacaatcgacttcgtgcccagctcccgtccttctgctcagaagcggagtgcggttcaccatccagccgacatcatcggcatcatgccgcagcgggtcaacgtatcggccagcgcatcgtccagtgcttgaatcggtcatagcgacgacgccaccgaacgacgatggacagtatggcgcctatcgccagagctgacacggccagaaccgaggcaagcgacacatcgccacccgtgacgggcagtgacgggcgagtgttgggcgtggttgcctccgccggcgccggtggcgtctcgggtttctccggttcgcacggtttctccgactcgcatgggggcaacacccgcacacgctcccaggcatcgtcataccggctggacgccggggaaacacggtcatccccctcgaaccgccaaacgaacacgtaccacccatgccgttcggcggtcagatgcatgggagcgccatgcgcgtccaacgccccggcgccgattttgaacgtgccgttcatcgcgggaatctcccaggtggccagcaaccggtggttgtcgtcttccgtggggacctctcccccggatggcttgtacgcctcatcgttggaggggttgtcgggatcgccggaccaccatacgctcaccgtcgcatacggctgatccgccgcgaaaccataggtttcatcacccatgaactggccgtggtccgccgggaaccccgatacggtgatggtgtcgctgagttcggcgccgatatccgccgaatgttcggtaaccgtcgacatgacttcgaccttcccgcgccccacgttgctttccgaagcctccatgaacgggctcacccagtcgccggtaaggtattcctgcgcccgtttgctttgctcgctccgccggaacacccacacccaggtgccaaagccgccggtcttcggagtcagataggcggcgtcaccgtccggcttggccatggcccgcacacgaacccgctgccccacaccggtgaaggacgccttgccataagcactcggctcataacccgaggacgccagccgggcgagaaaagcgtccgcgctctcccgtgcgttcggcgcgatgaccttgcccagatcgtccttgccgagcccgtcgaaatagtatccacgcgcctgcagcttcagaccgggcacccaatgactgccctcgtcccccacgccactggtcacatcatcgaacaccggcgaagccgcatcaagcaccttatcggacacctgcgtggacaccgacggaacgaaatccttgcgcacctggaacgtcgacgacgaaccgccggcggaagccatcgaatcgaaggccagcatgtcctgagtgctgtccatgacgtgcatccgcccatactcgtatgtggtgttcgccgtcacctcgccggcgccggtcgcctcccacgcgatcgaggatccggcgctcgtcgacacccccgagaacgtgttgccgccttggatgaaccgcgccggcccctgcaaggtgacagtgaacggcactcccgcgatcgcgtcaccgtcgcggttcaccactttcaccgagatggaaccgctgcgcaaagcctcggcatcggcgcgttccaccgtcgtgcccgcaggcgtcttgccggccgattgatcccatatccgggccgccttcgccacgatctcgggataccggccttgaatgaccgccatctgtctcgcccactcgtcccgatcgcgcccgaagtgatcctgcacgatgatgccgatcgccgcatgggtggcggcatccgtgtcgcggtaccggtcaaggatccatgccatacgccgggcgttctcatcggaggcaagcaccgtggtggggcctatcacatagtcgctcagtttccccgcttcgatgcagtagtatttgttgcccgaagcgtccagccccgcgacaccgacgtaatattccatatcgttgtatggaaacgtcacgtgatatctttcgtcggcgggcgtcaacgtcgcggcatacgccgtattcgccgagccgaacaccactcccaccattattatcagaccggtcagcatcgctacgatggccatgccccgttgccgccatgtcgttatcatcattcgtcctttcctggtacgttccccgcatactgcactgtgtgcgggtaggccacgatcatggcagattttcattcgctacagccgatttttcggcctatgtggtccgagcttgccgtttgtcggcgagttgtggataactcttccgccgagttatccacctcatgcggttgaccgaacgtttacctgcaagttatccacaatgtgcaacatatgttcaaaagcctctagaatagggccttatggcagcagtacaacatcgcgcgaccacgcgcactagtaataccgataacaacaccacgaagacgaagtcaaagacgacttctgcccgaaagagccccgcaaccaagcgcaagagagtcagcgccgaaacggcacgcgccgcagcagcgctgaaaggcctggctgtcgaagcccccgcaccgtccatcgaagcaaacgagcccggccagttcggccgcatcaatgtcatggacatcactcccaccgaggagcgtggcatcttccccgcccgtgtggaactcggcgaaccgtttgagatgaccgcccaagtgttcatcgaaggccgtaccaaggtgggtgccaccgccatcgtgcgcaacccgcgcggcaaggaaaccatgcgccgggccatgacctgcgtaaatcccggcctcgatcgttggaccgtgatggtcaagtgcggcgaacacagcgatctgaagccttgggaggatggctacgcggccgtcaagcgtcagctcggcgaatggaccgtgaccatcgaaggttgggaagacacgtacgtctcctggctgcatgacgcccgtatcaaggtgcgtgtgatggacgacgtggacaacgcgctcaattccggcgccgagctgctggcccgttgggccgcaaccccggacgccggcctgaccgcacgcgatcgcaagaccttggagaaggccgctgagaccatggccgatcagacgctgagcgccgaggatcgcctcgccgccggcgacaaccctaccatcgccgccctgcacgagactcacccgctgcgcgatggcatctcccccagccagccccagcgtttcaaggtggaacgcccgaagtccagcttcgcggcttggtaccagttcttcccacgttccgaaggcgccaccatcgatccgaacaccggcaagatcattcagggtacgctgaagacctcgatggccggcctcgaacgcgccgctgccgaaggcttcgacatcgtctatctgccgccggtcttcccgattggcgtgaccaaccgcaagggccgcaacaacacgctggtcgccggccccgatgacccgggctcgccgttcggcatcggctccgagctgggcggccacgacaccgtggatccgctgctcggcaccatggacgatttcaaggccctgtgccagcgtgcacatgaactgggtctggaaatcgcgcttgatttcgcactgcagtgctcgcccgatcacccgtgggtcaaggcccacccgaactggttccgtcacaagccagacggctccatcgccttcgccgagaacccgccgaagaagtatcaggacatctacccgatcgacttcaacgccgacatgcccggcatcgaaaaagaagtcgaacgcatcatgaatctgtggatcgaggcgggcgtcaccatcttccgcatcgataacccgcacaccaagccggtgcgtttctggcaggacgtgattgccgccgtgaccaagaagcacccggagatcctgttcctggctgaggcattcacccgcccgggcatgatgcgtgccctgagctacgtgggcttcacccagtcccactgctacttcccgtggcgcaacaccaaggacgaactggaagagtatctgccgatcaccaatggcgacgacggctactaccagcacaacaccttctggcccaccacgccggatattctcaccgcttacgtgcgagacaacggcgtagccggccactgcgtgcgtgcggtgctggcagccatgggctcgccgtcctggggtatctacaacggttacgaactcatcgagaacaagcagcgccccggcttcgaagagcagatcgacaacgagaagtacgaggtcaaggttcgcgattggagcaaggccaagcagtacggcgtggccgagatgctcaccgcgctcaacaagattcgtcgcgcccacccggccgcgttgagctaccacaacctcaccgtgctgcctacgtccgaccagaatattctggctttcgcacgccacacgccggccgaactgaccggtaccggccaagcggacacactgattgtggtcgtgaacctcgatggacacaacgcacaccagtcgatgattcacctggaactcggcgagctgggtctgcccaccgaccgcccgctcaacgtgcgcgacgagctgaccggccgcgaattccagtggggttgggacaactacgtgtctctggcgccttgggcggatgtggctcacatcctgtccgtgcagtgatgcggtagtgcaacggtaatgcaacagtgatgccgttgacgtgcatgggtttatcgtgtgcgtaaaccgctagaaatcctccccttgaggggaggatttcgtctgtttagacatagtgtcggcataatctcagcacggtttcttgagttccgcacctgttttgcaggcgcaaacagggtattgtggtgagacgataacgtaactgtcgattttcaaggagaaatgacatggcagaaaccttcaacgtcgttgtggaaattccgcgcggctccaagaacaagtacgaagtcgatcacgagaccggtcgcgtcttcctggaccgtaccctgttcaccgcaatgggttacccggatgactacggctacatcgacggcaccctgggcgaggacggcgatccgctggacgctctcgtgatgattccgaactccgtgttcccgggctgcgtggtcgagtgccgcgccgtgggcctgtaccacatggtcgacgaggccggcggcgacgacaaggtgctgtgcgtgcccgccgacgttcgtttcgatgacatcaaggacatcgacgacgtcaacgagtaccacaaggccgaaatcaagcacttcttcgagcagtacaaggccttggagccaggcaaggaagtcctgcccggagactactggaccggtgctgacgccgccgagaaggaaatcatcgcggcacgcgaacgcctcgccaacgaaggcaagtgattcgattccgaatcgtcggcgggagacctctccggaggcctcccgcctttttgattcgacgtgcatcgcgtgatatagtgctggtgtatttttcagctaggcgtaggcggcgtgtaggaacgctggtcgaggcccatcgcacggtaatccggcgatgaaccttctgtcgcaccatgattccgataatcattcaaatcctgcttatttctgtttccgtagctatggatgcattcgccgtatccattggcaaaggtctggccgtatcccgcgtacgagtgcaagacgccgcgaaaagcgccctctggctcggcggattccagatgctgttccccattctcggctatttcgcggcatctacattcagcaaatacgtaacccgattcgatcattggatcatcttcgccctgttggtgttcatcggcggcaacatggttcacgaagccttcgaagaagatgaggaaaactccaaggagaccgcccagttcgattggaagcatatgcttcctctggccgtggcctgcagcatcgatgcgttcgccgtgggcgtgagcctgaccttcatgttcaccaaagcccatatggcattcgccatcctcagcatcggtgtggtcaccggactgttctccgctgcgggcctgtacattggccgcgcgttcggctcccgctggcaggagccggcgcagatcgccggcggcgtggtgctgattctacttggcgtcaaagtgctgttggagcatttgggcgttatcgcgttctgatttagtgtcataagccccttcaccagaaagggctattttgtttgatttcaccgttccaatgcccgacgtaggattgggatggaaattcgattatctgagaggcgtatcatgaccgagatcacccaggagggttggaagaacaaagccctgagcatgttgttggcccaactgacgtcctatgtactgctcatcgcagccacggtcattccctcccctggcaccgtccccatcatccctttgattatcgccgctctgacgttggccgcatttgtcgtgttctggccgttccgcggcagcatgctggatcgtatcgtcactttggtgtttggcgcgatttctctgattttcgtcatcgtacctttcccgaccggcaaggttccgccggatcagaccgctgcggatggctcggtacttccttggtattcatgggcactggccatgggcctgctgctggtggtgctggtggtcttctccttcggacgccagatggctcgtgagaagcgcgaacatcttatccgcgcactctctcacgccgtgacttcaggtgtggcggctctcgccgtggccggctggtgcttcctgcctgatttgggcgcgatgctcgccaagggcaccgttgcgggaaccgttgccctgatcatcctcatcgttttgggactggccttggccgtggcctccacgttgtgggtgcgtgacgccgatccggacccggatatccgctatccgtggatcggtaccggcctgatgccggtaatgctgatgggcgtgaccatcgccgcaaccgcactggtgctcggccgtgtcatcggttgatggacgtctgccgttccatattccgcaaacttgtaacccatgtgtccactacaagcgcgtagaataatgaaaaaccgcgcgaaagcggcataacgccgctgacgactcgtacagccacaccaagcaattgcgtaacacattgcaggataaagggggattagcgtgacggatcttacgttgatgactttcgccagcgaccccgccaccgttttgccatcactcgccctgctttctcatcgcgtccgcgtgctgccgatggatgcagccagcttggtgaagatgccggagaacaccattctgtttctggatgcacgcgatgatctggcgaccgccaaaaccttgtgccgtctcatccacgcctccggcctgtccacgccaatcgtgctggtgctgaccgaaggcggcttcaccgtggtcaactcccagtggggcattgcggatgtggtggtcgccaccgcttccccggctgaagttgagggccgattgcgattggtctccgagcgcggcaacgctcccgcagccgcagcagccggttctcccgccgaatccaccaccacggtggaagatggccagattcgctccggcgacctcattgtggacaccaacggctataccgcctccctgcatggacgccccatcgatctggcatacaaggagttcgaactcctcaagtacttggtccagcaccccggccgcgtgttcacgcgcgcccagttgctgcaggaagtatggggctacgactactacggtggcactcgtacggtcgacgtgcatatccgtcgtctgcgcgccaagcttggcggcgaatacgaacacctcatcggcaccgtgcgcaacgtgggctaccgattcgacccgccggagacggataaggaaactgccgccgcacagcaggccgccaaagcatcctctgccgccatcggcaccgatgacgatacccccgatctcaacaccgccgcctgacagaccagcagcgctacaaaccatcaatcatcgacattacgccgcttaggtccatacgatgagagaaaccaaatccgcgcgtctcacgcgcatgcatgacgaatacgacattctgcgccaggtgattccggcacccgcttgcgcactgcatttctcgaatccgctcgaattgctgatcgccaccgtgctcagcgcccagaccaccgacaagcgtgtcaacacggtcaccccggaactgttcgccacctaccccaccgcccgtgacttggcggccgcgaacccggcccaagtcgaagacatcattcatccgctggggttctaccgttcgaaaacccagcatctcatcggactggccacggcactggacgaacggttcggcggcgtggtgccgcgcacgatggatgaactgaccagcttgccgggggtcggccgcaaaaccgcgaacgtcgtgctcggcaacgcgttcgatatccccggattcccggtcgatacgcatgtgatgcgcgtaaccggacgactgcgttggcggtcggattggcggtccgcacaccctgatcccgtgaaaatcgagaaggaaatcaccgcctgttttccgcccgaagagtggacgaatctcagccaccgactgattttgttcggccgggccacctgccacgcacgtacccccgactgcgccaactgcccgctgtccgacacctgccctagctatgcgccgcccgccggcaagagcacgtccaagcgctaactcatacctcatcatggtgaattgcggattctaggctgaatccaccgctagactgaaaaccatgcagcacagcaagcggaacaatacatggtccaagtgggggatttttctcggagtcgccgtggcactcggcgcactcgtggttgcgggatggacgttcatgcaaaaccggttccagccgggatcatccctcgatgccgatgtgaccattggcatcgacgatatgccgcaatccttggatattcggtccgattcctctgcggcagccgagcgcctgctcgtcgacaatgtgtatgagacattagtgaccgtcgatcaagacaacaagattcagccgggactggcgacaagctggaagacttccgatgacggactgaccgtcaccctgacactgcaatcgggcgtcaccttctcgaacggtcatacgttggacgcctcggacgccgtgtggtcgttgcaacagaacgtgaccaacaaggtggcggacgtcgacgaattgggcgatctgacgtcggtcgccaatccgaacgccaccacggtggtcattacgcttgccaagcccaatccgacgctgctgcgagcgctgtccggcaaactcggcattgtctacgattccgagtcgtccagtgccgattatcaacgcaaggccataggttccggaccattcaccgtggccgatttccagcctggccattccctgaagctggcgcgcagcgatacctaccatggcaccaaagcggccagcaatatcgttgaatttatgcaatactccgacgccgatgcgctcagcaaggccctgaccgacggcagtctcgatatggcggcaccggtttcggcttcgacggccaccggtttgaacggcaaggatggcttgaccgtcaaggagggggccactacggataaggtgctgctggcctacaacaacggcatcgattcgctgctctccgacgaacaggcgcgtaaagccttccgctatcaaatcgacgcagccggcatcgcctccgcccaacccgacgcagccggagcattgggcggccccatcagcccgctggaacccggatacgaagatttgaccggactgtatccgcatgacgaaaaccaagctgggcagatgttctcctacttcggtgcgcaatatctgactacggtgaatctggtggctcccgaagaataccggtcgttggccgaaaccatcaagcagcagatcgagcggcagccgcgccccacggtgaaccttgaagtgctctccgatgaggattatgccaaacgaatcaaggacggcaaatgggaactgaccgtgatgagcatggacggcacggatgatgccggcatattcgccgaccccgattccatgttccattacgaccataccgaagcgcaacaggcctatgcggatgctcgcgccgccactaatgacgccgattatgaggcacgaatgaaggcgtacgcccggctgatcagcgaggatgcggccagtgattggctgtatacccgcaaatgcttcactgtggcgtccaccaaggtctccggctacccgacctcgatgatcaatcgtcgcatgccgctggccgggttgacggtgaagtaggcaaccttcagtcacggacgggctacgcccgatagtccttggctcactatcgttcgatcgttcgtatctcgcctgcgaacagcctactgggctgtttactgtacagttcggcttgtcatgcaacgtgcataaactttggctttatgactgaaggcaaatccatcatcaacgccaacctcaccccgctgcccgacaaggtcggtgtggacggacttgaggacaagtggcgcgccgtctgggatgaagacggcacctacaaattccgcaatacccgcgaccgcaaggccgtctactccatcgacaccccgccgcccaccgtctccggttcgctgcacgtgggtcacgtgttctcctacacgcacaccgatgtgattgcgcgttacaagcgcatgcgcggctacgacgtgttctacccgatgggctgggacgacaacggcctgcccaccgagcgccgcgtgcagaactactacggcgtgcgcgtggacgtgtccctcccctacgacccggacttcaagccgccgttcgagggcaccgatggcaagaagatcgacgccaaggatcaggtgccgatttcccgcaagaacttcatcgagctgtgcgagcgtctgactgctcaggatgagaagctgttcgaggccctgtggcgcaagctgggcctgtccatcgactggtcgcagacctaccacaccatcggccagcacccgcggcgcgtggctcagaaggccttcctgcgcaaccttgcccgcggcgaggcctaccagcaggacgcccccggcctgtgggacgtgaccttccagaccgccgtggctcaggccgagcttgagtcccgcgaatacccgggcttctaccacaaggtggctttccgctttgaggacggcaccccaatctacatcgagaccacccgccccgagctgctggccgcttgcacctcgctgatcgccaacccgaatgacgagcgctacaagcagtacttcggccagtacgtctactcccctctgttcaaggtcaaggtgccgattctggcgcacccggccgccgaaatggacaagggtgccggtatcgccatgtgctgtacgttcggtgatgtgaccgacgtcgagtggtggcgcgacctgaagctgcccacccgcccgatcatccagcgcaacggccgtatcgtgatggataccccggactggatcgaggacccggccggccgcgaggtctttgccgaaaccgctggcaagaccacgttctccgcccgcaagatcatcgtcgacaagctgcgcgagtccggcgatctggacggcgagccgaccccgaccaagcgtatgacgaacttctacgagaagggcgacaagccgctcgagatcgtcacctcccgccagtggtatttgaagaacggcggtaccgacgccaagctgaacgccgagcttatcgagcgtggcaaggaactcgagttccaccccgacttcatgcgcgtgcgttatgagaactgggtgcacggcctgaacggcgactggctgatctcccgtcagcgcttcttcggcgtcccgttcccgctgtggtccccggtgaacgcttccggcgagccggattacgatcgcccgatcaccccgagcgaggatcgtctgccgatcgacccgaccatcgatgtgccggaaggctacgacgagtcccagcgtgatgtgcccggcggcttcaccgccgaaaaggacatcatggatacctgggccacctcttcggtgaccccgcagatcgtgacccactgggctgagccggacgaggcctccaaggccctgttcgcttccaccttcccgatggaccttcgcccgcagggtcaggacatcatccgcacctggctgttctcgactgtggaccgcgcgcacttggagaacaagtgtctgccgtgggcccatgccacgctgtccggctggattctggaccccgaccacaagaagatgtcgaagtccaagggcaacgtcgtggtgccgaacgagccgatcgagaagttcggcgcggacgccgtgcgttactgggccgccgccgctcgcctgggcctcgatgccacgtacgacatcggccagatgaagattggccgtcgactggccatcaagctgctgaacgccaccaagttcgcgctggccatcggccgtgaggacgagaaccatcacgtgggcgctgccgccgagacctcgtggaacccgatcgatgtgaccgaaccgctggatcgcgccgctatggccaagctggctttggtggtgcgtcaggccaccgaggcgctggaatcctacgagcattccaaggcgctggaagtcatcgaatcctacttctggcagttctgcgacgactacatcgagctggtcaagaaccgcgcctatggcactccggacgagcacggcaatgtgccgtccgagaaggctgtgaagtccgcccgcaccgctctgggtctgggcttggacgccttcgcacgtctgctggccccgtacctgccgtacgccaccgaggaagtgtggagctggatgcacgccggttccggttccgtgcatcgcgccgcctggccggtcgtggacccgtatgtcgaggccgccaccggtgcttcccccgagctgctgacttgggccggcaaggccgtggagcagttgcgtaagatcaagtccgaggccaaggtctccatgaagaccccaatcctgtctgtggcactgtccgctgcttcggaaggtgtgaacgcgattcacgccgccttgggcgatatcgcgcaggccggtcgcgtggtcggcaagttcgacttggtggccaagcacgccgaggaatccgccgccgaagacgcgcccgaaaccgaggtcgccgtcgaagccagcgagctcggtgagccgccagccaagaagccaaagcactgagcgttgcgcacaacaacagtaggtctcacggcaatgccgctcgttccgagcctacgggaagcccaccgggcttcccgcttaacggctcggccagccaagaagccaaagcactgagcgttgcgcacaacaacaaaagaggggaacctcctattgaggttcccctcttttgttttttgacgttcggatgacacgactgtgggacggcacgcaaatatcccgcattgtaagctggcggcccacaatagcgtgggccaccacgcgtgtcaaacgttttatatacgcggcgtcccacagaccgaatcaacaaatccttggaatttagccattcttcaaactatagttagctctgacttacaagagggtgtgggacgccgcatcgaaaaagccagtttttgatgcggcgtcccacaccgataacgcactttacgcgtattgggcacctgtcgcatgcggattttcccgcatacaccatcacaccgtcggaatcacgatgaggtatcgggtttcggcggttttttgttgcgtattggggctatcgagctgcgcgacggcctgcgccaagagcgtgccagcatcactgatctccacggtctcattgatcagcgcgctcatgtcatgcttgagcagcgtgccgccagtgccaaagccgaacagtactggagcggtgtcaagattgttgccggaatcgccagtatcgctcgacttggctgagtcgttcgttcccgaaccatcgctcttggacgaatcgaacttacctccaccaccgatggccgaagtaagaccacccgcatagttcatcacatcgccagcagacatggacatggtgtcatcgaccagtgaggccttggaatgctgcgactgctgctgctgttgcgcggctttggcctgcttacgggcggcatcggccttacgcttggcttgggcggcccgggtcttgccgtagaacgattgcgattgcgaatcgaccaggccagtcagtgcctgagcctcggtcaccggaccggaagagacatcaccggacgagccatcgccatcgctgccggaagccgaggacgcgaatccttcgaactgatcggagaatcgcaatacaatctggcgcaaggccgtggctttgcccgtatgctcggaggcggtggcaagcgtgctcatcgcggcatcgaccttggattgagcgtcggcgagttcatcgctaccgttggtttcggcgatggcttggctctcgtaagcggtggcgcccgaagacgtgccgccggtcagggcgctcaaattggccgtgtagacgtccgtgtatttcatcgaatacggaatcattgcggcggagagctggctctggccatcggcgtattgcttggagcctcgagtggcttcctccgaagcctcggcggtcagatcatccaccagtccggtggtgccttgctgctggatgcggcgaatcacctcatccaacgcatcgaccgcaccggcatgctgatgtgcggcactgacgttgttcaccgcgttggccaagtcgagtacggcttgtgccaaaggcgtatccccggacagttcgccggccgtgcccatcaacgccggcaactgggtggaggtaccaatcgatccagacaggtgcgtggtatatgagcccacatacgcggccatatagtcttcaaacgtccgcttatgggcggtttcgcgttcggccactacggacttgtccagcgcacgctcattatcgcgcagggtttgaagctgctcgatgagctgttgatgctccccggaaccggcgtcggtcagtgaatcgaccagtatggcggcagaggcgacgagttgggcgacatccgtatcggcagcaggctgtgcggcggcattcgcggcatcgggattagcaccaaccaccggactgctggaattggaaggcaatacggcgagcgccacggaactcatggagaagtctttggcgttcatatagcagctgaattccaagccggttgcggcttttccagctgcggcgactacggtattggaaccttgcgtggttaccgtaatggagttgtcagcggaaacatcatcggctacctgcgtaggcacggtaaaggcgacaaccgggatcgtacggttggcctccttggtttgcggcttaatatcgatatacacgccgatcagtccagatgcgccggcaacctcgtttgcctcgacgtttggaccgtcaagcgagtaggtgacgctgactttccatggcagggtggcggcggaagcggggatacgagaaaccttggacgtgccggaattactattggcggaatcggtatcagtggaaccgctattgccggaatcggcactggcgccattgccggcgccgcccttccctaccacataccaacggaccggctccccttcggcatcggcgacggcgtacatatcacttgccgtagcgagcaccggaccgtaatcaaccggagtcggacgagacatccaagcaccgccgagaatcgaagccacgcacaatgcgcaactgaccagtgcggcaccacatctcatctacgtatcccattcatacagtcggccactatgggcattccattcccgtattaatgtagtcgctgcgggcaacttgccctatagacgaatatccgaaaggtgcccattcgctgcgggcgaatcaggcgaatacgtcgagtacgcccgggtcgccaccggcatcggcgatgcgctggtggcgcttcttggcttcggtaaccacgaattcacggtacatttcggcaatttccggatcaagcccggcatcgatggcgatgcggtggaggcgctcgatctgatagtcctcacgcttggtgtcttcgggcgcgaatccggcgttggctttgagcacgccgacctgcgaggtggccttgaaccgctcggccagtaatgcgatggccgccgaatcgatgttatcgatggtttggcgcagcgctttgatgcgcgccaccgcttgtgcggtttccgggtgggccgccgcctgggcggagtcgatggtggtcctttgccagccgctgctcgtttcgctcatagattcgaggatactcccgattgcggctttgcacgatgcgcaaagtcagatatctcagatgtcatagtcgccgtaggggatatggctggcatccgcatcgccgaacatggccgcaccattgcccactcccaaaacaatcgaacccattgatacatctttcatctcatatatcgtcagcgtgcatgtgaacgttgacggcaatactacaactgcaatgtgatagttgatgtatttgcatcatatacggcaagggctgcgccccgtatcaatcggggtgcagcccttacactattgttcagcggtctgatcagttgccgttgaccgcgttgccggtgttggcctgctgcacgatggcggcgaggaagtcgcggttggtggcggtcttcttgaggcgcggcaccaacgtctggtaggcctgctcgggctccatgccgcccagcagtcgacgcagacggtagataatcggcagttcctgcgggttggtgatgagctcctcgcggcgggtgccggaagcgttgatgtcgatggccgggaacagtcgcttgtccgccagctcgcgggacaggcgcagttccatgttgccggtgcccttgaactcctcgaaaatcacctcgtccatcttggagccggtttccaccagcgcagaggagatgatggtcagggagccgccgttttcgatgttgcgggccgcgccgaagaacttcttcggcgggtagagggcctgcgcgtccacaccaccggacaggatgcggccggaggcgggggcggcgatgttgtaagcgcgagccagtcgggtcatggaatcgagcagtacgaccacgtcctggccgagctccacaagacgcttggcgcgttcgatggccagttcggcaaccgtggtgtgatcggaggccggacggtcgaaggtggaggagatgacctcgccctggaccgtgcgctccatatcggtgacctcttcggggcgctcgtccacgagcaccaccataaggtggacctcggggttgttggcggcgatggagttggcgatgttctgcagggtgatggtcttaccggccttcggcggggagacaatcagaccacgctggcccttgccgatcggggaaacgatgtccatgatacggccggtgagcttgttcggggcggtttcctgcttcaaacgctcctgcgggtacagcggcgtgagcttggagaactgcggacggttgagcgcttcttcaacgctttggccgttgatggaatcgatggcctgcagtggcacgaacttctggcgttggttgcgacgatcgccttcgcgcggggcgcgaatcgaaccatggacggcatcgcccttgcgcaggccgtacttcttgacctggcccatggaaacgtacacgtcgttcgggccgggcaagtagccggaagtgcgcacaaaagcgtaggagtcgagcacgtcgacgatgccggccaccggcaccagatcctcctgcggctcttcgcggcggctatcacggtcattgcgatcgctacgattatcgcgatcatcatagcgacgatcatcatcggcgttgtcgcgatcacggccacgcatgcggcggttacggcgatcgttgcgatcattacggttatcgcgatcgttgcgatcgctacggtcgcggcggttacgacgcacaaactcgtgatcgtcgttctgctcgccgtcttcggacgtttcctcgtgcttctgcgtgggcagcgtggccaggatatcgtcgaggtcacgcacggtttcttcgctgttttccgcagtgcgacgacggcggcgaggctgctcgtcctcatcatcacggactcggcgaatcagcggaacttccacgtcctcatggcgctcgcggcgacgctcggtaggcgctgcatctcccaaatcgagcgtggccagcagatcgccggcctcatcggccttcttgcgcggcttgcggcgagcgaaatcggactggtcgtcatcgcgacgatggcgggccgcacgcggttcggatgcggcatcatcggcggccttacgacgggtgcgtcgcggttcggtctcgtccttcttggcatcgtcggccacgggaagcggcaaatcgagctgcggttccgtggaggccggagccggagccggcgactgggtggccacgtcagcattgtctgtggtattggcctcagcggcatcggactgcggagccttgacgaccttggcggttttggcggccttgggagcgcgcacggtcacaccggccggcggctctccaccattgcgcgccgcctgcagggtggcgagcagctcgggcttgcgcatggtcgacgtgccgcgcaggcccatctgtttagcgagctctttgagctcaggcagcttcatatcctcaagattctggctatttgccactggttgccctttccataccgaacagacccatgcctatccaggcgttaagagtgattattgcggttgcaccgctcatgaatgttcgctgcgtctctgagttttcacgaacttcgtttactgtacaacgccaactcgaccaacgcaaaacggcccgccgaaaaccaaaaaagctccctctgtgacgagggagctcaacaaggtttattcacttttcttcgtggtaggacttttcggtgttgacggaccacacgttcttcttggacgtcttgccggtcttgatgttgccgacggcctccatggcggtggccatggagtggtccatgttgttgtagcggtgctggccgttgcggcccacgcagtagaggttgccgaagccgtcgaggtactcgatgagctcgtccatgtgctcgtaggtgtcgaagtaggcggggtacgccttcttgacgcgctcacgatgggagtcgatgacctcgtccgggccgttgatcacacgcatgcgggtgagctcggagatcgcgaacttggtgacgtcctcctcgctcatgttccagaacgagtcgccctcctcgcagaagtactcgaggccgacccacacggtgtcgtccacgttcttgaccaggtacgggctccagttgttgaagatctgcagacggccgaccttgtagcccgggtcctgcacgtagatccagcagtccggcacgatcggcggattgccgagggtggggatgttggtggtgttcttgagcttcaggtgcttgaccagcaggcccacggtcacgaagtcgcggtacggcaggccgttggccacctcggtcatatcggccggggcgggcttggaatcagcggcctcgggatcgtcgccggccgcgtcgatggcgttgaccaggtccttgaccggcatcgaggagatgaactggtcgccggaaagctcggtgcggttgccctcggaatcctcgtacaccacggaagacacggcgccatcggtctggcggacctcgaccaccctggcgtcggtcagcaccttgacgccggcggcctcgcaattggactcgacggtctcccacagctggccgggaccgtacttcggataccagaactcctcgatcagcgaggtctcgacctccgcgttggagcgcttcctggggctaagcttctggaaggcgttcttgagcacgcccatgatggacaggcccttgacgcgctgggcgccccagtcggcggagatctgggaggggtggcggccccacagcttctccgtgtagccctcgaagaacatcgaatacagcttgcggccgaaacgattgatgtagaagttctccaggttgtcttccggcagcttgtggaacatggacttcaggtagctgaagccggccaccatggtgagcttgaagcccatggccttcaacgtgttggggctcagcgaaatcgggtaatcgaagaagtggcggttccagaagatacgggacacgcggtggcgcttgagcatcaccttgtcctccgtctccggatcggggccgcccggctccatgtcgtggtcgcggccgagcttcttgtcatcataggagggtgcgccctgcaacggcagaacggtcttccaccaatccatgatgcgttcgtctttggagaagaaacggtggccgccgatatccatgcggttgccgttgtgcttcacggtgcgcgagatgccgccgaattcgcgggtcccctccagcacggtcacgtcatagttttccgcgccgccatccttgacgagttcccatgcggcggtaagtccagccggaccgccgccgataatcactacggattgcttgtcggtcattatgctccttataaacgcaaaatcagagacagtttactagaagccccggaatcgcacaccgaaagatgagcgaatgcttacagaattctcccgatatacgaccgatgcgccgtcttccatcagcagaaaggcgacgcatccaatcgtgaggtaggggtattcggcaacgctgcgtcacgcacagcgcggcgaatcggtttggtcttgggctaattcgtcagcgacgaaccttccatagattcagcgagattcctgcaagtgcaaacagcatcatcttctatcaaccgcaagcaaacaagacacacgatggcaaggttacgagtttgaacttttgctatgcgttgtatgaacaatgcgcgacgccccgccgtaagatgacggaatgccgcgcattgtcaatacaggctgtatcagacgattgcctgtcagtgaatatcgtcgggaatgtcgatatcggttttctggacttcttcgacgttcacgtccttgaaggtcacgatgcgcacggacttgacgaaacggctggaacggtagacatcccatacccatgcgtcagtcagctgcacatcgaaatacacgtcctggccagcggaacgcacgttgaaatcgaccttattcgccaagtagaagcgacgctcagtctccaccacataggtgaacagcttgatgacgtcacgatattccctatacagcgcgagttcggcgtcggtttcgtaattgtcgagatcctcggcactcatgcttgtttactcactcactttccgtatcgcgtttgcggccgcggcccagcgtacgccaccatgcttcctttgagggcttgcgttccgcctggccgtacggccagttgctttcctcttcgagactgtggcgcgtgttcttctgcgtatcgtcgtggtgcccggcctgtggctcgactggctgtgcggccgccggcgtctgggcctgggactgcacgtcactcgtcgtgacggcggctgcctcaccacgctgtgccggctcgggttccggcttgttctgctggatggcgatggaatgctcacgcgcggacagcgcttccttgacacccgggttgtcctcaatcaagtgcataccaaaagcgtcaagcgaacgaatcggatcgtactcgtcgaccaacgtgtccatgacgataaggtcctgatatttgttgttttcgacatcccacaacgcgtcgcgcgaggtgccggacggcacgaagccgagcgactggtagaccgaaatcgaacggctgttcttttccggcacgctcacccagatgcggtgcatgcccaggccggccggttcgggcgcaaagccgtaagtcatcacacgcggcatggcgtcacgggagtagccgcggccacggtactcacggcccaagatgatctggatgcgggcggacttggaccagccgtcgatgtcgatgaggaaaatcatgccgatgacattatcggtgctggccgcatcgagctgaccgtcatcgtcatggtcggcgtcagtcaatacggcccatgcgatggtgcggcgggattccgggtcgcccacgccggattcggcgggtgcctgaccggcttcccaggcttgggagcggcggacccatgtgtgtacgatggcgcgttcggtgaccgcatccttgccggtgatcttggatgcgccatagaaggcatcaagttcatccaaacgagccaggtcctcgacggtggcggggcgcaggtgcaccatttcgccacggattggcggaatgacgatgctctgtggcagatcgcgcttcagttgcgcttcggtagccatgctcagcgtctcgttggttgcggtcatcggtatacatcccccggttcggcttgtttcggctcacggtccagtgccgaacatatcttactcgactgggtgaacgctggaaatgctctgagacgactttcttacagaatcaataaaggctcccgctggcgggagctgtccaacgaatttgaactggaggatttccctacaaataagtgctcccgctggcgggagctgtccacgaagcggactgagggtggtcatccgtacatggcgaccaccctcagtctcattccgttcgacagctcccgccagcgggagccagtgaatctaatcagcccttgatcttgcccatgacgaccttggtgacggccttggcgtcggcctgaccgcgcgtggccttcatcacggcaccgatgatcacgcccatcggcttcatgttgccgctcttgagcttctcgacgacatccgggttggattcgaacgccgcgtcgacggccgcctcgatggcaccgttgtcttcgacgatcttgtagtcgtgcttcttgacgacttcatccggagtgccttcgcccttaagcacgccttcgacggtctgcttggcgagcttgtcgttgagcttgccggaggcgatgagcttctcgacctcggccacatcggccggggtgatcggcagctcttcgagggacatacccttggcgttggcttcgcgggaaagctcgcccagccaccacttgcgggcaccggcggccttggcaccggccttgacggtttcctcaatcaggtcgagggcgtcggcgttgaggatgtcgcgcatctgcagatcactcaggccccactcggacttgaggcggttgcggcgctcacgcggcatttccggcatctgggccttcatctcctcgatgtgctccttggtgatgtggagcatgacgaggtcggggtccgggaagtagcggtagtcgtcggcatcggacttcagacggccgccggcggtggtctgcgaagcctcatcccagtggcgggtctcctgcagaatctccttgccgtcgtccagacgggcggcctgacggcggatctcgtactggatggtcttctcgatgccgcggaacgagttcacgttcttggtttcggaacgggtgccgtagggggcgtccgggctcggacgcagcgagacgttcacgtcggcgcgcatgttgccctgctccatgcgggcatgggagatgttcaacgcacgcacgatgtcgcggatggcacgcatgtaggcaccggcgatttcgggagcgcgttcgcccgcaccctcgatcggcttggtgacgatctcgatcagcggcacaccggcacggttgtagtcgaccagcgaatgatcggcgccttcgatacggccgtcggcaccacccacgtgggtgttcttgccggcgtcgtcctcgatgtgggcgcgctcgatcggcacgctgaagacggtgccgtcttccagttcgacgtccaggtagccattgccgttggtgggcttgtcgtactgcgagatctggtagtcacgcggcatgtccgggtagaagtagttcttgcgggcgaactggctccactcggcgatttcgcagtgcagggccaggcccagcttgatcgcgtaatcgacggcggtcttgttgatcaccggcagggagcccggcaggccaaggctcaccggggtcagctcggtgttcggctcgccgccgaactcgatgtgggccgggcagaacagcttggtgttcgtggacagctccacatgggtttccagaccgaagaccacatcgtacttcttggtggcatcggcgtacttcatcagtttttcagccatgatgttgtttctttccttccgatgctcacttgcctagaccgtcaagccacggggtcttgaggtcgttccagatcgggccgttccagctgtcttccagcgcggcttcgagggccgcagccggcttgtacatgacttcgtcgcgctgctgcggggcgatgaactggaagccgacgggcaggccgtcgtcggacaggccggccgggatggacatggcaggcacgccggcgaggttggccggaatggtggcgatgtcgttcatgtacatggccagcgggtcgtccatcttctcgccgaacttgaaggcggtggacgggctggtgggggccacgagtacgtcggccttctcgaaggcgttgtggaagtcccggatgatcagcgtgcggaccttctgggccgaaccgtaccaggcgtcgtagtagccggcggacagggcgtaggtaccgaggatgatacggcgcttgacctcgtcgccgaagccggcctcacgggtgtaggccatcatgttggcggcggtctgaggcacgccggtcggcggcatcacgcgcaggccgtagcgcatgccatcgtaacgggccaggttggagctgacctcggacggcatgatgatgtagtaggcgcccagcgagtagccgatgtgcggaaccgagacctcaacgacctcggcacccatctccttgagcttgtcgacggcctcgttgaagcgggcctcgacgccgggctggaagccgtcgccgccgagttccttgatgaggccgaccttcatacccttcagatcgcgcttggcgccttcgcgggcggcggcgaccatcgggcgcgggccttcggggatggaggtggagtcacgcttgtcgtggccaccgatgatctcctgcagcagtgcggagtcgagcacggtgcgggagaccgggccgatctggtcgagcgaggaggccatggcgatggctccgaaacgggagacgccgccgtaggtgggtttgacgcccacggtgccggtcagggcgccgggctggcgaatcgagccaccggtgtcggtgccgagggcgatcggtgcctcgaatgcggcgactgcggaggcggagccaccaccggaaccgccgggcacgcgctcggtatcccacgggttgtgggtggtttggtaggcggagtgctcggtggaggagccttgggcgaattcgtcgaggttggtcttgccgagaatcggcatgccggcggccttgagcttttcgatgacggtggcgtcgtacggcggcacccagccctcgaggatcttggaggcggcggtggtttcgatgcccttggtgacgatcatgtccttgatggcgatcggcacaccagccagctcaggcagggcggccttgtcttcggcggacttggcgtcgaaggcgtcggcctgctcgagagccacatcgccggaaaccttcaggaaggccttgatagacggctcagcggcttcaatcaccttgaggtgggcttcgacgagctcgcgagaggtgacgtcgcccttcttgatggcagcggcctgctcggcagcagacagtttgacaagagttgcggtttcgttgctcatcgattactcctcgcttcccaggattcgcggtgccacgaacatgccggcctcggtcttcgggccaccggcgagcgcctcttcctgcgtgagcggggtttcggcgacgtccgggcgcaggtaggcttccagcggaaccgggttggcggtcggcggcacatcgtcggaggcgacttcctggaccttgttgatggagtctgcgatgacgttcagttcgccctgcagacgggtgatttcctcatcggtgagcgcgattcgggccagatcgcccaaatgcacgatttcttcacgtgaaaatgttggcatggccataactatatgagccgtatgtgacacgcagttgtcgggaagcctcattttcccgcctactggagcccttcagcgaatcagaagctcaagccggtcgagcatttgccccgctgctggcttcttcggcggggcaaaaccgttgccggaccgcaagttcaccttactgagacgactcgcagcagagcaaaaccgcgagctgaccgatgaaacgccccgctcagccatcccagcaaaacaaaaccgcggtccaaccaataaaacgccccgctgagacgccccgcagcgaggcaacgccacggcccaaccgcaaatgtgccccactgaagtatctgcatggccaccctaataagctcacaatgagcccaaacacacctacatcgaacatatgaacgacaatcgccctgcgcccctcgccagttatccacattttgcatacccacccaaaagaatccacataatcagtccaatacggtcagatgcctgataatcaggcaaaaacacacatctaggcaccgaagctagaaccacataaccccagacagatagacaccatgttcaccattggcataccgtcgaatcatgaaacatcacaaagcagtggacatactcatcacgaaggctgaagcaacgcaacagtgcgcttatggaacaaccaaggcacaccgctcggcgctggctcggcgcgtgcaggcgcgcgaactcaaacgtgtattccccaacatgtacgccgcttcggaatactgggattcgctgcaacccgacgaacgtatcagacatattgcacgaactcttcataacagacatccggattgggtgttcgccggggtcacggcagcggccatccacgattttgaacaccaatggcatcttcatgctggcaccatcactctcgccacaacatcacgaggccccaacgccagcagtgcaaaggtcaaacgcatcttcacgtcaagcagcacgccagaatatgccaatggactcccggtgaccagcaaagccagaacggtggtggattgcgggctgtccgtcgacttccgatttgcactgcccattatcgattcggcgctgcgcaacggcgtcgccatcacggacattctgaatgtgtgcagcactatgcgacgtgattgcacgccgatattccgcctactgcattatgccaatccggcgagtgagaatggtggcgagtcacttggacgaggcaccatcatcgcaggcggcctattagccccagaactgcaacaaaacatcaccgacccgcaaaccggtgctctgtatcgcgtggatttcctctggcggctacctgagaatcggcttatcgtgggcgaattcgatggctatgaaaaatatgtgaacccggatatgaatgaccgcaagggtgttcgtggtgcagttcaagcggagaaagaacgggagacggcactgtaccgggccaaagtcgacaccattgtccgattcacctatgaggaggtgatgcaacaacatcctttactcaataagctgcgggcagccggcatacctcatgctggaacagtgatgggagctggttaagcgcagtgaaccacggtggtcaaatccatggggtcagagtcaccagaaccatggtcactgcagaaccgccaaagccatagccatgacaaactgccaggaccatggccgaaccggcagaaccgccaaagcagtaacccgcgttatttgatatccgatatccgcttttccggtgatgatgagaccgccgatccatgcggcggcagcccaggcgatgagaatcaggccggactgccaccattcgggaatccagtagtccggtttaacggcttcggccagtgtggactgcgcggagctgctgatgcctgcggcgagcaggatgccgacgatgccggcggcaaatgcgaattaatgccgcggcgatggatttggtggcgtagatcatgcctctaatgtggcccatattgggcagatgcggcaggattgtcgtcgcatggctacacgcctgatacggcgtgttgggcaatccatgcgtgcatggccacggccgccgcagcgcctgcattaatggagcgcacggaaccgaattgagagatgtagaccacatcgtcggccaattcgagggccttctcgctcaatccggggccttccgcaccgaagagcagcaggcaccgcttggggaaggtataggtttccatcggcactgcgccgggaatgatatcgagggcgatgacgcgggcggcttgaagctccttgatgcgcgcatcacaagcatcgatttcggccagcagctcatgaaggtgcttgttgtctccatccacagccacatcatgcgcatggatggcggcggcaccggccttggctcgttcataggcgatttcaccggcgatgcgatgatgccagctttccaccagttcggcgatggaggggtggtgttcgacgtgctggtacagttcggtcatcaacgcgcccttgcgattccacttatgtggaccgacaatgtgtacgcgcttggcctggaaggcgttggcggtgcggaccatggaaccgatgttgaaatcgtgggtccagttttccaccgcaacttcgaagtcgtgacgccctcgagcgtcaagatcggccttaatggcagcgacggtccagtagcggtaacgatccaatacgttgcggcggtcgccgtcattcaacagcaccgagtcgaaacgaccgtcataattcggagaagtcggatcgtcgggacgaggctcgccgggatgggtctcagaccacggcccaaggccgatttcacggaattccggttcacctgaagctttggcagccaaagaaatctggttgggtgcgtgcaatctttctcctcgataacgctattcaccggttcctcttagtcaacttcgcggctcagcccggctgactttatgcgagggaagtcaaaggtggatttaccgcagttcggattcgtcgaagacctggatgaaggggagcgtttgctcgtcgccggtggaggggttgaccacattgatgtctttggcaccgccaccgaccagcgaggcgatggccacgaccttggcacccagctgctccactatgccaaagtcgaggctcagctcattgccgttgcgcagggtgaccagcgagctggtctgcacgtacgacttttcggacagccaagcatccaacagcaccacacggcggccttcgatggaggggcccttgatggacgggtagacgaagtccatcacgaatccgtctaggtcctcgccacgagaggcggcggcctggatcatggcggacaccatgggcacagatgctgcggtcaaggcaccaacagcatcgaagtcatcaaccgaatagcccgcatcttccaaagcgtcaatcagtacatggcccatgacggtggcggcacggtggtcaaaagtcaccgcggcaagttcggagaacggacggcccaccacatgctccctcagcaaggtggctagctgttcacgcggctccagcatggcaaagtcattgcggttcttcgcgacggcgaggtccggggtaccagtggggcggaatccagattcagtcatgactccagactatcgcctgaggcagtcagatgagtatcaccttcatcggccggcaccacttcaggggcggacagttcgctcacattgcctttgtctgattcgatgatcggtacttcctcgatgatcttggtcggttcgattttttgcagcttgcgagcggtgggcaacacacggcgttccaaactggacgcgaacttgttgtaagcgctgactgtcttggtgatctgggtgcccaatttgatggcataatcacccaacgtggagaaccgttcgtaaagttctcgggacaaatcgaacagctgcttggcgtcatcggtgagcgactgctgctgccaggcataggccacggatttcagcacggcccacagcgtgaccggcgaggtgagcgccactttgcgagagaacgcatcatccatcagtgtggggtcggcttcgagcgcggcctgcaacagcgcctcattggggatgaaggccaccacaaaatcgggtgccacatcaaaggcattccaataggccttttcgccgagagcacgtacatgctcgcgcaacgccttggcatgggctcgcagcaaatcatcgcggcgggcaatatcctcggggctggcggtgtccgggatctcgcaggcacgctggtaatcggcataaggcactttggcatcaatcggaatggtcttgcctcccggcagatgcacgatcatatccgggcgcaacgtacgtccatcggcatccgtgaccaccacctgaatgtcgaaatcgacatgttccagcaatccggcggactcgacaatgttcttgagctgggcctcgccccacgcgccacgcaccttgttgttgcgcaatgcggcggacagggaactggtttccttgtccaaacgggcttgctggtcgttgagccccttgagttgggctcccaatgcgcccatttccctcttgcgaccctcttcgatctgcgtgaccttgttctgcaaggtatcaagattcttggccactggcgcaagcgcctcgagcaccttgctctgttctttcaaacgtgcttcctgttcagcacgcttggcctcggcggcctgagcatccgcctgacgcttccgttccgcctccgcagctgcacgctcacgttcctgctgaatgcgaatctgctcagcctgctgcgcctgggcaagttgtgacttggcgaaagccaattgctggttcacgccttcaatctgagcctgtgcggcagcattgcgagcactgagctcagcattctcgaatcgcgcattctccagcgaggtcttggcctcctccagctcctcgcttttgacgcctcgagccatctcctgacccttatggcgccccagcacgaagccggcgaagaggccaagccctgcaccaaccactagcacgacgatgacgataaccacggttcctatttgctcaaacatggtacccagtatgtcatcgatggtgaatgacggtaaatttttaccgaactcgacgatttcaagccgttaaacggacgctcagcagcccacattggacgcttggccttatcacagtcgagcatcaaccgttattatgctgtgtcgtatccgagcgtcagacggcctttcatgatttgccagcgcgcgtcatcatgcggcagaactcgtcacgatttgacgagacgcgcaatggccgcggaagcctccgcaagtttttcatcggccacctcgccgccctggaccgacgcctgccgcacgcaatggttgagatgatcgtccagcagcaataacgccacggatttcagcgccgaattcgacgccgaaatctgcgtcagaatatcgatgcagtatttgtcatcctccaccatctgcgtgatggcgcgcacctgcccttcgatacggcgtaatcgtgcgatgaccttggccttgtcttcgtcataaccatgcatcgcaaaccccctgatacttatccgtcagctgaacacaccccattatataccccctaggggtatagggtatacactgttgttcagtacatcaggagtgggaaggaacagttatggagttcagcatcttctcgaccgtcgcggcgctgatagtggcggccgcattgacatggctggtcctgcgattcttcttcggaacgcagaaggcaacggccggggccatggacgcttccggcgaacgccaatccgcaacaatcactgtcaagggcgggtactcccccgccgtggtgagcatgcgtgcgggtacgccgatcacactagccttcgaccggcaggagaccggcgaatgcacctcgcatgtggtgtttgctgatctgggacttgacgccatgctgccgggcaacgccaccaccgacgtgaaactgccggcgttgccggcgggcgagtatccgtttgcgtgcggcatgaatatggtgcatgggatgttgaaggttgagggagaggacggctcggacgagaacacgccccttcctcatcctgatgcttcgtatacggcacctaccgccgtggatgcggcggaggccgatcggcgagaggcggctgaacgcgccaatgagatcaaggcgctgacgaagctggtgattgtgggcgcggtactgacgttgccggtattcgccgtcaccatgctgcatatggccaatcccacgctggtgccgcattggatggtgaacccgtggttgcaggccatcctgatcacgccggtgatgttctactgcgggcgtccgatccacacggtcggcttccccgcgttggcgcatcgctcccccgacatgaactcgctggtctcactgggcacttcggccgcctacctgtattcgctggtgacctgcatcgccccgtgggtgttcccggaaggctcgcgcgaaccgtatttcgaatcggttggcgtggtcatcaccttggtgctggtcggccgccttctggaaaccaaggcccgcgaaggcaccggcaaggcggtgcagtcgctcatcaaactgcgcccgcgcaccgcgcacaaactcaacgccacttccgcagacaatgtggacggcatcgaatggcgcaatccggcgtatttcacggacaccgacatcgacgccatcgccaccggcgacctgctggtcgtcaagaacggcgagcgcgtgcccacagacggcatcatcgcggccggcgaggcgcatatcgacgaatcgatgatcaccggcgaatccaagccggtttccaaaaccgtcggcgatccggtaaccggggccaccgtgctgctcaagggcgactgcgtgatgcgcgccacccaagtcggcgcggacacggtactctcgcagatcgcggcgatggtggcccgcgcccaggcgaccaaggcgccggtgcagcagctggccgataagatcgcccggtatttcgtgccggcggtgatgatcatcgccatctggacgttcgccatctgggtgtcactgggcccggtgccgcaactggcgcatgcgctggtcaccgcggtcagcgtgctgatcatcgcctgcccgtgcgcgctgggactggccacgccgctgtcggtgacggtctcactgggcttgggcgccaccaacggcgtgctggtcaccagcgccaaggcgctggaacaggcgcgtcgcatcggcaccgtggtgttcgacaagaccggcaccatcacgcgcggcgtggtggacgcggccgccgactgggacaagccgagctacgagcaggacacagtcaaggaaggctcgcgcgaggccatcgcggcgttgcgcgcacgcggcatccgcacggtgatgctatcgggcgacaaggccgaggtagccgggcgcatcgcccgcgaagtcggcatcgatacggtgatctgcgaggtcaagccggacggcaaggcctactggatcgccaaactgcagcgcgaacgcgacgaggccgccgccaagtccgcggacggcacctcccgcacggccgcgcaatcccgcactctgattgcgatggtgggcgacggcatcaacgacgcccccgcgctggcccaggcggatctcggcatcgccatcggcaccggcacggacgtggcgatgcagtcggcggacgtgaccttgatgagcggcgatttgcgcggcgtcatcaagaccatcaacctgtccaacgccacgatgcgcaacattcgggagaatctgggctgggcgttcggttacaacgtcatcggcattccggtggccgccggcgtgctctacccgttcaccggctggctgttgagcccgatgatcgcgggtctggcgatggcgttgagctcagtgtgcctggtgctgaacgcgaacaggctgcatgggtcgaacatcaacgcgggcgttgtcgatggcaccgctggctcgggcagcagcacggcggatgtcgaatcaaccggatcggccgaatcagccaacgccgccaacatcaccggctccgccacatccaacgcgcctcacgagccaaccgtcatcatcgacgatcgcaccacgctgaatcacaccaatcacgcatctgaccaatccaataatccaaccaacaaggagaacactatggatatgggaatgcacatgcaccacaccgcccccgcggacggcgaaaccgccatcgacccggtgtgcggcatgaccgtggcggtgaacgccgacgcgatcacgcgcgagtatgagggcaagtcctattacttctgcggcgaacactgtgccacgaacttcatgaaggccccgcaggtgttcctggagcagtagtctctgcgtttacctgattcaacgacaatggcctccgcccaaaacgagcggaggccatttgcatatatgaatcaatcaacgaatcagctggcgaagaagaacacgaacagccaagcgccgatgatggcgccgacgatcggggccacgaccgggatccaggcctcgccccagcgggaggagcccttgtgcgggatcggcagaatggcgtgcagcagacgcggcatgaggtcgcgagccgggttcaggccagggccggtcgggccacccatggaggtcacgaggccccacacaatgaagccgaccacgatggaggatgcggcgtcgtcggccttgccccacggcagcgtcaggcagcacagtgcgccgaacaccagcacgagcgtgccgaacatctcgttgaggaagtagttgaccttcttgttgtccgcgtcagtggtgcagaaggtgcccagaatcgcctcggcgtcctcggtctcctggtagtgcgggtagtaagtgatgtagacgatgagctggccaagcagggcgccgagcagctgggcgacgatgtacggcagcacttcattccaggggaacaggccgttgatggcctgagcaagggtcatggccgggttgatatgagcgccggatacgccaccgaacatgagcaccgggaacatgacgccgaagccgtagcccatggcgatgttcagccagccggcgtggtggcccttggtgttcttgagctcgacgttggccacggagccgttgccgaagatcatcagaatggcggtgccgaagaactcggcggccagcttggtaaagagagagtattccactgcttcttcttttctcttcgccgcgcaacaggcatggctgactgttcacggcattctgtgtgattggaaatccgttcgcggagccggcgacgcgatttacgctgggcgcgaaagcaaacgtggcgattgtacactttgccccacgacgaaatgctggcaggatgcgatgtcgaatgtccagccgaatgcaatgcccaaaaaagccaccggaatcagccgaagcgaccttgactctcagtggttgcgaatgacgttgcgcaggggtaggacgctggtgggcgagacggacagttcgtcgattcctaggcacaggaacgtatcggtcaggctcaggtctgcgccaagctcgccgcagatgccgcaccagatgccatgacgatgggcagcctcgatagtcatctggatcatgcgcagcacagctggtgaatgcggggcggcaaagcgttcgagactcggggtctgacggtcacaggccagcgtgtactgggtcaggtcgttggtgccgatggagaagaaatcgacttcggcggccagctcgtcggccatgatgaccgacgcaggcgtctcgatcatgacgccgatctggatactctcgttgaagtcggtgtgctcgccgcgcagctcgcttttggcttcttcaagaatccgcttggcgtcgcgcacctcctgcaccgaggtgatcatgggcagcataatggcgatattgccgtatgctgaggcgcgcaacaatgcgcgtaactggactttgaaaatctccgggcgggtcaggcagatgcggattgcccggtaaccaagcgcggggttatcctcgtggtccagattgaagtagtcgacctgtttgtccgcgccgatgtcgagtgtgcggatgatgaccggacggtcgcccatctcctgtgcgacttgtctgtatgcatcgaactgaaattcctcggtcggccagtcctcgcgttccagatacaggaactcactgcggaacaagccgatgccctcagcatcgttggccagcacggcggctacgtcagagggacggctgatgttggcgtacaggtggacccgctgaccggacttggtttcggtgggcttgcctttgagcttccgtagtaggctcaggtgttcctcagcttcggccttcctgcgctggcactcggtcagcgtggcctcgtccgggtcgacgaacaccgcaccgctggcgccgtcgattacggcaacgtgaccgtcatcagtcgggtcgaaggcgtcgccgataccggtgatggcgggcaggcccatcgtgcgcgccagaatcgcggtgtgtgagttcgctgagcccttggcggtcacgaggcccaaaaccttagcgcggtcgagctgcgcggtctcgctgggagcaagatcttgggcgaagatgatgtggctttcgccgttctgcgcaatcccgttctgcacagtaccgttctgcacagcatcgccttgtatactgccatcctgcgccgtgctatcgcgtttgccttgcagcacgttcatcacgcggcgagaaacatcctcgacatcagcggctcgagcctgcatggtcgagctatccatcgcagcgaacatggcggcgaactgttcggcgacgctcttcaccgcaaattcggcgttcaccttgtcttgcgcaatcaaaccttcgacgcatcccgcatagtccgggtcctggagcataagccgatgggcgtcgaacagctcggccttgttttcgccgaactcagcggcgacgttgtcacgcagttgcttgagctgagcgacggccatgtcacgggccgcgcggaatcgatccatctcagcctgcggatcgtcgattacgcggcgttctacagcatgatcggcggcggcgagcacgcggaccgtgccgatagcaatgccagcggatacgccgacgccctgtatcgttctcattacaggtgctccttgaggaatcgctcgaactctgcggcagcgacagcttcatcgttgccctgcacccgaaccgtaacctcgtcaccttgttgaacatcaagtcccataacaccgaagatacgcttggcatccacggatttgccgccgtaggcaacggtgatgttcgactcatattcccgcgctttggcaaccaaccggccagctgggcgggcgtgcatgccttcggggtcggatacggtgaacgcgaatatctgagacatgacgccgctccttacacgtccggccgtcacgcgcgaagacggcctttccgcaccagctacggactgatgctggaaaaaacaaaaaaaaccggaatctttcgattccggttgtctgtgcccccgcagggattcgaaccctggacacgctgattaagagtcagctgctctaaccaactgagctacaggggcttggttagatgttgaagtgttccttgcaacaggtgttaaatatactcagatttgaagcggatgcaactctcggcgtgtcgcgcctatttccagcgtttttaaacaccaatacaaaaatcccccatgcggcgcgaaccgcacgggggatgatgcttaagctcagactcttggtctgtgtgattccagcactaggccggaatgactcactcggccacgaccttcacgaagaaggaagcggtgatctccgggtggagggccaccttggcggggaaatcgccggtggtcttgatggtctcgacctcgatggccttcgggttcaccgcggccttgtcggacagagcgatggcgatggcctcgttggagataccaccgaacagcttgccggactcggacaccttggcggcgatctcgacggtggtgccctcgatggcggccttagcggcgacggcgtcctcgcgggtagcgacggccttggccagacgagcgcgcttcatagcggtgatctgagcctcagcacccttggtccacgcgaaagcgaggccctgcgggaacaggtagttgcgggcgtagccggccttcacgtcgacaacgtcaccggagtggcccaggttggacacggtcttggtgagaataaccttggtttcagccattgttcaaagcctccctaactcagcgacccgaggtggcgtacggcagcagggccatctcgcgggcgttcttgatcgccttggagagctcgcgctgttcctgcacggtcacgccggtgatacgacgggaacgaatcttgccgcgatcggaaatgaacttgcgcagcagcgcgacgtccttgtaatcgatctcggtgaccttggcggccttcagcgggttcggcttcttcttgaacggcttgaccggcggttgcggcctcttacgtgacatgatgttctccttataaatcttgatattgattgctgctggcagcggggaggtaagtactgatcagaactccgggtcggaatcgtcgccgccgccaaaatcggaggaagcgccgaacgtggagaagctaccggcatcagatgcaccggcattgctccacgggtcggccgcaggagcggacgggttggcgggagcggcaggctgctgggagtatccagcgccaccaccctgatagccaccgttgtaaccgccctggccaccggcataaccaccttggccaccctggttgccatagccctgattgggttgctgaccaccctggaaaccaccggaacgaccttggaagccgccctgaccggacgactggcgggtcacctgtgcggtggcgtagcgcagggagggcccgatttcatcgagctgcatctccacgacggttcgctgggaaccatcctgtgcctgataggaacgctgctggaggcggccggtggcaatcacgcgcatgcccttcttcagggactgggcgcagtggtcggccaggtcacgccaagctgagcacctcatgaacagcgcctgaccatcctcgaactggttggtctgacgattccaggttcgcggggtggaagcaatcgtgaagctcgccacggtcgcgccgctgccaatagtgcgcagctcggggtccgcagtgaggttgcccacgatggtgatgacggtttcgcctgccataacggtccttcttacttaccttgaataccagctgttcagctgactaaacgcttgattcagcccttacgaaggatcttcgtacggatcacggattcgttgaggttcagaacacggtcgagctcatcgctggtagcgggctcggcggtgtacttcaccacgacgtagttgccttcggtcttaccggcaatctcataggcgagcttgcgacggccccagtaatcgggctcatcgaaagagccgccttccttggtgacgagttccagatactgctcggtcagcttcttcagaccgcgctcatccagctcaggatcggcgatgaacatcagttcgtacttgtgcgcagacatcacccacctccttcggactattcggccacggacgttccgtggcaggagtgtgtatgcgtgttagcccatggcgcagcaccaaaccggcaccgcatcttcgggcaacttggacagtctatatataaggcgggacagggtatggccatattcctgccggtttcgcgatgcccaccattttggccaagcccgcgcagccaagcccgcgcagccaagcccgcgcgccatcacccagtattgtccatttcgagcctcgccctatggtcatggcgctgattttgcgggtacgatagtgctcgaagaagcatcagaagaaagggggactatatgttctgtcctaattgtggcgcagctgtgcgcgaaggagcgcaattctgcggttcctgcggcaaccatcttgccgcggcgtcagctccagcagcagcgacgcccgccgcacccacgcccggtcaacccaccggcgccgttcccacgaccgcacagcccgcggctcccgcaccatcgattccgttgcccggcgcagcggctgtgcagccgacgcctcagcccgctgcacagccgcaggcccagcccgcaggcggaccggcattcaccgcaccgaccacggccattccgaacccagggcagcccggcccatcgccggctcccgccgctccggcacaacccatctcttccagcccactggtcaaggaactgttcggcgcccccaacatgcagaccatcggcattgcggccggcatcggtacggcagccgccttggtgctttcgattttccctgcaatcgcaatgaattccatgagcaccgcagcacccagcctcggggccgattcaacactgaaccaagccgtcggcggcatgttcatcaccggcaacggcatgaacttcttccactacctgttcctatcgttggtcatgggcctgtctggcggtattcatttcgacatcgtcgacctctcatcctccagcatggacgccagcaacatgatgtcgtacccactggggctcaccggcttggcattgctggtcggcaccgcattcggcgcattcatgctggcccgttccaagagcattcgattcaagttcaccggcctgatctccggctttatcaccggattgctgccggccgtggtcatcacgctgcttgcggccatcacggcggcaccactcgccagtggcaccaccatcgtggccaaggtgaccggcgccacagtgcgtacgttctttatggcctacctgctctccgcgctcggcgctctggccggctatgcactggcccaatatgcttccgattccaagaatgtgttcggagctacttggcagtgggcacaccgcgttcgcggatacacgcgcacggtggtcagcgtcttgagcttccagctggctttgctcttcatcgtcggcctggtggccctgttcgccgtggcattctcctcaggtcagggaatcctgatactgacgttcccggtcacactgctgatgatcggcgagttcttctttacctgggggaccttcggcgccattacactgaccgagtccggtcagctgccgcaggatctcagcctgttcagcatcaacctcagcgttaccgtatggcctatttggatcctgttcgccgtgttcctggtcctcaccttctacacggcattgcgcgtctccgcacgcaacctgtacgaccgtgcctacatgggctggcagcactgctggaaagccccgatcgccatcatggtgttctgggcgattgccacgctgctgatgggtactatgggcaaccgcacctccgtcacgcaagttcagaccaccggacctgccatgtggtacttcctggtcatgggcctgtgggcattcctggttgaggtcgttgcactgacgttcggcccgaccatggtggtttccatgccgggactgcgggccctacttgtaggcggcactgtgcgtgccacgcctcagcctgtggtcgactacatctatgccagcggcgcaatggtcggcaagtggcccacgtggggcacgccaagcgccggcgtgggtacgggcgcaaacgctgcgcagcctcacgtcaacgtcacgccgacgtccgccggccagcctcctgttgctggtgtcggtgtacccgcgcccgctgccccgggtgctccggccgcccctgcaacccccggtgctccgggcaccacattcgcaaccgcggctcccaccactcccggagcggcaccggtagccgcacctggcgcgacctccaccaccatgaatgagcagcagaagaagatcttcatcatcgttggtgccgtggccggcttcctcgtactgttcggtatcgtgtatggcgtgctgtcttccgccgtgttcagcgcgaagagcgtggcgaacagctatgtggccgccatctcctccggcgactacgacaaggccaacaccatcgccgatcctcacgtggatacgaaccagcgcgcactgctgaccagcaaggcatcctcgggcgagaacacgcacatcaccaacgcgcgcatctcgcagacttccaacaatgccgatggcaccgtgagcgcccagctgacgtacacgcttgaaggcaaggaggtcaccggcgattccatcaagatggtggccaacggcagcaagttcctgatcttcaagaactggaccgtcgccgaaccgttggtcaagaccatttcggtatatgcgccaagctcgctgggcagcatcaccgtcaatggcgtgaccgtaacgcccaagaacgccgtgaacaacgacgcggacgaaaccggcaactaccggctcaaggtgtaccccggcgtctacaaagttggcgtggtgaagtccaactattacaccgccaagaccgtgtctctgagcaccaacagctccgatagcggcactcttgacgctcagcctacggacaagttgacgtcggaaatcgacacggcggtgaagagcaagctggatgaatgcgcggcttccaccgatgcggaaccgcagggctgcccgttcggctactacacctccaattccagccgataccgcaacttcaagtggacgattgacggttatccgaaggtcaccagcgtgagcctgtcggatagctcgttcagcaccgacgaaggtgatgtgacggcgaattacgagtaccgttacagcgatggctgggaaccggaagacgattccagcactttctcggtgtacggcaccttcaccatcaaagacaataaggtcagtgtcgagttctccgaataatttcggcaatctcaacactcttacgaaataggcaccccgccgtggcgttcgctgcggcggggtgcttgtacactggttaaggcgtaaatcacacagcgactcaaacaaaggatgcgaacgcatgtcggcgattcttgaaggcactccggataaacgactcgtattggtcacgggccgcgcctaccccgagctagctgagaaggtggccgaatgtttgggaaccgaaatcctcgaaaccacgtcctatgactttgccaatggcgagatgtacgtgcgtttcaccgaaccggtgcggggtgcggacgtgttcgtgctgcagtgtcattcgggcgatatcaacaagtggatcatggaacagctcatcatgatcgacgctttgaagcgcgcctccgccaagtcgattaccgtggtggcgcccttcctcggctactcgcgccaggataagaagcaccgcggtcgtgagcccatcaccgcccgtctgattttcgatctgttccacgccgccggtgcagaccgcattatgacggtcgatctgcacgccgctcaggagcagggtttcttcgatggtccggtcgatcatctaaccgccatgccggtgctgctcgattacgtgcgttccacccttgatctgggcaacaccaccatcgtgtccccggatgccggccgtatcaaggtgtccgaacagtgggccgccaagctaggcaatctgccgctggcattcatccacaaacagcgtgatattactcgtccgaaccatgccgaggcacatggcattatcggcgatgtcgacggccgcgactgcgtggtcatcgacgacatggtcgataccgccggtactatctgcgaagccgtgcgcaccctgaacgaatccggcgccaagtcggtgacgctggtcgccacccatggcctgctctccggcccggccgtggagcgcctgtctcactgcggcgcgcatgaaatcgtgtttatggacaccgtgccgattcccgaagagaagcgcctgccgaatatgaccgtactgtcttgcgcaccgctgctggccgcgggtattcgctccgtgttcgaggaaggttccgtggcgattctgctcgacggcctgcccgaggacatgcgtccgcgcaatatctatgcgtgattgatacgccgaaaatccttacgaaaaacgccgcttgactatagttgggtgtacgtaagacagtattgcgccgagatcgacgaagcggcacgaaaccgcatggagctgatcgtgcggtcactggcagagcaaaacggcgtgaccgagcaactgaaagccgaaaaccaaatggaatgggtgcggcagatgaacgcttgcaaggcacaggcagaggagattgtgaaagcggaattgatttatgattgagtgagaaaagtccgggcagaaaactgtccggacttttctcatacagtccaaaatgacggtagaattattcacaattttatggtataatttgaatacgaaaattgagaaacaaatcggaatttataaagaagaatattgatgaaactatttttatgttcacacttttcaagtgtaggaagtctgataaaggaagaaattgaaaataagaaagtcgcatttattccaacagcttcactgcgtgaaggctacaccggttatgtcggctcggctcgaaaattattcaaaaagttgagagcaatcgtaactgaaattgatatttcaacggaggcttattcaacgatacagtctgtttttgaagaagcaaa

SEQ ID NO: 366 - DNA, 88468 bp, Unknown
  R42_10m  MAG No. k141_26715
cttgccatacgggtcaagcaggaatttgtatggattgaagcgcacgccgtgtttcgggtcccatgcgccgtccacgcggtagccataacgcatgccgtcccatgctttgggcaggtgcacgtaccacaggccgtagttcggtccggtcatgcggaacagggtctcgcgcagatacaaatgttcgataatgcgcgtgcacaccggaaactcatggatctgctggatgaacgaggcgttcgggtcttcgaacaggcggatggcgtcttggaagaaggcgccgggctcgtcaatgggctccagcacacacagccaaacctgatcggcagtttcggaacgaacaacgacgtcagccccaccgtcgtcagtgaagtacagccctgggcgagtggcgtaacgatgcaacggtgggtttttcatacctccattgtagacgtgttgtcacttctggtggaagcccttgatttcctgccgcgttccgcagcaccacagatatcgtcgaaataattctcggcgaatcgcaatgcggcaccgatgatgttctggtcttcggcgcagtagctcttgcgcagattgaaatggtcggtgccgaacggactgcgtgcgatgacgcgcgccttcagatcctcgatgtcactgtcttcaagatgctgggctgcttcaccgccgacaatcacgtcgcccgcgatgatggatcgcgcgttgacgatggcctgcgccacgtaatccagccattcgtccatgcgctcgcgatgatgccgttcaccctgctcaagcacgctgaagaagccgggaatactttcgtaatcctcgggcaaggtctccggcgagcagtaggtgtccatgcaaccgcgctggccgcagtagcattcgcggccgcccggcaccagcgtcatgtgttcgatggcgccattgcacatattcggaccctgatacagcttgccgcccacgatcaccgcgccgcccgggcgtcgctccagatagacgcacaccgcatcggtgagcgtggagtcgaaccatagctcgaccatggcggaggcatcggaatcgtggatcatcatgcacgggtaatggaccgactggctgatggtttcgagcgtaagccccgtgttgcccataatggtgccgaaggtgatggtggtggcgtcgggggagaggatgccttggatggcgaacgagacgccgagcactttgccgtgcttcttttcgacgtcggaggcgaagttgttgatgatgccgccgatacgctggtagtaaacgttggtgttgcggtaaggcagggcatcgttgcgtttttcgatgacgttgccgtacaggttaatcgcgcacaggcgcagttcgttggaccgcatcactacgccgatggcagtgcgatgatcgggattgaactcataattttgcgccttgcgcccgccggtggaatcctgcagttcgcctttgcggatgagtccgtcatcttctagggcgcgcagattttgggtgatggtgggcaggctgaggccgagttcgcgttccagttcctgcttggtgacatggctatggccatacagatactgggtcatggcactgcggttgtgcgctttcactgcggtcgatggcattgccctcatatttacccctttgtgcgatgagatatatgtaagtatactttatgaaagtggctttcatgtgcctcgacgcggagattatgaggcaacaatcgtatatttgtaggcgattttgggcacttttttaaaccaattttctagaaatgtggggaaaatgagtacttttggaaacttgatttaagaaagttgtcggattgcgttgtctgcaagcatgtgattttcggtaaaaagtgaacaaaaagtaccaaatcgccgaataaagtgaggatttgttcgatatttcgcacaactcttaacaaaaactgttcaatatcgcacgtgaaacgccgtcgattttgtgcgtatgcatcgcgccggaccgttcggtatattgtgactcaagtcacatatgcaatgtgacaacgcatcaccggccattttcggttactgaggcggtatcccgctggtgcaactgaggtgacgaggcgatggcccagaactttgccatataccccaagaagatcgaggaggaccccaagtggcagaagcaaagaagaaagtcgaagctgccaatccgaccccagaagagaagcaggccgcagctgaggccgaagttgacgcgctggttgcccgcgccaagaaggctctcgacgaattcgagaacctcgaccagaagcaagttgatcgtatcgtcgccaaggcctccatcgccgctctgaacaagcacctcgttctcgccaagatggccgtcgacgagaccggccgtggtctcgtggaagacaaggccaccaagaacatcttcgcctgtgagcacgtcaccaactacctggccggccagaagaccgtcggcatcatccgcgaagacgacgtgatgggcatcgatgaggtcgccgagcccgtcggcgtggtcgccggtgtcaccccggttaccaacccgacctccaccgccatcttcaagtccctcatcgccctgaagacacgctgcccgatcgtcttcggcttccaccccggcgcgcagaagtgctccgtcgaggccgccaagatcgtgcgcgacgccgccatcgaggccggtgctcccgagaactgtatccagtggatcgagcacccgtccatccaggccaccggcgcgctgatgcagcacccgggcgtggccacgatcctcgccaccggcggtccgggcatggtcaaggccgcttactcctccggcaagcccgccctcggcgtgggtgccggcaacgccccggcctatgttgattccgatgtggacatcgtccgtgccgccaacgatctggtgctctccaagcacttcgattacggcatgatctgcgccaccgagcaggccatcatcgcccacaaggacgtctacgaccagctcatcaaggagctcaaggtccgtaaggcctacttcgtcaacgccgaagagaaggccaagctggagcagtacatgttcggctgcaccgccggttccggcgtcaagcccgtgctgaactccgtggtgccgggcaagtccccgcagttcatcgccaaggctgctggcttcgagattccggccgacgccaccattctggccgccgagtgcaaggaaatctccgacgacgagccgctgacccacgagaagctcgctccggtgcaggccgtgctcaaggccgacaacaaggagcaggccttcgagatgtgcgagaagatgctcaagctgggtgccggccacaccgccgccatccacaccaacaaccaggagctcgtgcgtgagtacggcgtccgtatgcacgcctgccgcatcatctggaaccagccttcctcccttggcggcatcggcgacatctacaatgccatcgccccgtcgctgaccctgggctgcggctcctacggcggcaactcggtgtccggcaacgtgcaggccgtgaatctcgtcaacatcaagcgcattgctcggaggaacaacaacatgcagtggttcaagatcccggccaagacctacttcgagccgaacgccatcaagtacctgcgcgacatgtacggcatcgagaaggccgtcatcgtgtgcgataaggtcatggagcagctcggcattgtcgacaaggtcatcgaccagctgcgcgcccgctccaaccgtgtgaccttccgcatcatcgactacgtcgagccggagccctccgtcgagaccgtcgaaaagggcgcggagatgatgcgcgaggagttcgagccggacacgatcatcgcggttggcggcggctccccgatggatgcctccaagatcatgtggctgctctacgagcacccggaaatcgccttctccgacgtgcgcgagaagttcttcgatatccgtaagcgcgccttcaagatcccgccgctgggcaagaaggccaagctcgtgtgcatcccgacctcctccggcaccggttccgaggtcaccccgttcgccgtgatcaccgatcacaagaccggctacaagtacccgatcaccgactacgcgctgaccccgtccgtggccatcgtggatccggtgctggcccgcacccagccgcgcaagctggcctccgacgccggcttcgacgccctgacccactcgatggaagcatacgtgtccgtgtacgcgaacgacttcaccgacggcatggccctgcacgcggccaagctcatctgggacaacctggctgagtccgtcaacggcgagcccggcctggccaagaccgacgctcaggagaagatgcacaacgccgccaccatggccggcatggcattcggctccgcgttcctcggcatgtgccacggcatggcccacaccatcggtgccctgtgccacatcgcccacggccgtaccaactccatcctgctgccgtacgtgattcgctacaacggccagattcctgaggagcccacctcttggccgaagtacaacaagtacatcgccccggagcgctaccgggacatcgcccgcaacctcggcatcgacaccggcaagaccccggccgaagccgtggagaacctggcgaaggctgtcgaggactaccgcgataacaagctcggtatgaacaagagcttccaggattgcggcgtggacgaggattacttctggtccgtgctcgatcagatcggcatgcgcgcctacgaggaccagtgcaccccggccaacccgcgcatcccgctgatcaacgacatgaaggacatcgccgtcggtgcttactacggcgtctcccaggcggaaggccacaagctacgcatcgagcgcgagggtgaggccgccactgaggaagcctccgagcgctgattgcaggcggttggcggctgctggcaccagcagtagccaccaaccgcggtgttgcagcttagtggctgcatagcggacacaaggagcccgaccccattacaggggccgggctcctttgcatatgtggcgctccctcagccggcaggtgcctccatggggcggtaacctactcatggggcggtaacttgcccatggggcggtgaaaaccccatggggcggtgtacgaaaacggctctattctgcggaaggtaaaattttaccgtccgccccatgggctaattaccgccccatgagggaattaccgccccatggaatcgctgagcgtcgctaaatcaccgcaataatgcagccaaaagcaataaagctggcaaacgcctcggtaatgccggtcaccacgggcttcaaggttgtgcgccgtgtaaccaccggcaacgcaacggcgcgggccaacagcagcacagtcatcgcaatcagatacgggctgcgtccagccggcacggcggctagcagcaatagcgccacatgccatacccacgaagccgccacgtacgaacgcttcccgcgttcccggatcatggttttgaccaccaaaaccgacccatactgcgtcagcgcaaacagcacggtggcaatcagcccgttcacgggcaatgaacccgcaggccaccaggcgtgaaggtcgaatatctggctcaaatccggcatattccgaatcgcggcgcgtgcggcggtgacatcagcggctgcgcacgaggcatgtgctgcgttgatgggaataacacatgccgtctcaacagcgttgccaaacgacgcgatcaccgtggccatggccgatgcggcaatcaccgacacggcattgccccacagcgagcgctccttcctcagccacgaggacagcatcgacagcgcaaccagtactatatataaaggagcccaacgcaatatgccggtatgcgtaatcaggaatggcaagccgatgacgatgagcgctacggcataagtgagcatcggcggcagataacggcgtgaaaagtgtgctttgaaccagtgcgcggcgctgaactgcacgcaatagcacacggcccacgtcgccaacagccaaagcgtatcaagattaggcccgccgataaagaagccagccacagcgggcagcataaccattacccatgcgccaggttggttgtcgaaccaatcgcgtttaagagtcttgcggcgggaagccatatctgtcatgatatcgcagcgaatggttctcaataagaaagatgtgagacctgcattgcgacaatcgaacataggaagtgcgagaagccagtgcttccgccattatgcaacatgtgcgattgttcggaaatgttcatttggctcacattgtgtttatgtgagactaatctcgttgagtatcgccctcggcgctggaaatggcctcggctatcggatcttggctgaagtcgtggttgcgataatcagggtcgtccaccggcagatgctgcaccaaggtatcgaacacctgactgtagattttgccgcgctcgagcaccgcatcgagcacatggccgccgaacgtcttgtcgtcggacaggaagtgctcgtggaatccggccacagccgcgccgtgaaacatcacgggggagaagtacccgagcatggtgcccttgacgtcgtggcgcaggaacacggcctgccggtcggccacctctaccagcgtggggtagggtgcctgctgcttgatgaccgcgcgtgtcttgatgaagctgaacgtgccgcgcacaattaccgaaaagaacgtgttcgcgcggccgttcgccttgacgatcttttcgttgagctcttctaggccgatatcatgacgctcgcactggtactggaaggccgcgcgatggctattagcgaatggcatggtgaagtcgtccggcacgcgttcggccacaccggattggcctatcttgtatgccacgccatccaggatgatgagctcgccgtccaagccctcgccggtgccgatgccggtgtcgccatgcttgagcaattcgccgatggtggtggtgccttccagcagccccggcacgagtaaggccaaagtgccgtgctgatataacacgttggcaccgtgctcacgaataggtttgatgttctttgccagtgattgtgtcacgagccttaagagtaattcgcgttaccgtccaactcaattaatcaatccatattcgccaacgtgagctgtgccactatatataggtaagtctcagaaggatgttggtaggcgacgccgagcggctatgccgcgaggtaatacgaacggcatgagcgcgacacgcgcgaattcctccgcgctgtcccacctcaatgcttgaataaacaagttgcctgatttgggctcgcaaattggaattaaaaaagcgagcgcgggccgggagacacttcaagtgaagtgacagccggaaaccgcgcactgatgtcggatgaccgccagaggacgtatgtccaagggaggccatgcgcgccggtgccctagaagcaggttggtaaacagtacaacgaacatcgctagaaagggcggacggcaatggcgggacagaaaatccgcatcaggcttaagtcctatgaccacgaggtcatcgaccaatcggcgaagaagatcgtcgaaacggtgacgaacgcgggcgcaactgttgttggccccgttccgctgccgaccgagaagaacgtcttctgtgttatccgttctcctcacaagtacaaggattctcgcgagcacttcgagatgcgcactcacaagcgcctcatcgacatcgtggacccgacccccaaggccgtggactccctgatgcacatcgatctgcctgcggacgtcaacatcgaaatcaagctgtaagggaggaggaagcattatgtctaatcgcaaggctctgctgggcaagaagctcggcatgtcccaggtgtgggacgagaacggcttcttcgtgcccgtcactcttgtcgacgtgtccaccaacgtggtgaccgccgtgaagaccgaggaatctgacggctacaaggccgtccagctcggctacggcgccatcgaccccaccaaggtgaccaagccgctggctggtcactttgccaaggccggtgtcaccccgcgtcgccacctcgtcgaggtgcgcaccgacgacgtcgatcagttcgaggctggccaggaactggccgctgacctgttcgaagagggtgctgaggtcgacgtgaccggcaccaccaagggtaagggcttcgccggtaccatcaagcgttggggcttcaagtcctaccgccgtactcacggttctcacaagaacgagcgccgtcccggttctgtgggcgcatgcgccactccgagccgtattctcaagggcaagcgtatggccggccgcatgggtcatgtgaccgccactacccagaacctgaccgtcgtctccgctgatgtcgagaacggcatcctcgccatcaagggcgccattcctggccccaagggcggcatcgttctcgtccgctcggctgtgaagggagcctgataaaccatggcaaacgttactctgaacgtcaccgacgccaagggccaggccaccggcaccgttgaagctcctgaggctctcttcggcgtttccgccgaggatgtccaggctcacatcccgctgatccaccaggttgtcaccgctcagctcgctgctgctcgtcagggcacccacgccaccaagactcgtggcatggtttccggcggcggcaagaagccgtggaagcagaagggcaccggtcgtgctcgtcagggctccatccgtgcaccgcagtggtaccacggcggcaccgtgttcggcccgcagccgcgtgactactctcagcgcacccccaagaagatgaaggccgcagctctgcgctacgccctgtccgatcgcgccaacgccggtcgcgttgccgtggtggagttcggtatcaccgagccgtccaccaaggccgctgtcgccgccctggccccgatcaccgcggacaagttcaccacggtcgtcttcactcgcgacaacatcaacgagtggctctccgtgcgcaacatcccgaccgttcacccgattttcgtcgatcagctcaacacgtacgacgtgattacctcgcagtacgtggtcttcaccaaggaagccttcgaggctttcgtggctgccaagaccgagccgaaggaggcctgatttagatggtcgctattcacaagcccgctcacgacgtgattcttaagcccgtcgtctccgagaagagctacgccgcttccgaccgtggccagtacaccttcgtggtggctccggatgcgaacaaggtgcagatcaagcaggcaatcgaagagatcttcaaggtcaaggtgacgaacgtcaacaccctcaaccgcgctggcaagaagcagcgcactcgcaccggtttcggccagcgcgcttcccagaagcgtgcgatcgtgaccgtcgccgagggccagacgatcgacatctttggtaactgaaggctagccgagaaaagttaaaggaagaactacattatggctatccgcgtttataagccgacgaccgcaggccgccgcaacgcgtccgtctcggatttctccgagctgactcgttctacgcctgagaagtcgctggttcgcaagaagtccaagaccggcggtcgtaactcttacggccgtatcacctcccgtcatcgcggcggcggccacaagcgccagtaccgtctcatcgatttcaagcgttgggacaaggacggcgtgcccgccaaggttgccgagatcgagtacgatccgaaccgctccgcccgtatcgccctcctgcacttcgcagatggcgagaagcgctacatcatcgcgccgaagggcatcaagcagggcgacgtcatcgagaccggtgctcaggctgatatcaagccgggcaacaacctgccgctgaagaacatcccgaccggtaccgtggttcacgccatcgagctccgcccgctgggtggcgccaagatcgctcgttccgctggtgctgccgttcagctcgtcgccaaggatggcgcctacgctcagctgcgtatgccgtccggcgaaatccgcaacgtcgacgcgcgctgccgcgctaccgtcggcgaggtcggcaacgaggaccacgccaacattcagctcggcaaggctggccgcgcccgctggatcggccaccgtccgatcacccgtggtgagtccatgaacccggtcgaccacccgcacggcggtcgtacccgcggtggtaagccgccggtctccccgtggggcaagggcgaggttcgtactcgtcgtccgaagaaggcttcgaacaagatgattgttcgtcgccgtccgtccggcaagaaccgcaagtaagggagtatcgagaagatgactcgtagcatcaagaagggccccttcgtcgacgcccacttgcagaagaaagtcgacgagcagaacgagaagggcaccaagaacgtcatcaagacgtggtcccgtcgttcgatgatcacccctgatttcatcggacacaccttcgccgttcatgatggtcgcaagcatgtcccggtgttcgtcaccgaggccatggttggtcacaagctgggtgagttcgcccccacgaagaccttcaagggtcacgtgaaggacgacaagaaggcccgtcgctaaggataaggaatagaacatggaagctaaagcaatcgctcgtcacgtccgcgtgacgccgcgcaaggctcgccgcatggtcgacctcatccgcggcaagaaggcgaccgaagccgtcaccattttgaagttcgcccctcaggctgcggccctgccggtccgcaagaccctggagagcgccatcgccaacgctcgcgtgaaggccgacaaggccggcgagccgttccgcgagaacgacctgtacatcaaggagacctacgttgacgaaggtgtgaccctcaagcgcttccgcgctcgtgcccagggccgcgccgctcgtatcaacaagcgcacctcccacatcacggtcgtcgtggctaacaaggaaggagcccgctaaagatgggtcagaagatcaatccgtttggctaccgtctgggcatcactgagaaccaccgctccaagtggttctccgactccaacaaggccggcgaacgctaccgcgacttcgtgcttgaggatgatcagatccgcaaggagatgagcaaggacctcgagcgcgctggcgtgtcccgcatcgtcatcgagcgcacccgcgaccgcgtccgcgtcgacattcacaccgcccgtccgggcatcgtgatcggtcgtcgtggcgccgaggccgagcgcgtccgcgccaagctcgagaagctgaccggcaagcaggtccagctcaacatcttcgaggtcaagaacgccgcgctggacgcccagctcgtcgctcagggcatcgctgagcagctgaccaaccgcgtcaccttccgtcgtgccatgcgcaaggcccagcaggacgccatgcgcgccggtgccaagggtatccgcatcaagctctccggccgcctcggcggtgcggaaatgagccgttccgagttctaccgtgagggccgcgttccgctgcagaccctccgcgccctcatcgattacggcttcttcgaggccaagaccacgtacggccgtatcggcgtcaaggtctggatctacaagggcgacatgaccgaatccgagttcgaagagcagcaggctcagcagaacaaccgtccgggccgtcgtggtggcgatcgccgcccgcgccgtggcaaccgttccgccgccccgcaggccgtcgaagcccccaaggctgaggctcccgccgaggccgctccggctgcagaaacgaaggagtgagcaagaatgcttatccccaagaggactaagtaccgcaagcagcaccgccctgtgcgttctggcatgtccaagggcggcaacgagatcaacttcggtgatttcggcatccagtccctcgccccggcctacgtgaccaaccgtcagatcgaagccgcgcgtatcgccatgacccgctacatcaagcgtggtggccgcgtgtggatcacgatcttcccggatcgtccgctgaccaagcacccgctcggtgcccgaatgggttccggtaagggtgccccggagttctggattgcgaacgtgcgccctggtcgcgtgatgttcgaaatcggtggtgtgtccgaggacgtcgctaaggaagccctccgccgcgctatcgacaagctcccgatgaagtgccgcattatcgcacgtgaaggtggtgatatctgatggcagtcggtaccgctgattactccatcaagaatctcaacgagaagaccaacgcggaaatcgaaggcttcctgaagaagtccaaggaagagctgttcaacctgcgcttccagcacgccaccggtcagctcgagaacaccgcccgtctcaaggctgtcaagagcgacatcgcccgcatgtacaccgtgcttcgcgagcgtgagcttggcatcagccaggagccggccgctaccgaatccaaggagaagtgattatggctgaagagcgtaacttccgtaaggttcgccgcggctatgtcgtgtccgacaagatggacaagacgattaccgtcgagctcgagcagcgttcgacccacccgctgtacggcaaggtcgttcgttccaccagcaaggtcaaggcccatgatgaacacaacgacgcccacattggcgacctcgtgagtattatggaaactcggcctctgagcaagaccaagcgctggcgtctcgaatccatcatcgagcgcgccaagtaagtaaagttcggcaaggctcgccatttaccggggcattatgggcaaccacgatgccccggtaaatggggagaaccagctcggctaaggagaatcaatgattcagcaggaaacgcggcttcatgtcgccgacaacacgggtgcgaaggaactcctcgccatccgcgtgctcggcggatcgaagcgacgctatgccggcatcggcgacgtgatcgtcgcctccgtcaaggacgccattcctggcgggtcggtcaagaagggcgacgtggttaaggccgttgtcgtccgtaccgtcaaggaatcccgccgtgcggatggttcctacatcaagttcgacgagaacgccgccgtcattctcggctccggccgtgaaccgaagggcactcgtatcttcggaccggtcggtcgtgaactgcgcgagcacaagttcatgaagatcgtgtccctcgccccggaggtgatctgacatggcagccaagatcaagagcggcgacctggtcaaggtcatccgcggcaaggaccgcggcaaggaaggcaccgtcaagcaggtgctctccaacgatcgactgatcgtcgaaggcgtgcagatcgtcaagaagcacgtgcgtgcaacgcagcagggccagcaggctggcatcgtctccactgaggctccgatccatcgctccaacgtgatggtcatcgacccggagaccaagcagccgacccgcgttggcatcaccgttaaggaagaggcgcgtgacggcaaggtgaagaccgtgcgcgtgcgcgtcgccaagaagtccggaaaggagctggcatgaccgatactactgtcgaagcgccggccaccccgcgcttgaaggtcaagtacaacgagcagatcattcctgagctcgagaaggagttcaagtactccaacccgatgcaggttgcccgtgtccagaaggtcgtcgtctccatgggtgttggtgccgctgcccgcgactccaagctcatcgaaggtgccgtcaaggacctcaccctgatcaccggccagaagccgaagatcaccaaggccaagaagtccgtcgcgcagttccacctgcgtgaaggccaggccatcggtgcgtacgtcaccctgcgtggcgaccgcatgtgggagttcctggaccgtctgctgaccctcgcgctgccccgtatccgcgacttccgcggcatcaacggccaccagttcgatggccagggcaattacaactttggtctcaccgagcagtccatgttccacgagatcgatcctgattcgatcgatcacgtgcgcggtatggacatcactgtggtgacctccaccaaggacgacaaggaagcttacgcgctgctgaagcacctcggcttccccttcaaggagaactgatatggcaaaaaccgctcttaagaacaaggcggccggcaagccgaagttcaaggtccgcgcttacacgcgctgccaggtctgcggtcgtccccactccgtctaccgcaagttcggcctgtgccgcatctgccttcgtgagaaggctcaccgcggtgaactgcccggcgttacgaagtccagttggtaaacatcgacgctgaaggtccgcggcccgaacgcttctagaagaagcgtgagggcggcggaaaccatagcgagaaagggcaacaagcccaaatgacaatgacagatccgatcgcagacatgcttacgcgtctgcgtaatgcgagcgcggccaagcacgaaaccgtggatatgccgtactccaagttcaaggcgaacatcgccgagatcctgaagcgcgaaggctacatcaaggacttcaccgctaaggaagccaaggtcggccagactcttgaggtcaccctcaagtacggtccgaacggtgagcgttccattcagggcatcaagcgcatctccaagccgggccttcgtcgttacgcgaagtccgactccctgccgatgccgctcggtggcctgggtatcgccatcatctcgacttcttcgggactgctgactcagaaggaatgcctcgaccgaggcattggcggcgaaattgtcgccttcgtgtggtgagaaaggagagctgaaacatggcatcgcatattggtaagctccccatcgccatccctgctggcgttgaagtcaagattgaaggccagaacttctccgccaagggcgctaagggttctgactcctacgtggttccggaaggcatcaccgctgccgttgaaggcaacgagatcgtcctgaccgccgctgatgacctgcgtccgacccgtgccaagcacggtctggcccgctccatcatggccggcatggtcaagggtgttcacgatggctactccaagactcttgagatcgtcggcaccggttaccgcgccgtcgccaagggcaagggcatcgagttcttcctcggctactcccacaccatcaccgtcaacccgcccgaaggcatcaccctgaaggtgaccgacgccaaccacgtggttgtcgaaggcaccgacaagcaggtcgtgggccaggttgccgccaacatccgcaagctgcgcgctccggaaccctacaagggcaagggcatcaagtatgccgatgaacgcatcctgcgcaaggctggaaaggctggtaagtgatatgagcgttgctattctcggaaaaggcaagaaggtagctctcaagcgccgtcacgcgcgtatccgcaagcgcatctccggtacccccgagcgtccgcgcctggtggtcacccgctccaaccgtcacatggttgctcaggtggtcgacgataccaagggtattaccttggtgtccgcctccacccttcaggccgacttcgccggtttcgaaggcaccaagactgaggccgccaagaaggtcggcgagctgatcgccgagaaggccaaggctgccggcatcaccgcagtcgtgttcgaccgcggtggcaacaagtacaccggtcgcgtcgcagccgttgctgatggcgcccgcgagggaggtcttgcactgtgagcgacaacgaaacgaaggaaacccaagtggctgaagaaactcagaacactgtggcgaccgaatccaacaacgaggaccgcaagggtcgtcgtggccagcgcggtgaaggccgtcgcggcgagcgtcgtaaccgtcgtgaagaaaaccacggcgacgagctgctcgatcgcgtggtgaccatcaaccgtgtgtccaagacccacaagggtggccgtaccttcagcttcgctgcactggttgtggtcggcgacggcaacggcaccgtgggtgtcggctacggcaagtcccgtgaagtcccggccgccatcgccaagggccagctggacgccaagaagcacatgttctctgtgcctcgcgtccgcggcaccatcacccacccggttcagggtcacgacgctgctggcaccgtcctgctgcgtccggccgccccgggtaccggtgtaatcgccggtggctccgtgcgcgccgtcatggaatgcgcaggcatcaccgacgtcctgaccaagtcgatgggctccgccaccgccgttaatgtggtgcgcgctaccgtcgacgccctcaagcagctcgaagagcccgaggagatcgccgcccgtcgtggcctggcgctcgacgaggttgctcccgatgctctgctgcgcgcccgtgccgccggcattgccgaggctcgcaaggctcgcgaagaggctgctgccgctaaggccgccgaagagaaggatggtgagtgatactcatggctaagaacctgaagattaccctgcaccacggcatcgtgaaccgtaccccggctcagcgcgccaccgtcaagaccctcggcctcaacaagatcggtaagaccgttgtccgcgaggacaccccggccaaccgtggtctggtgaacgccgtgcgtcacctggtcaccgttgaggaggttgactgattatggcagataacgaaatcctgcagatgcacgacctgaagcccgccccgggtgccaagaaggaccgcacccgtgtgggccgcggtgaaggctccaagggtaagacctccggtcgtggcgccaagggccagacgaagcgtaaccacgtgcgtccgggctttgaaggcggccagctgccgctgtacatgcgcctgccgaagcttcgtggcttcaagaacccgttcaaggtcgagttccaggtcatcaacatcgctcgtctcgtggagctcttccccgagggtggcgaggttgctgtgaccgacctgatcgccaagggcgctgttcgtgacaacgctccggtgaaggttctgggcgacggcgagaccaccgtggctttcaccctcaagggtgttaaggcttcggcttccgccaagtccaagatcgaggccgccggcggttccgtttccgaggactgattagtcctacggggagcgcaataggctgtacaacccccgcccgccaataggtggacgggggttcccttttctcaaaaattgttgttctgagcgcagagaagcagtctcaacacaatgatcgttttgagtatgcttcccccgttcagtacgacggagcataattcagataacattcgcgagacatgaagtggccgaagtaggcactgtagactatgctcattcgttagtttgtgtatttcgcgtgattggcgcgctattgggaggaaatctaggtgaggacactaatccaggccctgaagaccaaagagttgaggaagaagattctcttcgtcctgttcatcatcatcgtctaccgcatcggttcgttcattccgacccctggcgtggactacaacgtggtgaacaagtgcatggccactgtcggcagcgcctcccaggagaacttcatcggactggtgaacctcttctccggtggcgctatgctccagctgtctatcttcgcgctgggcgtcatgccgtacatcaccgcatccatcgtggtgcagctgctgcgcgtggtcatcccgcgcttcgaggccctgcataaggagggccagtccggagaggccaagctcacccagtacacgcgttacctgaccatcggcctggccgtgctgcagtccaccaccatcctggtcaccgcccgctccggtgccctgttcaactaccgctgcgaccaggtcatcccggacggctccgtgtggaacctcgtggtcatggtcctcatcatgaccggcggcaccggcctgatcatgtggatggccgagctcgtgaccgacaagggcatcggccagggcatgtccatcttgatcttcatgtccatctgctccggcttcctgccgcagctgtgggagatcggctacggcaccaacggcaagaacggcgactggaccaagttcggcatcgtcgtgggcgtgctcgtggtcatcctcatcttcgtcgacttcgtcgaactgtgccagcgccgcgtcccggtgcagtacacgcgccgcatgatcggccgtaagatgtacggcggctcctccacctacctgccgctgaagatcaacatgtccggcgtcatcccgccgatcttcgcctcctcgatcctcgccatcccgaccctgatcgcccagttcggcaagtccgaccagtcctgggtcaagtggatcaacgccaacctggcgaacaccacatccgtgtggtacatcgccctgtacgcgctgatgatcgtgttcttctgcttcttctacacctcgatcacgttcaacccggacgagaccgcggacaacatgaagcagtacggcggcttcatccccggcatccgcgccggcaacgccaccagccgctacctgacctacgtgatgaaccgactcaacaccgtcggtgccgtctacctgctgttcgtggccctgattccgaccgtgctgatcatggccctcggactcaacgccaagctgccgttcggtggcaccacgatcctgatcatcgcgggcgtgggcctcgacaccctgcgtcaggccaaggcccagaccgaacagttccagtacaccggcttcctgttcgaaaacgtggaccacaaagaaggctgacgcccgcttggcagcggtcgcccgcaatgggcaggcggccgcgcgaggagttccacgacggagcaatctttcttccacatataactcaatggctcccctaaccaagggagccaaaaccgtattaataaccgacacaaaaggagaccactatgcgtctgctcatcatgggcccccagggcgtgggcaagggcacccaggctgctctgctcgccgagcacttcaacatccccaccatctccaccggcgacatcttccgctacaacatcaagaacaagaccgaactcggtcttgaggcgatgagctacaccgacaagggcgagctggttcctgactccctgaccaacaagatcgtcaaggatcgtctggccaaggaagactgcaagaacggctggatcctcgacggctacccgcgtaacgccgcccaggtcaccgctctcgacgagatgctcgccgacctcgacactccgctcgaccacgtggtggccctcgaagccgcccgtgacgtgctgctggagcgtatgaagaagcgcgccgccgagcagggccgcgctgacgacactccggaggccatcgccaagcgcctggagacctacgagaaggaaaccgctccgctgctcgacatctacgaatctcgcggtctgctcgtcgtggtcaacggcgtcggcgacatcgacgagatcagcggccgtatcatcagccacctcgagtagtaggttcggcagcccagccaacaagccggagtgatgccgaaataccacatcaacgtttccatacccctgtgcgacacgccgagtgttcgtacaggggtatgtgcgtatatagttgacagttggtgtgtcttcggatatgccatagtaatcatccaacggaataggactagaggcacatggcaaaagacggtgtgattgaagtcgaaggacaggtagtggaagcactgcctaacgcgatgttccgcgttgaactcgagaacaagcacatcgtgctcgccacgatttccggcaaaatgcgtaagaactacattcgtattctgccgcaggatcgtgtcgtgctcgaaatgagcccttacgacctgaaccgcggacgcattacgtaccgttacaagtaaaggtacacaagaaaaggataaccatgaaggtcagccctagcgtgaagaggatctgcgaaaactgccgcgtgatccgccgtcacggccgcgtcatggtgatctgcgtcaacccgcgccacaagcagcgtcagggctgagagcagattctccagcggcactaagtaaataaggcactctctcacagtgcttcccgcaagggaacgacactgaaccacgggtacgtaggcccgtgccgggtaaccgggcgagcgggtgcaagacctacggcaacaagaaggaatcgcaatggcacgtcttgccggagtcgacatccccaatgagaagcgcatcgagatcgccctcacctacattttcggtgtgggtcgcactcgtgccaaggaaacgcttgccgcgaccggtatcagcccggacatccgcgtcaaggatctcaccgacgagcagctgattacgctgcgtgactacctcgaagccaactacaagatcgagggtgacctgcgtcgtgaagtcgatgcagatattcgtcgcaagattcagatcaactgctaccaaggccagcgtcaccgtaagggacttcctgtgcgcggtcagcgcaccaagaccaatgctcgtacccgcaagggcccgaagcgcacggtcgccggaaagaagaaggccaccaagtagtcggtggcatgattcgggccacgggatgatttcatcccatcgcccgaacgtcaacaacaaagttcgttactaggaaacgagggtcaatggcagcgcctaagcaagccgctcgtaagccccgtcgtcgcgaccgcaagtcggtcccggtcggccaggctcacatcaagtccactttcaacaacacgatcatttcgatcaccgatccgtccggtgccgtggtgtcctgggcgtccggtggtgatgtcggcttcaagggctcccgtaagtccacgccgtacgccgctggtatggctgccgagtccgccgcccgcaaggcgatggaacacggcgtcaagaaggtcgacgtgttcgtcaagggcccgggttccggtcgtgagaccgccatccgttccctgcagtctgcgggtctcgaggttggttccatcaccgacgtcaccccgcaagcccacaacggcgttcgtcctccgaagcgtcgtcgcgtctgagcactcagcaataccaaatccatccaaaaccgcctgaccggtgagtgcaccaccgagttcaagctgaaaggataaccacagtgcttattgcacagcgtccgactcttaccgaggaatctctgaatccgcagcgctcccgcttcaccatcgagccgctcgagcctggcttcggctacacgctcggcaactcgctgcgtcgcacgctgctgagctccatcccgggtgctgccgtgacctccgtgcgtatttccggtgccctgcatgagttcaccactctgccgggcgtccaggaagacgtcaccgagatcctgctgaacatcaagggcatcgtgctcaccagcgaatatgacgagcctgtggtcatgtatctgcgcaagagcggcaagggcgaagccgtggctggggacatcaccccgcctgccggcgtcactattgccaacccggagcagcacatcgctaccctcgccgacgatggcgaactcgagatcgagttcactgtcgagcgtggccgtggctatgttcctgcccagatgaacaagcaggacaacgatgagatcggccgtattccggttgattccatctactccccggtactcaaggtgagctacaaggtcgaggccacccgtgtggaacagcgcacggacttcgacaagctcattctggacgtggagaccaagcccgccatctccccgcgtgacgcggtggcttctgccggttccaccttggtggagctcttcggcctgtgccgtgagctcaacgcccaggctgaaggcgtcgaggtcggtccggccccggtggccgaggagaccaaccccgagatggccgttccgatcgaggacctcaacctgacgcagcgttcttacaactgcctcaagcgcgagggcatccacaccatcggtgagcttgtctcccacaccgagcaggacctgctcgacatccgcaatttcggtatgaagtcaatcgatgaggtcaaggagaagctgcagaccctgggcctgagcctcaagtcctcgccgatggccttcgataccaataatctcgaaggtggtacgttcttctcgccggaagacgagtgatctgcctctttgaccaatcgttcgttcactaggcaagcggatgttcgggcatatgcccacctgcttgcctgaagaacggacatataaggagtaaacccaatgcctacacctaagaagggcccgcgtctggcttccagccccgcacacgagcgcctcatgctggcaaacatggcgaccagcctgttccagaacggccgcatcaccaccacgctgccgaaggccaagcgccttcgtccgctggccgagcgcctgatcaccttcgccaagcgcggtgatctgcactcccgtcgtcgcgtgatgcgcgtcatccgcaacaagtccgtggtgcacattctgttcacccagattgccgagcagatggagcagcgtgaaggtggctacacccgtatcgtcaagatcgccccgcgcgttggcgatgccgctccggccgctgtgatcgagctcgtcaccgagccggttgccaagaaggctgttgtgaaggaagccgaagccgccgccaaggttgccgaagaagaggctccggccgttgaggctccggtcgaggagaccgccgccgctgaggctccggtcgaggagaccgccgccgctgaggctgaggctcccgctgaggaagccgctgacgccgagaaggccgagtgagctgaatagcgtttcgccaagctagctgaaagggctggaatccgtttgggttccagcccttttgcgttgtttcatagaaactacaacgtacgtacggctcgaatggcctcggctcttgcggccagctgatcatcgacggggtatgcgatatgctccaaagtcaggccctgcggcgcaatcggcccgcttgagccttcacgcactggctcggccattttgccggcaaaccattccagagatttgcgtcccgaaccaactttgatgcatgagccgaccaaggagcgcaccatattgcgggcaaaggcgtccgccacaatcgtgaacaccgccagtccggactccagcgacggagtccgatatgcttcatgcgatgccatcgcatccggcaccaggggagtgatcggcacccgccgccaataggcggtcttgacttcgcggatcgtagtgcctcccggattcggagtggcgaaggaaccaaaatcgtgcaggccgatggtcaatgaggctgcgtggttcataagctccagatccagcgattcatccacggtaagcacgcatccacgcaggcgcgggtcgatctcggacgaacgatcggcgacccgatacacataagtgcgctccaatgcggagaacctggcatcgaaaccggccggtgccacggcaatgccatgaatgacgatgtccgaaggcagcacagccttgagtctgcgagtcagcgcctcggtgaccggaatggtcatgtgacctacgcagcgattcagtacctcatcggatacatccaaatgcgccacttggtgggaggcgtgcacaccggtgtcggtgcgcccagccaccgtcagacgcaacggttcggccgcatcatcggccggcacccgcagcaccttgtgcagcgcatcttcaatggtgccttgcaccgtacgcagattgggctgtttggcccagccatagaatccgccgccgtcgtaggccaagtcaatgcgcagtcgtgtcatagccattcattgtaacgagtgcggtcggcgagatgcgcgcggtcggcgagacgagtgcggtcggcgaagtgacctgcctgtaacattctcgcgcgtttgctgaaacggggccgccttaggttgtaaccatcaaacccggttacggcttgcggcgtcagcgtgcgctcgaaacgcctaaccgcttgaggccacagaagccgccacagcaaggagcaggcacgatgatcgaatccgcagcacgcagactggcccatgaactggtaaaccgtcgcgaggcgatcaaccgcgagctgtcccgcaacggcgtacgcttcggcatctacaagaacggcgaataccatgaccggctcttcccgtacgatcccgtgccgcgcattatcgaatccgacgaatacgacgaattggagaagggcctgaagcagcgcgtcaacgccctgaacgcctatctgaaggacatctactccgacaaggccatcatccatgacggcgtcgtgccggaggaatacgtatacacctcggccggctacttcccgcaggtcaacggcgtgacccctcccggcggcatcttcgcgcacatcgccggcgaagacctggtccagggtgaagatggccgctggtgggtgctggaagacaacctgcgcatcccctcgggcgccagctacccgctgttcgtgcgcgacatcgagcgccgcatctccccgcgcctgttccgcgacgtgcacatccgcgacaatcgcgaatacccgcgcctactgcgcaaggccatggactttgtgtccactgagggcatcgccgtggtactgacccccggccgctacaattccgcgttcttcgagcacgcctatctggcggagaaaaccggcgccgcactggccttccccgaagacctcgaagtggtggacaacaaggtctacttcctcgactacgccggcaaacgccaccgtgtgggcgtggtctaccgccgtctgtccgacgaattcctcgatccgtttgccttcaatcctgattcggtgatcggtgtgcccggtatcctgtccgcctaccgcgcgggcaacgtggccatcgtcaacgcgccgggcaacggcgcggccgatgacaaggccatctactacttcgtgccgcagatgatcaagtactatctcggcgaggaaccgattctcaacaacgcgcccacgtatatgccgatgttcgaggccgaccgtaaggaagtcctgaatcgtatgggcgagctggtcatcaaggatgtggccgaagccggtggttacggcgtggtgttcggttcgtcgctggatgctgccgcacgtgaggagcttgccaaccggatcaaggaggagcctcgtcgattcatcgcccaagaggtgattcagttccgcgatatcgatgtggtggacccgaagaccggtgagatgtcgccgcgcaaatgcgatttgcgtgcctttgtggtcaccggcaaaaacacgcacgtgtggtattcgggcttgactcgatactcgtcggtgcccggccagatgatcgtcaactcgtcgcagggtggcggattcaaggatacgtgggtgttggcacccgaatccggcgtggagcatgaatacggtgctgaagtgcaggtggcgaacctgctgagccagtcccgccgccactcgttgtctctggtcaccgcctccaaggcagacaacctgtattggctgggtcggtacaccgagcgcgccttcaccacgctgaaccagttcttcccgttctacgatcgtgtgatggacaccgatgtggacgccttccgtccgttcgctcacgcactcgacctgcccgaagatttcgaggacttcgacgggttcgtgaacagcttcctgtacgacgggtccaaccctgattcggtgcggtcggccgtaacctccgcattcaacaacgccgtgattctgcgcccggaattgagctcgcgtctgttgcagtacgtggagttggcgatgaccaatatcaccgatgccgccaaatacgcggccgacgccgaggacatctacaagcagcgcgatattaccgatgacatgctcgccttctggggcggcatcgagaattcgccggtcgaccccacgctgaaggcgttcatcttcatcggcaagtatcttgagcgcatcgacctgtacacgcgcttcggcctgacgatggaggagatggaagccccgcttaggaagctcgcctcctactcgatgatcctcgacggcatgccgttgcctagttgcttcgccgatgggctgagctggctggtcggtcagctgccgtctcgcgggtatcaggaagtcgccgacctgctgaagaagtaccttgacgattattccggccgtgtcagcgccctggccatcaaagacatgggctcactgagctccatgaacatggatgccaagcgcccctaacccgacgttcgccctgacgggttcaaatgctatggtggtatggcgaaaaaccgtgcgcccgagtgccggccgatgcgtatcggcgaattgccggaatatatgcgtggactgtgagcgcgcggaccatacctcagccatggctgtagtgtcgttatcccgagaatgtgccggttgccggctcgtgtgtaagtgcaggagacgttgtgaaaaaactcgtgttcgactatgagatgaagctgtccttcagcgcaccggtcaccgatcacaggttccagcttcgctgtattcccgccactggccctcgccaacaggtgattgacgtggaagtgaagattcagcccgaaaccgaactcgaaaccaccatcgactcctttggctccgtggtgatgaccggattcatccccgagccgcacgacatattcagctattcggtgaccggcatcgccttcgtggacaatgcgcatatccataaggaagcctataaaccgctgtaccgattcaattcagcgctcaccattcccggcccgaacgtggaggcgatgatcgacgtatgccgcgaacgcttggctgcgttgcctgccgacgccactccggtgcagcaggccgccgaagtgatggatgaggtctacaaggcgtttgtgtatacgcccggttccaccacgattcgcaccaccgccgaacaggccttggcccagcgcaagggcgtatgccaggattatgcccatgtaatgctgtccgtgtgccggcatgtgggattgaccgcgcgctacattgccggtttgcttgggggagagggcgcgacccacgcttgggtcgaggtgtatcaggatggccgatgggtcggactggatcccacgcataaccgattggtggacgacagctacatcaccatcgcccacggccgcgattaccgcgactgcatgctcgacatcggcatcttctccggctacaacgtccagcagacccaatgggtcaatgcctccgtccacgaacaggtggcgtaaacaaaatttcaagccccctctgatgagctgagccgtgaagaaaacgccggaggcgtttttaggcgaaggcgaatgacagtgagcaaataaaatggcagctggaaagctgtccttaaattgcgttcgagctgtcgagcgtagcgagactgagagagaccgctcaatgcagagtggtcccgtcaccgcttctaccaccaccaatattcggattttcgtcgttgcaacattcggattttggtagttgagaaattcggattattgcgatggcggacgtgaaacaacgggaggtgcgcggaatggccgattctctggcgagcgacatcaagccgaaagcctatcgccctcgtatcgtggatgagtggcaactcgctccagctatatgggatgaagtccgtcatcgcgtcgacgatgattccgcgaataaaggtcagtggattctgaccggttcatccactcctctcaatgagaatcggccgaaccatagtggtgcgggacgaatcggacgtatccgtatgaatcctctgactttatatgagtccggactctcgacaggtgcggtaagtctcagtggactgtttgaacataagttcgccgctgcaaaatcagagataagtacacaaatgttgttggatgccgtatgccgaggtggatggccggaggcggtggctctgcctgtatctgacgcacagattctgattcgggaatacaagcgactcacgctgactgagagtgtgcccaggcaaggcaaggatcctgatgtggctcgtcgtctgctggattcgcttgcgcgcaatatcagtcaagctgtgacattcaaaaccttacgtaaggatatgtacggtactgaagaaaaccttgacgatttcatttcggagagaacggtatccgggtatacggccatgttcgagaacatgttcgtcatcgatccgataaagggctgggtcccgccggcacgggatccaaagcgactccagaccaaggcgcgtcggtattttgccgatccttccattgcggccgcaatgttgggcatgagtcctgccgctcttatcggcgattggcagacttttgggtttctgtttgagaatctatgcatccgtgatctgttggtgtatgcgagatctctcctcgatattgggatagaaccggttcggtattatcgtgacgattccggtctggagtgtgatgccattattgaattgtccgatggacggtggggcggcatcgaaattaagtccagtgaggataaagtccctgaggcatcggcaaatctatgcagactgaaagataagctgctgagaaatccgagtgcgcgaacccgtgaaccggagttcttggcggtgttggtgggggtcggcgagttcgcgtatcaacgcgatgatggagtgtatgtaattcctgtcggagtgcttggcgcgtaaacgcaatgccagcgcttcgggcgaattccgggattgtgatctgacatgtctcaagcggcatacactcgagacttgctcagcgaaactccgatttgccaggtcggcagaatgtggcataatgaacaagttgccattttggcagcatggataagtgtccgagcggtctaaggagcacgcctcgaaagcgtgtgaggtgaaagcctccgcgagttcgaatctcgccttatccgcctttagggttccggggtttgtcccggaaccctttttgtttttgatgcgaacgtccgtattcggggttataggccaaaatgtatgtccggcggtctagtcgttcgactgccattcgaccctggtgtggaactcgttccagtcgatgccggtgccgtgtctcatgggaatgccgaacgtctcgtgcatgctctgcgggcttctctcccatgcccgccggtagaggcgctcgagtcgttcgtcggtcatcgcgttggccgcgagccacgcgtcgctttcgggccgttccgtgtgctggtggcaccaccagcagatcgccttcagccgtctgaccagccgcagtccgcggtggcggcgcggcatgtcgcgcaggcgcgcgttccatgattcgacgaggttgttcgtggacggcactgggccggctgccgcgagcccctcgtcgaggaacatgaacggttggccctcccggatgcgcctgcggatcatgcgccgcgccttgacgagcctttggtgcatgtcgttcacgccatgaccgacgtgcaacgaatgtccggcacgttcgacccgcctacggacgacggcgaatacgccgtcatcgcaggcggggcaccggtgagcgagatgcgcgactacgcgatggacgtgaacgcgtatacgcacggccgtgggcgcttctccgcctcgttcggcggctaccggccctgccacgacgaacggcgcgtgatcgaggaggccgcgtacgatccggaagccaatctggagaacacgtccgattctgtgttctgcgcctacggcgccggctacccggtcaagtggtacaaagtgcccgaattcgcgcacgtggagtacgtgacggcgtgaggggccatctgactgtcgcggatatgcgtccggcatatcgggaccgtgccggtggatgtcgattgtaatcgacacctcatcccgatgggatacgaagtgtccgggtatgcctgatacctcgtgcctcatcggaatgagacagaatgaggcaagtgacggattcgggatatccgtccgagttcattgtgaaccattggaataaactcgttttgagtccgtctgcatgtcctgtgttgacaacgtcttgggtcgtgtgtattctgaatacatcagaacataaacgtttaggacttcaatgatgaaacgacacgacgttactatcaccgatatcgcaaagcggatgggactgtccgtttatacggtttctcgcgctcttaacggtctcagcggtgtatccgagagcacccgtgcatcggtgcgcgaaacagccaacgaggtgggctacatccccaacgtcaatgcgcgtgacctgcgcacgggcacgcaccggttcatcaccctgctcaccgcgggaatgtcgaactcctattatctcgatctgatcgacggcatcgagagcgtcctgcaggacaagaaggagagcctgttcattgccgatatggccgtcaacggccggtacagcaaggagaacgaggcgtatctgttgcgtcaggtcgtggagaaccgtcctggcggcatcatctccaccttgggactcagcgaatacagcaggaaccagctgaagaactggaacattcccgtcgtattcgtcgattccactcccggatacggtgatgatgaggaaataaaagatggtttctcgtatgtagccaccgacaacgtggatgccgccgccaagcttgggcgtcatctgaaactccatcatttccatcgttggctgcttgccatctatccggacacctggaacagcaggttcgctcgcgagagcggcctgagggccgccgccgaggagtgtggggcggagattcgcgtgctggaatgcggtaacaacgatgtggaagcgtgcaccgaagtcatccgttttcttgaccagaacgattattatccggatgtgatcatcgccggcaacaatcccatcctgttgggcgtcatgtcggctcttaatcggaaatccgtcgacattcccggggatatggcgctggtcgcgttcgatgacttcgcctggtcggacctggtatcgccgaagataacacttgtcgccgaagacagccgattcatcggtgccaaggcggcgaactacctgcttggacagatggaaggaaaggaggaggtgaataaaaacccggatggggcgacgatgaggccgaatcccatccacgacatgatcgagacatccctgaagatcagggagtcatgcggatgcggtgggcaataggccgcatccgaacgcaagacagctatttccaatggagaaaacaaccatgaacatcaagaagatcgcttccgccgcttccaccctgctcgcagcgtcgctgctgctgtccggctgcagcgcggtgagtaatggcgacaacgatgccgccgaggtctccaagcccacggaaatcaagagcatcggcctgatggtgcaggatatgtccaacccgttcttcaccgccatggacaaagaagccaaggctcaagccaagaagatcggtgcaacgctcaatgtccaggacgcccagctcgatttggccacccaggacaaccagatctcctcgttcattcagcagaaggtcgatctgatcatcgtctccgccgtcgatgagagtggtttgaagcccgcaatcgagcgtgccaaggccgccggcatcatcgtggtcgccgtggacactcctgcgaagggcgctgatgcggtcgtaacgaccgatggcgtgcaggcgggtgaactgtcgtgctcttacctggccgagcagctcggcggcaagggcaacatccttatcgtggacggaaccccgatccagaccatcaccgaccgtatcaagggttgcaaggcggccctggagaaggactatcctgacatcaaggtcgtcggacagcaatcctccaagaacgatcgtgccaccggcctgtccgtgaccaccgacatgctcaccgccaataaggacgtgcagggcatcttcggtatgaacgatccgtccgctctgggcgccgcgctcgccgtcgagcaggccggcaggaccgatgaaatcatcgtgaccggcatcgacggaagtcccgaaggcgtcgacgagctgaagcgcgccggctccccgttcgtggggacctccacgcagaaccccggcgagatggtcaagcaggccgtcgcctacgcccagaaggtcgccaagggcgatacccccaagaagtccacgattctcattccgagtgtcatggtcactcgtgagaacgtcaacgattacaagggatggtgagcatgcctcagttgctgcccctattgcagctcgagaacattgtcaagagcttttccggagtggtcgtactcgacaacattaacctaaacctttatgaacatgaggtgcttgccctcatgggtgagaacggtgccggaaaatcgacgatgatgaacatcctttcgggcaatctgaaaagggactccggacgcattctcattgatggcaaagaggtagacgtctccacgccgaagcaggccgacgacctcggcatcgccatcatccatcaggaactcaatgtggtgcccaccatgacggtggcgcagaacctcgcactcggcaacgaaccgttgcagaagtcggggctgctggacaagaagcgcatgcgggaggacgccgtacgtaaactcgatgtcatcaaggcggacatcgacccggacacattcctcggtgatctgggcaccggtgagcagcagatggtcgaaatcgccaaggccatcgcgcaggacgcgaggatcctcatcctcgacgaacccacggcatcgctgtcccgagccgaatcggagcacctcttcacgctggtgaacatgctgcgggagaagggcacgggcctgatttacatctcccaccgcatggaggaggtgtggcggctcgccgacagaatcaccgtgctcagggacgggcatacggtgatgaccaccgacatcgagcatgccgaccagaatgacatcgtcgccaagatggtgggacgcaaagtcgagaaactttacgaccatggcaagcgtcatccgggggagggcgtgctcgagatcaagaatctcaggctttcgccggactctccgccggtatccttcaccgtgcatgcgggcgaggtgctgggcatgtccgggctggtgggcgccggcagaaccgaaatcgccagagcgatcatcggagcagacaagcatgattccggtgagatccggctccgtggcaaggcggtgtcgttcaaatccccgaaggccgccatcggtcatggggtcgcgtatcttcccgaaagcaggaaaacgcagagcatcttccctgtcagaagcgtcgaagacaacatctccgtctcttcgctgggcgaatacgagaggctgggtctgcttcagaagcaccgcatccgcaaggatgtgcaggaatcgatgaaactggtcaacatcgcgcaacgtctgttgaccacttccatcatcaacctgtccggcggcaaccaacagaaggccgtgttcgcccgatggatgatgaagaactccgacgtgctgattcttgacgagccgacccgtggcgtcgacgttggcgcgaagcaggagatctacgagctgatcagttcccaggcagcgcaaggcaaggcgattctcgtaatctcctccgatctgcccgaggtgctgggcatcagcgacagaatcctcgttgtcaggcaggggggcatcgctgcctgtatccccgaggatgaagctaccgaggagaaagtcatggggtacgcaacgggcgtgctgaaggcgcaatccgaggattccgaaacgcgcgacggagcgcaacgataaagaggagcttccaatgaaagaaaagaaaaagatgaacctggcggcgacctgggagaaggtcggcatgccgttcgtattgctggtgctggtcgtattcatgctgatcaaggccccgaacttcggcacggtgagcaacctgttcaacgtggcgaggtccatctccatcagcgcgattcttgccgcgggcatgacattcgtcatcattaccaccggcatcgatctgtccgttggttcgaccatcgccgtcagcggttgcatcgccgttctggccgcccagcaggggctcaaccccctgctcgccatccttctcggcatggtgatcggtgcgctcatcggcttgatcaacggattcctgatcgcctactgcaatctcgccgcgttcatcgtcaccctcggcaccatgaccttcatgcgaggattggcatacaccatcaccggcggtctgccgatcgtagacaacggtttgaacttccgcgccctcggcaacggatacctgttccatgtgccgattccgttcatcgtgatgataatcgtttatgtagtcatgtggatcgttctcgacaaaaccaagtatggctcgcatgtctacgccgtgggcggcaatgccgaagccgcaaggcttgccggcatcaatgtcaagggcgtactgctatccgtctatgtgattgcaggactgtgcgccggtctcgccggctgcatcttcgcggcgcgtgtggtctccgcgcagccgactgccggcgacggttatgagatggatgccatcgcagcggccgtcctgggcggtacctccctgatgggcggcaagggcaagatcccgggcactctgatcggtgccatcatcttcggcgtgctcaccaccggcctcgtgctcatgaatgtcccgttcttcacccagcagcttgtcaagggcatcgtcatcatcatcgccgtgctcatcgatggtctcaaggagaactcgttctcgttcgggttcctcaaaggcataggtgccacacaagccaaggctgcgaactgaaacaggagaacgacaatgacgcacgaatatccacgattcaccatcaccaatagccaccaccatcctacaaagccacagccggtcacggtgaccgtgccggaaaaagttgaggccgatctgattctcggtaccaccgatttgggacagtcttcgccgttccagaaggtgctgggggattccgacggttcctcgacgacgttcatcggcattctggtgccgcatgacggagaggtcctgtccctacatgacccggacccgggggagacgtttgaaggaggcatcgtcgccgacgacaacacgctcgaaagcgatgcggtctgccaccttgatacgggatatttcgacattgaactatgtcgtggcaccggcaagggcgagggcgcctccaaatggggcatccgccatttcctcaccaaggacgagggattcgatctgctcaagagcgggaacaacgccattggcgggttctacggccctttcttcactccggaaaacggtctgatcaacccgcccgaacatgccatcgccgatgtccgtcttatcgagttcggccccgtcatgcgccgttacctgcttgaggggcgcatccctgatggtcttcgacctgaactgcagggcaagaccttctccatcgagttcacgttctactggaacgtcgatttcttcgatcgtgtctaccatgtggattcgtttgtgacggaggtcgatggcagaagcgtcgtgaaccgtatcacggtcggtgacgagttcgaaagcggcgaaggaaaccttgtcttcaaccgattcgacacctaccagcctgttcctttccgcggaggggacccctacgccggcttcctcaaggatgaagtgcggaacgtgctatcggagcggacggaaacgacatcaaggttcgcctatttctccactctgcttgacagggatctggagaacgctcactgggatctctactggcgtttgttctcgcgatgggaaaatgcccttacccccaaggggctcgatgagaggctcgggcatgtgcgggcgcttgcccaccgcgcagctgatgagacctcccgtccttggcagttccccgagggggcggtcgatgtgtcggcacaggaggaggagaccatcttccccgggccgtctgcctgcagcgccgaatacgacaccaataccaaccggtgcatgatctggatcacctcggaggcgtcctcggcgttccagatcgtgcagaggcctcaatccggctgggtcaactggggtacgaacggcgaaaacgaatgcccggcattgcctgtcggagtcaacatcaggacgatttatggtccgtatgggaacgggtggcgtgatcgcgccgatgagtcccgattcggtgtcgtgaacgttgaacgataggctctgagcacccgtatgccggtggttccgacggttttcctcctctttcccgtcggggccaccggcatcgtcattattcggctcctgattcccgctcctcatcgaactgcaagatatccaatgtaccgacgacgattatgccaagcatgccgttgacatacttatcgaccgcatcgaaggatactcaggcccggcccgtacgtacaccaccgatttcacattggtggaacgtgcctcaactcgacttgcccactagcctccaacaagttcgcatcggcttcgtgaggagtgtgtgtctactcgaacaatgcggcgtcagtcgctgggtagccaagttggaacgcggtgtaggcgtgcttggcggccagtgcggcgaggatgagcagcgtatcgctctcggtggaagatttcgattcggtcacggccttgatctgcgcgcgggcgcagtccatttcgatggcggcggcggtcggtacggtctggccgcttgccttgtcggcgatggtggtggggttggccagtagttggtcgatggcatagaccttttggcgggggtcgctctggccggaagaactggactgtgcgccggaatcatcaaaattgccgttcgccagcgacaccagctgctgcccggcggtcttatgcatatcgctcaacgccaacgtagccccagcggtctgtcctcgtgcggccaagacctcgatagcgaatccggcgcgatcctcggccacggccatcgcatccaataccggtcggtcaacgttggcggacgtgacgccatcaagacgcgccggcgtcacctcaggcgcggactgcccgaatttatcggccagaaaagccagccattgcttggtctgcgcgtcacgtaacgttccctcggcaaaacgacccgaacaatacccggcaacgtcaatccaagtcaggggagcggccaggccggtggcatactgctctaataacggcgtgccttcagccggatgggtggcgtagtccgccaacgtcatcgctttctcgcaagggctcatttgagcttccgcctcggcccgtccggccagtcgcggcatcgaacacgccgaaagcgaacacagcatcgcgctcgcgcatagtgcggatgccaagcgccgggtaaaccgtcctgaagagaagcgtgtctgcatggaaacctacactaatagctaactgtgaccactcataggccatgcgccacataacttcataggaggtacggatcgatggaactggacctgacaggaatacacaagctcgccgccgagcaaggaatcgaccccggaaccctggatgatgcgctggcagaggccctgcgcctcgcctacctcaagactccgcacgccgccaggcacgcgcgtgtggagcttgacgaacgttccggcaacttcaccgtctgggccgccgacgaaatcccggtcgagcccaccgaggacgacccgcaccccgctcccaagctgggcgaggaatacgacgacaccccgcgtgacttcggccgtctcgccgccgccactgcacgccaggtcatcacccagctgttccgccgcgccgaagatgagaaggtattcggcgcgttctccggtcagaagggcaagctcatcaccggcatcatccaacaggatgcttccgacccctccaacgtgcatgtcgcgatgggcgatgtcgaagccattctgcctcgccgtgagcaggtgcccggcgaacgttaccgccacggcgaacgcatccgcgtgtacgtggtgaacgtggcccgtggcatcaagggcccggaaatcgtggtgtcccgctcccacccggagctggtccgcaagctgttcgagcgtgaagtgccggaactggtctccggtgccgtgtccatcatggccatcgctcgtgaggccggcgcccgcaccaagatcgcggtcaaggccaacaccgatggcgtgaacccgaagggtgcgctgatcggccccggcggcgctcgcgtgcgtgccgttatggagaaccttggcccggagaagatcgacatcgtcgactactccgacgatccggccaagttcgtggcagccgcgctgtccccggctgtggccaccggcgtacaggtgatcagcgagaagaacaagaccgccatcgccttcatccacgacgaccagctatccctggccatcggcaaggaaggccagaacgcacgactggcagccaagctgaccggctggaagatcggcatcgaatccgccgaggcccatgccaagaaggtcgccgctgaaaaggccgcccaggctgcggccgaggctgctgctccggaagccgaataggccgccgggctcgaaggcgaatgatcttcagggcgcattatttcctgatacgagccgcgtcagcaatggcgcggctcgctgcgtctacgctatccagcgctatgagtatgcttgattggcgtatgtgggctggtgcagtgtgcgcgaaatcgcccacaccagagacgaggtaacacgatcatggtcgcacgatgagacagggtaggcttgccgtcatcaccaactgaccacgcccatgcacgcgcgtggtcacagaataggagtaattagtggcgaaaccacgcgtatacgaactggctaaggttttgaatgtcgatagcaaaaccgtgcttgagaagcttaaggacatgggagaattcgtcaagtccgcttcttctacgattgaaccgccggtagcccggcgtctgaaggcagagttcgccaaggacaacgccaagggcgattccaagcccgcatcttccgtacaaaagcctgctgccaagcccgtgcagcagcgccgcccggccgcaccttcggccccggcttccacttcatcttccgcaccgactccggccgctcccgcacgtcaggcatcgcccgcctcggcacatcagcaggctccgactccgggcgcaccgacaccgcgtccgcagggcggcgcacgccccggcatgccgacccccggccgccacggtcagcacgacaaccgtgagaatggtcgcgataatcgcgaaggccgcgagaacggtcgtcagagtcgcccgaacgatcgccgtaacaacgatcgtcgtaacaaccagggccgtccgaacaatggccagccggggcagcatcagaacaaccgcgacaatgcttcggctccgcgcccgcacgctcagggcggcgccggtgccaatggcggcaatgccgcttcaaacgcgattccgcgcccgcacgctcagggcccgcgcccgggcaacaacccgttctcccgcaagcagggtatgcacaccccgacgccgggtgatattccgcgtccgcatccgatggctcgtccgactgctgatagcggtcgtggcggtcgtccgggccgtcccggccaaggccaggggcaaggccgcggcttccgtggcggtcgtccgggccaaggtggtcagggcggtcctcgtcccggccagtggggccacaaccgtccgggtcagggcggcggctcccagggtgccggtcagggcggcgcacgcggcggcttccgtgggggccaaggcggcggcaataacttccagggcggcggcgcaccgagcaacggtcccgcacgtggcggcggtcgcggcggtcgcggcggtgccgcaggtgcattcggacgtcagggcggtaagtcctcgaaggcccgtaagaaccgcctggcaaagcgccatgagtatgaggagctgaaggcaccgaccatcggcggcgttcgcatccccaacggcaacggtcagaccatccgtctgcgtcagggcgcttccctggccgatctggcggagaagatcaacgtcaaccaggccgcgctggtcaccgtgctcttccacctgggtcagatggctaccgccacccagtccttggatgaggagaccttccagattctgggcgaagagatcggctggaacatccagctcgtctccgcagaagaggaagacaaggaactgctccagcagttcgacatcaaccttgacgaggaagaactgcaggatgacgaggatctcaagcctcgcccgccggtcgtcaccgtcatgggccacgtcgaccacggtaagacacgactgctggataccatccgcaagaccaacgtcatcgcacgtgaggccggcggcattacccagcgcatcggtgcctaccaggtcaccgtgaaccttgaaggcgaaccgcgcaagatcaccttcctcgatacccctggccacgaggcgttcaccgccatgcgtgcccgtggtgccgagctcaccgacgtcgcgatcctcgtggtcgccgccgacgatggtgtgatgccccagaccgttgaggccatcaaccacgctcaggccgccaaggtgccgatcgtcgtggccgtcaacaagatcgatgtgcccggtgccaacccggagaaggtccgcggccagctcaccgagttcggcctggtccctgaagagtatggtggcgacaccatgttcgtcgacatctccgccaagcagaacctgcacgtcgacaagctgctcgaagccgtgctgctcacggctgacgctgagctggacctccgcgccaaccccgacatggacgcccgtggtgccaccgtcgaagcccgactcgacaagggtcgtggtgccgtggccaccgtgctggttcagcagggtacgctccacgtgggcgatgccatcgtggccggcacttcgtacggccgcgtgcgtgccatgctcgacgagaacggtcagccgatggaagcggccggtccgtccacacctgttcaggtgctgggcttgacctccgtgccgaccgccggtgacctcttcctggtcgcctccgatgatcgtgccgctcgccagatcgccgagaagcgtcaggccaccgagcgtgccgcccagttggccaagcgtcgcaaggtcgtctccctcgaggacttcaagaagaagttcgccgagtccgagatcgacatgctcaatattgtcatcaagggcgattcgtccggttcggtcgaggcgctcgaggattccttgatgaagatcgaggtatccgacgaggtcggcatccaggtcatccaccgcggcgtcggtgcaatcacccagaatgatgtcaacctggccacggtcgacaaggccgtcatcatcggcttcaacgtacgcccgaaccgtcaggtggcggacctcgccgagcgcgagggcgtggagatcaagtactactcggtcatctaccgtgcgatcgaagacatcgaggcatccctcaagggcatgctcaagccggaatacgaagaggtcgtcacctctcactccgagatccgcgagattttccgctcctccaagttcggcaacatcgccggcgtcatggtgcaggacggcgaggtcaagcgtggtacgaagtgccgtatcctgcgcaacggcgtggccacggtcaacgacctcgagatctcctcgctgcgtcgcttcaaggacgacgttcagtccgtcaaggaaggctacgaggctggtatcaacctcggcaccttcaacgacattgaactcggcgacatcatcgagaccttcgagatgcaggaagtcgagcgcaagtagtcattgttaagccctctctgacgagtgggctgtcagccgcaggctgactgggggagagacatggtagttccatgaattttctctcccccagcctcactgcgttcggcagcccctcgtcagagggggctcaagtctagaaaaggaaattcctatggcaggaaccaacccgcgcgccgcacgtattgcggccttgattcagcgtgtcgtcgcctcctccattgagcgcgaactgcatgacaagcgactcgccagcatcaccgtcaccgaagttcgtgtgaccaacgatctgcagatcgccaaggtctactggacccagctcggccacgaaggccacgaggaaggcgaacgcaagcgcgcccagcaggcgctcgatcaggccaagggtcacctgcgttctctggtgggccacaaggctggcctgcgcctgactccgcagctccaattcgtgttcgatgaagtgcccggcgaggctcacgagatcgaagacattctcgccgtggccaagaagcgtgacgaagaactcgcccgcgcccgcgccaccgcccagtacgccggcgacgccgatccgtacaagcacgacgacgaggccgaagccgagggcgatgagttcgagtccgacgaggagtagtgtgcttcatacaacacccagcggcctactcatcatcgacaagccgcaaggcgtgaccagtttcgacgccgtcgccgccgtgcgcggcgcgttgcacatcaagaaggtcggtcacgccggcacccttgaccccatggccactggcacgctggtcatcgccttcggccacgccacgcgactgctcaacgccatcgtggcgcatgacaaaacctacgaggccaccatacgcctcggcctgcgcaccactaccgacgatgccgaaggcgaggcgcttgtcgatgatgaagcccgctcccgctggcaaacgctgtcagcgcagctgactgagggcggccagagcggcgaaccaacggcgtcaccaactgcctcatggcaaaacctgctcactcgcaccatcgccaccaatttcaccggcgatatcgaacaagtacccaatacgttctccgccatcaaaatcaacggccagcgtgcctacgacttggctcgcgaaggcaaggatgtggaactcaagccccgcctggtgaccatcagcgaattcaccgtgctggatatccgcagcggattcgtagcaggggagcaggccgctgaaccattgcgggaagacgcgaacacgggaacgattcccgcacttgatattgacgtgcgggtcagctgttcatcgggcacctatatccgcgcgctcgcccgcgacctcggcaatgaacttggcgtcggcggatacctgacccgtttgcgccgtacgcgagtcggccgattcgcgttgccggacgataccagcggacttatcgcctctgaggcgatgcttgacacgcgaacccataccgtcaccgcacataccgatcagaagacgttcactaatcgggaagggcaaaccgtcacgcgcaacaagtgcgtattgaacactcctgaaggccttgccggtgacgagcgccgcaactggctgcttgaccatgccctcaccatggaacaggccgctcgaggcgcgatgccggcgcttgacatcacacctgaggaagccagcgaattgcgcttcggccgccgtatcgagcgtacaatcagcgagcccactgccgccattgtgccgcaaacgcatgatgtggcggcgattatcgagcgtgccaacgctcatcaggccaagccggtcaccgtattccccctcgcgtaaagtagacgcggtgaaaagtgcagcttgatacaggccgcgcacaacaacgcctatattgcatgaataacatcgcacggataaaaggaacagcacactgatggatatcacgcacctgacccctgacgccgaaggttcgattgaatggccctcgttcagtaacgacaagaaggccgtggtgacattgggcgcatttgatggcatgcacttgggacatcaggcggtgatcaagcgtgtggtggaactcgcgcaccagcatgatgctttttccgtggtgattctgtttgacccgcgccccgcattcgtgcacggctgggccgcctcgcaccatggcgaggaacccgcggtgcagaacgtggatgccgaagccttgaccagtgtggatgatcgactgcaccgcatggaacagttcggcgtggaccatgtgttggtggtgcactacacgctggccttcgcagccatgtcatacattttcttccttggcagactcaccggcaagctgggcatgcgtacgctggtcctcgggcaggatgccgccatgggcaaggggcgagaaggtgatgtgaagcatatcgccaatcttgccgccgccaccggtgtattcgaacttgatgtggtcgatgaccgtggcccgggtgaagtgcgcattccgcgcgatttcaagccggaagccccgagcgaatggggagagcccgtcgacccgctggccaatgccaccaaggccgagcgccgcgcatggagcaagaagaaccaggccaaggcaatgcgcgcctggagctccaccaatgtgcgctacctgctggctcatggccgaatccaggatgccaacgccattctgggtgctccgcacgccatcgaaggcgaagtggtacacggtgaggagcgcggccgcaccatcggatttcccaccgccaatcttggctccgacattgcaggctacattccggtcgacggcgtctatgccggttggctggtagatggtgagaaccgctggcctgccgccatctccattggcaccaaacccaccttcagcgagaaaacaggactcaacgaacgcgtggtggaggcctattgcatcaccgatgagtggattgatctgtacgaccataaggttcgcgttgaattcgtcggtttcctgcgcccgcaggtcaagtttgatggtcccgaccaactcgttgacgaactcaagcgcaacgtcgaagagaccaagcgtcttaccgcctgaggcatatctcagggctatttacgcactcccaaggcatctaaggcgtcggacaatgtgttggactccaccagccgaagtccctcgacatgcaccggcttgcgcagcggaggaatgactgccgttgtaaagccaaggcgcgcggcctcgcgaaggcgatattccatacgcggtaccgggcgcacctgaccggtcagggaaatctcgccaatggcgcacgtggctcgcgcaatgggttttgacgtggcggcgctcgccagtgccgccactatcgccaaatcggaaccgggctccttggcctggcccccggcaatagtggagatatacaggtcgttggacagcaggttgagcttgctgtgacggtagagcaccgcgaccagcatggcgatacggctggggtccacgccattgaccgcacgtcgaggtgtgggcagcaccgacgtggtgaccagagcctgtacttcgataggcagactgcgatgcccatccaatgtgaacgtcacacaggtgccttccatgggtgccgcgttggccgcatcagggccgtctccagacaggaacaatccggcgggatcggtgacctcttcgatgccctcaccgctcatgtcgaaacagccgacttcatcggtcggaccaaaacgattcttcaccgctcgcaacattctcagcgcggtctcgctgtcgccttcgaattggcagaccacatcgaccagatgctccaatgtgcgcgggcctgcaatcgaaccgtccttggtcacatgaccaaccagaaataccggaatgtcaagcgtcttagcggtatctatcagcgcgcttgccacttcgcgcacctgagtcgaaccgccggaaatgccatcgacctcctgcgagacgatggtctgcgccgaatccacaatggccaaggccggcttgttctgttcgatcagccccaatactgtggacagatcggtggtggaggccagtaacaagttcggctccaccgcgttgatgcgggaagcgcgcaaacgaacctgcgcctgtgattcctcgccggaaatgtacagcacggtattggcatgtaccgacggtgcgttgccctgtactgacaccgtgtttgatgtgccgccctgcgcccggcccgactgttgggcagaccgctgaccggctcctcggaatgtactgtctcccgccacaacgcgcgcgatattgccggccgtctgcaacagcaatgtcgacttgccgatacccggttcgcccgctatcagcgtcactgaacccggcaccacgccaccgccgagcacacggtcgaattcggaaaacccggtaccgagccgctcgacgctttccgtgcccacttcggtaatcggacgggctgcagatctggcgttgtcggcaaccgtaaccgactgcgtgcgtgatgttcggccgggagcggccgtgcgagagcctgccgccggccgagcctcgtgaaattcctcgaccgtgccccactgaccacactcggggcaacggccgtaccacttcggcccgttccaaccgcattcggaacatacatactgcacacttgatttcgccatggtctcaccctaacccaaacaccagcggacggtaaatttttaccgttcacaagagtttcacgcggcttgcgcacaacgactaagattacggccgtctagcgtcacgcggctgtgagagaatcggggtatgactaatagtgagaactcctcgaccacacaatcccatggcaagttgattgcagtggtggttgccgcagctgttgtgattatcctggcagtgctttcggcctttgtgtggccgggttgggccatccagaagaatgatggcacctccactaccacccaaaacagccagcagaaaaccgaatcatccgagccgatcaagccgaccatcgacgccacagctttgccggatgatgccagtgagctgttgaaggccatgccggacagcgtgctgaattacgcgcgtaccaaggcggatgcctccacgacgtggaattccgcatcgccgctcgaggagtacactctgacctactccactggtgatgccgccaaggatgtcacgctggtcgccgcgcagtggtcgtcggcggacaatgccaagacccagtacgatgcgttggtcgctgcgcagaccggcgatgagtcggcatccggcaacgtcaaggtttccggcaacgtcacgggcgcgtacgtggtgaaggccgatgcctccaacagcaagaacgccgctgccatctggcagaacgataccgtggtcttccaagctaccggcaccaaggaagcggtcgatcgcttctaccagaagttcccgatgtagtatctagtatcggctgtcagctgctgcacaaacttatgaacgttggggcatccacattgctgatgtggatgccccaactgcgttcagggcatatgcggactatcgacaacatactggtttcctctgtctggcaacacgtgtattatggtgcaagttgcaacttttacgattaatcgaaatggaggcttcagatgggttctgtcatcaagaagcgccgcaagcggatgagcaagaagaagcaccgcaaactgctgcgtaagacccgccaccagcgtaagtagtcttacctgcaatcaaggcattagaaaccccgtgatcgttatggtcgcggggtttctctttttggctcctttgccttgttcgggcaacagtaaagcccgcacctgcgatgtacagatgcgggcttggaaaagttcagtgatgtgagacgatcacttgttggcgttggtcaacacgcgcgggccgttcgggtcgccgacgatgaccttgtcgaccatgttgaggaacaggccgtgctccaccacgccgaccgtgttgatgaggtcttcggccagctcctgcgggtgatcgatgcgctccaggtgcaggtccaccacgaagttgttctcgtcggtgcgcacttccttgccatcggcgtcaagacgaagcaccggcttgtagccgcggtcctcgaacttcttgatgacgtggccagcgccgaacggaatgacctcgaccggcagcgggaacttgccgatggtgtccacaaccttggactcgtccacaatccacacgatctggttggagttggtggccacgatcttctcccacagcagagcagcgccaccgcccttgataccgttgaagttcttgtcgacttcgtcggcgccgtcaatggtcacgtcgatgtggtccacgtcgtcgatgtccacgatcttgatgccgtagctttcagcctggacctgcgtgcggcgagacgtggttacgccagtgaactcaagaccttcctcctgatgacggcggccgagctcgtccaccaggaacttcacggtcgaaccagtgccgaggcctgcgatcatgccgttttcaacgagcttggcggcttcgatgccggccgccttcttcagcgcatcctgctgtgccttatccatggtttctcctttgccatccttgcctccgccgcatggatcaacggcgtgaagccttatctcctatcctaacgcgaatgagcgattttgtgtcatcgtgtccgattgcggtacatattcgtgtgtttgggtgttagtgtcgtacgaatggtgcgttggcgatggtcaggttgccgtcgccgtccacatagccttcgatttcgatgctgcctttgatcggcatcggctgcccgttgaaatacgggctcgttttcggcgcgggggagaaggtcagcgtaccggataccgtcagtccgcttggctttgcggggtgtacggggtgcgctgattgtacaggttgcgctgattgtgtcgctaagggtgacgaagacttggtctctggccttgtggcatccgtcgaatccgtcgccgcagccggcttgcgcaaacttgccgcatccgccttgccatccagcaccaactgcacgtctggaggcacatcggtgccatgtgcgtattcggagcccagtagcgactgccagccttcaatcggcagatagccgtcgcgcgcacccgaacggcaatcgcccgcataggtgcgtgccagttcatcgaccaactcattgccctcgttgccggcgtgacctttgacccatcggaaatccaccgggccagggcgttgtgagatctcacggtcgatcgcctgaataagctctttgttcttcacaggctttttctgcgaatttttccagccgttcttcttccagcctttgacccacttggtcgagcaattgatggcgtactgcgaatccgattcgatgagcaatggctcagggcccgggtgcgctcgcaaagcttccagcactgcgcacagctcaccaatctgattggtgccgttggtcgcgccgcccgcatcataaccatggtcgtcgtgcttatggccgggcttgccgccggcgttctgctcatgatcggcccaggcccagcccattggcccgtttggattccctaatgcggacccatctgtggatactgtgatagtcatgttctccaccctaacgcaagttgtgcaatctcttgctgaagtggggttgcccagtgcgaggcaaaacaacgtagtgaagagtgtgaataacatcacacctattgactttgcttgaaaaacatgccatcgcgcgtgaataggtgagcgctcacaagaaaaacaagacatttcctctctgcgggtgaggccggcaacaatggcgcatccggtatctggaatgagaataagggactgtacaaaaccagtgacggcaacatcgaaatcctcaaaccagaggcggacagcgatggttcgacggccacggccgcatccaagggcaccatgcttatcgcaggcaactccaaaaccgtggcactcggtccaggcggcatggccttggctcccggcctgccgctcggtcttggctggttcatccgacgccgcttgggattggatgcctccgacattctggaccgtaagctcggcttgaagtaacggctggttcggacgtgattgctgtcacgtacggatcatgacgacagcgcgaaggtcctcatcggtttacgtcgatgaggaccttcgcgcgcattaggggagtctgttgcgggctgcgctacgcgggtcatgctgcgcgggcgtgctatgcggacaaactacgcgaacaagtcgttcagtgcctcggcaatcgtcggatgcgtgaacaccatatcgcgcaacgtgctggccggcgcgtcaagatccatcgccaacttgacgatattgatcacctcgtgcgactcgacggaaagcagcatcgcacccagaatgcggccagtattgcgttccacaatcgccttcatcagaccatccggtcgccgcattacctgggccttcggcacagcggccaccggcaatcgcttgaccacataatccaatccagccgccttcgcctcgcgctcattcaatcccacgcgcgagtaaggcgtggcgaggaatgtgctcgacggcacatgcttgcggtccttcaccgtgtacggacggtcggaaccattgagctgcgaccacaccacgcgatagtcatccagcgaaatgtacgtgtgctgcgggccgccgttcacatcgcccagagcccaaatgtcggctgctgtggtgcgcagaagctcgtcgactttcacggcaccgcgttcggtgagctccacgccagctgcctcaagatgcagtccctcgacgttcggcgtacgtccggtggccaccagtaccgcgtcggtggtcaggcagaatcgggcttcagccggctcggcgaaccgcggctcgccatcgtctgatggtttcgtttgaacgtgtgacatcgtggcgtgatcggtcgggttgctagtggggctggtggttgttgtagtgtcggtggcgtcggtggcgtcggtggcaccggtgatatcggtatgagcgttcccggtgccggcgggggtggaatcgcaagcttgcgatgcgccgcgagtcatacccttcaccgcaacggacaacctgacgccgccgtcagcagcaggcgcgatggccttggtatccgcgttgaacaggaacttgacgccctgcgcttccaactgtgcgcgaatcgcggccgccacatccgcatcctcgcgcggcaggaactcggcattgtgctgcagcacggtaaccgccgtgccgaaatcggcaaacatcgaggcaaactcaagtccaatgaatcctgaaccgataatcaccagtcgctgcggcatatcgtcgagatccatcagtccagtgctggtgtagacgccgggcgtagtgtggataccgggaatatccggaatgcgcggcgtggcaccggtattgatgaagatcttgctggcggtcacggcgaccgggccctcagcggtggcgatttccacgctatgagggccggtgaagtgagcgcggccggtgattacggtgatgttgtcttggtcggcgagcttgtgatagttcttgtcgcgcagcatcgaagtgacgcggcgcttctccttgatagcagcctcgaacgctgcttcgcgggtttcgggagtactgttcgcgccatcccgccgcgcctgttcggcggacaaaatcagtgacttggacggcaagcatccgatattgatgcaggtgccgccgtacatgtcggcgcttgcctcggcgacgacgaccttgcggccggctgcactgagcttggcagccaaggttttgccgcccttgccgaatccaatgatcagggcgtcggtggtgatagtgggggaggtgctgggtgtgctgatggcattgggtgtgctgatggacatggttacttccttacgtattcgagtgataagagtgcgttgtgctgatgtgttgtgtgccgtgcggcgtctgttttcttctttgactgccgaagcgttatcgactgatgctggctaggggaaacgcgcgggattattagcctttgcgctcgctgaatatctgttcggtgatgtcgtggatggtggtgtgttcgagttgttcgaggcaagtgcggttgagcccggcatagatgtcgttcatcactgcgcccattgaagatgacaccagacagtcctcgtgtacgtcgcccggtgtccagttcactttcacaaaagtggtgccggtggcttccgctaccgcgcgcaaagtgatttcggcggcgggccgggccagagcgtacccgccttcagcaccctctttagtggcgatgagtccggctgaggcgagcggtcgcattactttgcgcacgcgcgccgcattggtacatatgttctcggccaggatctgactgggcaggtgtgtggcgcgatggtcaaggtagaccaatgcgtgcactgccagtgaatggtcgccgttcatgaaacgacctccttaccgagtcgatactgtaactatgatgtgtacagttatgatactgtaatcatatcagatacagttagtgtgtcaaatcggggttgaagaggtggatgactatgtgtataagtgaggtgtccacatggttatccacaatgaatgtgcgtaagtgaagctaggaccacatacctcggatcggcttccgtttccgcacccactacccatatggtggtgtcatgaacaggatgaccgacggcatcaccaactatggagctctgccaggctctatatacgatcagcctccggaagaatcggaggcagtttttgttccgcccgaatttgcggggtcattttctactgactcgaaatacccgacttctcgcgactcgtcatcgccgaacagtggtgcacatgattctgcagcgacaccgaccatgagcgaaagcctcgcccagcgcagacgcgacatggtcgcacgctgcaccgaggaagcgaaacgggcgggcaagaagctgcttttcggcatgaccacttccctcgctctgcaatccgtaccgattcccgccgattgcgacctcgactcggccaagctgcacactgtatccagcgttaagggcaagcggtttcgtacacgccatgcaccactgcaaacgcatatttggaaacatgcggctaaagccgccaatgtggaaatgaaccaacacgtgtttgcgctggacctgtttcacgtatgggcccaacttgccccgtatgtttcttttgagtccctgattgtgctcggggatgccgtcatcgctgctacgagcaaacagccagtattggccaaggatcgtgatgctgctgcaatctatcaggatctggtgaagttcgtggagcaatttacccgattcagagggcgcccgtcctgcgttcgagcattgcctctgatatcacctggtgctgattcgcccaaagaatcagaagaacgactctctctggtagcgcatgggattccacagccggttgcgaactatgtggtgccggatgcggcttttgcatctggagctcccataacgttggacttagcgtggccggagttcaaggtcgctgttgaatatgatggcgatcatcatcgtacgagtaaggctcaatggcgccgtgaccaagagaaaaggggtgtgctggtcgggcggagatggctggtcttcgtcgccacggcggcaagtatcgctaacgaggacgctcgtgctgaattcgctttcaacgtggcgagggcgcttgcttcgcgcggtgccgtattcgagtttcatgtagttgccatgtctcttgaagagttggcgcagagcctgctgtgaccatgatgttcgaaacggactgatgtaaaggcaatatttgtacgacctgttgttgtggtgtgtgcttgatattgcatgccgttcgattgcgatgcctcgtagtgatggatttcgtgaatgactagtgttcgattgtggagggaaatgtgtcatagtggtcgattgggggtgttgtcggtgcattgagcgtggatttgcgccaatgggtgtgggacgctacgcatgttttgccgatttttgcgtggcgtcccacggcccctcgggtaatggctgtgacgggtgtggcaggaatggcgtctttccggggtttccagtttgagtgtgtgggatgggggaaatgtaaaacgattgacttagctgttgtcccacgcttttgtgggatggcagctctggaatgggcaaattcgtcgtggcgtcccacaacgatgttaaaactcgaccatgatgcaagccgaccgaacgcttcggcggtcatctggccgctgtgaccccacaatgatgatggtaggcaggcgaacgtttcgcggtcatctggccgtcctgccctgcagtgatgttgagaaaatgcagtcacggtgcatgaggagaaccgttgacctgcgtgtttcagtggtcgcgaactgcatatgcgctaaaaaaagctctgcagtggattgcatgaatccaatgcagagccttattggttgcggtgaacgcgactaacgcagcgatttcactcgctcagggccttgtcgaccacgacggtggcctcgtcgagtaccttgtccagagcctcgggggagacgaaggactcggcgtacaccttgtagatgttctcggtgccggaggggcgggcggcgaaccagttgtccttggtggtgaccttcagaccgccgatcttggcgtggttgcccggtgcctcggtcagcttggcggtgatgtcttcgccagccagctgcgtggcggccacatcatcaccggtcagcttggcgaacttggccttctgctccagtgtggtcggggtgtcgacgcgcttgtaccaagactcgccgaagcgctcgacctgctcctggtgaagctgggccgggttcttgccggtcttggcagtgatctcggcggccagcaggtcggggatcagaccatccttatcggtggtccacacgcggccatccttgcgcaggaagctcatgccggagctctcctcgccgccgaaggcgacttcgccgctgaacagcgggtccacgaaccacttgaagcccaccggcacttcgatgaccttcgcgttgatcgatgcggccacgcggtcgatcagggaagaggagaccagcgtcttgcccacggctgcgccctcaggccagcccggacggttgccgccgaacaggtactccacgcacacggcgatgtagtggttcgggttcatcacgccccagttcgggcagacgatgccgtgacggtcggcgtccgggtcggtgccgccgaccagatcgtacttgtcccaagcgccggcgttgagctcgtcgaccaggcccttcatggcgtacggggaagacgggtccatgcgaatcttgccgtcgtggtcgatggtcatgaagcgccaggtcgggtcgacctcaggacgcaccacgccgatgttcaggccgtacttctcgttgatgagcggccagtagttcacggaagcgccgccgagcggatcgatgcccagacgcacgccggagttgcggatcacgtcgaagtcgatgacgttctccaggtcgtccacgtagtgctcgcggaagtcgaagccctcgacgtactcggacttgatggcctcctcgtagggcacacgcttgatggacttgaagtcgccgagcagctcgttggcgcgagcggcgatggcgttggtggtctcggccggggccgggccgccggtgacggggtcgtacttaaagccaccgtcggtgggcgggttgtgggacggcgtgacgacgatgccgtcggcgaggccctcgccctcgaagcgctgggtgccgtcgaccgcacggttgtgggtcaggatggcctgggagaccaccggggtgggcacgaagtcgtcacgggagtcgacgcgcacgtgcacgccgttggcgacgagcacctcgatggcggtcttcttggccgggccggacagcgcgtgggtgtcggagccgaggtacagcgggccggtgacgccggccttcttgcggtattcggcgatggcctgggagatggcgatgatgtgggcctcgttgaacgaggtcttcagggacgatccgcggtgaccggaggtgccgaagatgacacgctgctcggggacttcgggatcggggacgaggtcatagtacttgccgataacctcatcgacattaatcagatctgctggggtggcgggctgacccgcattgtttgctaccatgttccctattctgccacgtttttcgccactttgggtactcttatgttaagagttgtcaacttttgtgcgaatcgtgtgccggttgtctagcgcttggtcatttccttctcgatttcctccagcgacttgcccttggtctcgggcaccaagcgcagcacgaacgggatggacagggccgagaacacgccgaaaatcgcgaacgggccgcccacattgttgccgaacgcatcgagcagcacgaggaagaactgggagacgatgaagttgcccagccagttcgccgccgagccgaaggatgagccgatgccgcgcacgctcagcgggaagatctcgccgataagcacccaggcgatcgggccccacgagaccgcaaagccgaggatatagaaagcgatgagaatcatcgtcggcactgccagcacggccacgtcgcccacgaagttcatcacggcgagcaccgcgagcgaaacggtcatcacggtggaaccgaagatcagcatgcccttgcgcgggaaacgatccatgataagcgtggccacgatggtgctcacgaagttcaccacgccgatgcccaccgacacccagatcgcgtcgccttcagggaagccgaagcccttgatgaacacctgcggcaggaagtagatcaccgagttgatgcccacgagctgctggaacagcatgataccgatggcggccaccagcgccggacgagcgatacggaacagttcgcgcacaccacccttggtgtcctgtgcggccacggccttgatttcgtccagctcaatctgcacctgggtctgatccacgtccttgcgaatcagcgtaagcactttgaaggcgttgcgggtgtcgcccttgttcaccagataacgcggggattcgggcagcaacaggccgccgagcagcaacaaggcggccggcaccagcgccgaaccgagcatccagcgccagtcgcggatgccgaagaggttgtggttcaggaatccgaggttggaggcgtaggccagcagaatgccgaaggtgaccatgagctggaacagcgtggacagtgagccgcgacgctccttcggcgccagttcggccaagtacgccggggtcagggcggaggccgcgccgacggcgagacccaggatgatgcgggcgcacaccatcatcgcgaatccggtggaggaggcgcacaggcctgagccgagcaggaacagcagcgcggagacgatgagcagcttcttgcggccgaaccggtcagacagtgcgccgatcgacagcgcgcctgcgcacgagccgatcagcaccgaggaggtgatgaagccggtctgagagacgctcaggccgaagtccgattcgataagcggggaggcgccggagatgatgccggtgtcgaaaccgaacagcatgccgccgagcgcgccgaaggtgaagatgaatgcgctgttgagcgggaagcgcgtggagaagccgtgcgattcggcggcttcgaggtcctcgattgcgttggctgccgcgtttgtggccgcgcccgccactccggccacgccggtttcgatggtttcgattgcggtggccgccgcaccggttgcgctggtttcctgcgccgcggatgccgtctgtttcgatacgggtgatgccgttgtcgtcgtcattgccttgtcctttcgccgttgacggaccgcgcctgttgcgtggcccctctgccgcgtgcaaggtcaggcttcgattgtctgaagtcgcccgaaaacaaaaaaagacctggaacaacgtggaattcgcatattacgatacgcaaattccacgtcgctccaggtcttgcctcgttttgagtaacaaccctgctacgcaacgtgtgtgaaagatagaatacgacttccgcagtcgcgacactccgaataggcagcaaaaaacgatgatttttgacaacgattgcaggattctgcatggtggaatgatgtcggaatgggcgctgcggcaaatacggagaacgggtgtggcgaagcatcatcgcggaacattatggcgggacaccatcgcggagcaccgtagcgcatagttgccgtttcgcgatgctttgccggcattgccgtgcttttggggcacccagcgccgataatggaacacagtggcatacggcagcaaggaggaaccgtggcgaacgcatcgaacgcaacgcctgcagtgattgcggcgcgcatcgtcgatgccgtcggcggccccgcgaacattaccagcctgacccattgcgccacgcgactgcacttcgaactggccgatgccggccatgtcaaccagcacggtcttgaatccatccccggagtcctcggtgcattcccgcgagccggcaatcgttatcaggtcatcatcggcggagcggtcgcctcggtgtacgagcagatcgttcggctgcggacggcgcgattgatgccggcagcgcaattgccatcggcagtgatgcagtcagcgtcgcagtcaacgcaacccactcagtcaatgcagcccactcagccaatgcagcccactcagccagcgcagcccgcgcagtcagcgcaatccacacagcccacgcaacccgcgcagtccgcgccgtacctttccgacgatgccgcaccatcgcgcgatactgccaccgacgccgaacaaagttgcggcccatccaatacatcccgtcacttcacgcctcgtaccgtccgcgagtggggcagtgccgtccgcgcttgggctgccgcgtttttcgactacctgtctgactcgttccgcccgattctgggtgtactgctcggtgcctcgctggtcatcgccatcgtcaacgtgatcgttgcactcggcatcgtgcctgacggcgagacctccgccggctggatactactcaaggcgatttgggagggtgtgttcaccgttctgccgattatgatcgcctacaatgcggccaagaaactggacgtcgacccctggctcggcggcgcgattatggccgcgctgatgaccccgcagtttactggcgtgatgtccggaatgtccggaatgtccgggacgtccgtatccagcgccctctccggggcgattcaatgctcggccaacgccgtattcggcgccgaaacctgcaccgtgtcggcgttcggcataccgattcaactcaacgactacggcggcaacgtcttcgtgccgttgctcatggctgccgtgctcgccgtggtctaccacgggttgaagcgcgtcattcccgacagcgtacagctggtgttcgtgccattcctctcactggtcgtcgtttttgcgctcaccatactggtcatcgggcctctgggaatatggctcggcggtgggctgggagcggccacagcatggcttaacgcgcacgtaccgttcctattcgcgctcatcatcccgatgctctacccgtttctcgtgccgctcggtctgcactggccgttgaatgccctgatgctgatgaacattcaggcgctcggctacgatttcgtccaaggtccgatgggtgtatggaactttgcctgcttcggtgccaccgctggcgtgctcgtgctggccgtacgcggcaaggattcggccatgcggcagaccgcggtgggggcgttgctcgcgggattgctgggtggcgtttcggaactgagcctgtacggcatccatctgcatcaccgccgcgtctaccgctggctgctcgccggctgcgcggccggcggcgtgaccagcgcggtgcttggctggctgttcccatccgtgctgccatccggtcagatggtccggggcgtcacgactacggcgttcgccttctcctcgttgctgacgatttcggtgtttgacagaatgtgggtgtacgcgctgtccatcgccgttgcgtttgtaatggcgatggtgctgacggtgctgttcgggtaccgtacgccgccgcgcgccacggaggcgcagatggtctcggcgggcgagaacgtacgctcgcaggatgcggtgagagggattggcgcgacatcgtcggatgcggagtctgcggaagattccccatcgcggcctgcctccgatcggactcctgactccaacgccatcctgtcgccggtcgccggccggttgatgaatctggaagcgactggcgatccggtgttcgcctcccgcgcgctgggggagggtgtaggcgtcgtgccggagacggccggcgagacggccgtgctagcaccggtcagtggcacgctgaaaaccgtggcccggaccggccatgccttcggcattaaaaccgatgacggcatcgaagtgctggttcatgtcggcattgacaccgtcaatatggatggcgagggattcgtcgtggccgtgggcaaaggcgagcggatcgcggcgggagagccactggccaccgtggatttcggcaaagtcgcggcggccgggcacagcgttgtggtggtggtgacggtggtcaacgccgctgaactgaccgtggtcacgccgttgatcggcgacggtagcggcgacgacaacggcggcgactgcaaaaccgtatcagccggcagcccgatcatcgatgtggaacaatgacgttgcgaaaggatgccatggaaatactgcgagtgttcaacaacaacgtcgtgctcgccaaaggcggcgacggcggtgaggtgattctcaccggccgcggactggggttccaggccaagccggggcagacggtcgacgagtcgaaagttgtgcgcaccttcgtgccatcggacgggcgcgaccctgaccatctggcgcagatgctggcggacattccgcccgaaatcatccgcgtggtcgtcgaatccatgcaggagaccggactgggggagcgcgagaccggcagcaccacgctggtcatggccctgtcggaccacgtggcgaatgcggtggagcgggtgcggcgcggcatcgacatcacctacccgctgctcggcgaggtgagcaacctgtacccgcaggaatacgcgcaggggcgtgcgatgctcgcatcgctcaatgcacggctcgacgtcacgctgccggacggcgaggccaccgcgcttgccatgcatctggtcaacgccggcttcgccaccggcgacctgtcctatacgtacacgatgacgggcgtgatccagcaactgcttgacatcatcgaccacagctacggcatcacgttggaccgcagttccgtgaacgtgggccggttcatcacccacctgcgctacctgttcgtacgcatccaccagcaccagcaactgacggacgagccggcaccggtgatgaaggtgattcgtgagtcctaccccgctgcgctgcgatgcgcgcgaaccatcgcctccctgctcgaactgcgcctcgacacggatatcagcgacgacgaaatcgcttatttggcgatgcatgtcgcccgagtcaccggccacgcatcgtagtaacggattagcggattggcgaatcagcgaatcggctcgagtgtaccggtcatttcggcgaaattcgaggtggcatttgaggcagcggcctgcgcggtcttttccagcgcggaggcgtcgggcacgcgcacgatcagcgcgcggtgatccaccgagaaacggatgtggcgggtttccggcagcatgtcaccgtccacctgcgctttggccggcttttccaatgtgatttcggcactgacaccctggacctgttcgatggtcgagttcgtggacagcgggttctgttcgggcttgccgatgatcgtctggtgcaccacgtcgccgaacaggttggcccagccgaggatgccgccggtggtgtcgatgatttcgaagtccagcagaccatcgtcataggatgccgccggcatcagcgagaacatgggaatctggccgcagttgccggccatcaccgtgcggaaatcgagattcttgatggtgtgggtcgagccgtcggcgctggtgactgtcagcgtgccgcggaacttcggcgcgaacaggttcttcacgccgcccacgaagtaggcgagccagctgatgttcgccttgagctcggggttggtgtcgtcgatcatggccgcatcgaagccgatgccggcgatgatgaggaaggcgtggccgtggtcgtcctccgggtggtcgagcagggtgagacggcccatgtccaccaggcgggagccgtgggaggtggccacggtcagcgcggcgtcgatatcgtccacgggaacgcccatattgcgggcaaacaggttgccggtgccgatggggatgatgcccagcgcatggccggtgccggagacggcgctcgccaccgtgcgcaccgtgccgtcgccgccgaccgcgatcaccacgtcggcgccgtcctccagcgcctcaagcgcgcagaccctgccgtccttgtcaagctgggtgtcgtagaagcggatgcgattgagccccttggcctcgcagaacctctggatatgcagccggcgggcttcggcctgcggtttggacggattcacgatgaaggcgtactgcacctcgtcgtcccggcgcttctccagcgtctgagccagcttgcggcggcgctgcgcgcgcagggcgatgacgatgacggcgatgagcaccaccacaatggcgattgcggcgatgatcagaaacacggtgagggcaggctgaggcatggctcctattgttatcggtggggaggtcgtttgcggccatggtgcgccgtacgtgaacatttcctgcacgcaacagccccgtggggcgcgattatggttcaatcgcgtctcatctgacgaaattggccgggtggacccgtccgcggactttcccgggcttccctgtgatttccgcgtgactcccgcgcattcggccattgtcggtgtctgcttacgcggctagtctggtgcccatgcttgatattcaattcatccgtgaacacaccgatatcgtcaaggaatcccagcgcaagcgcggcgagtccgtggaactcgtcgacgaagtgctctcctccgacaccgcacgtcgtgaggcgctgaaggccttcgaagaggctcgcgcccagcagaaggaaatcggcaagaaggtcgcctccgccccggcggacgagaaggccaagctcatcgccgagaccaaggaactgtcccagaaggtctccgaatacaagtccaaggccgattccgccgccgaggaatacaccaccgccatgtggaagctctccaacatcgtggagcccgaagctcccgaaggcggcgaggacgactacgtggtcgtcaagaaggtcggccagattcgcgacttcgcggccgaaggcttcgagcccaaggaccacctgaccctcggcaccggcgtggccggcatcgacatgcgccgcggcgtcaaggtcggcggctcccgcttctacttcctgcgtggccaggtggcccgtatgcagatcgccatgctcaccatggccgtggaccaggccgaggagcacggcttcacgctggccatcaccccgacgctggtgcgccccgaggtcatgcgcggcaccggcttcctgaactcccacgccgacgagatctaccgtctgcgcgagcccgacgaccagtacctggtcggcacttccgaagtggcgctcgccggcatgcacgagaacgagatcctcgacctcggcaacggcccgctgcgctactgcggttggtcctcctgctaccgccgcgaggccggcgccgcaggcaaggacacttccggcatcatccgcgtccaccagttcgacaaggtggagatgttcgtctacgccaagcaggaggactcctacaaggagcacgagcacctgctggccatggagcaggagatgctcgccaaggtcgaagtgccctaccgcatcatcgacaccgcagccggcgacctcggctcctccgccgcccgcaagttcgactgcgaggcctgggtcccgacccagggccgctaccgcgagctcacctccacctcgaactgcaccgagtaccaggctcgccgtctgaacatccgcgagcgtatggaagatggcggcacccgtccggtctccacgctcaacggcacgctggccaccacccgttggctggtcgccatcatggagaaccaccagcagaaggacggctccatcgagattccgcaggccatgcgcgcctacatgggcggcaaggaagtcatcgagcccactaagtgggaggcctgagtctcatcgtgctttagctccctttaatgggggagctgtcagcgtagctgactgagggagagatcgctaatagccagcaggcgaatccaagaccgaccgcactgccgaatatcaacatccctcccttctgtataatgaatacttgcgcgtgtgaacgcgcatcaggacaggtgtctgagcggcctaaagagacggtcttgaaaaccgttgaggggcaaccctccgcgagttcgaatctcgccctgtccgcaaatagggtttcgggccactggcccggagcccttttcttttgctgaaatgcctgttattgcaacgattgtagctcattgtggcttttccgtttgattccgtgtggtgccgcttatacacttgagatgtggggcgaatagtggggcgaataatcgcccctccgagactcgccccacatctatcggaggtggaggccatgcccaggaaggcgaaacgcaacgacttcggcagcgtcaagccgcgaaaaaccgcgcacggcgtggcctatcaggcccggtataaaacaccggtggagatgattcctcggtatccgggcgcgcgcaaggaacaatataagacgttcgcagacgaaaccgaagcctacgggtggctcgccgccgagaaacgcaagatagcggcgggcgtgtgggaaccgcccaaggccgtcgccgtccgagcagccgccaagggcgtgaagttccgtgactatgcgacctcatggatagagaaccggcgcaagcccaatggcgaggcgttggaaagctccacgaaaatcaagtacacggagaaactggaaaatcatctgctcaagccgttcggggacaaggccgtggcggcgatcaaacccgatgacgtgcagaaatggtgggactcatacggggccaacccgccccaagtgcgcagcgacgcctacacgatgctgaaaagcatcatgcgcaccgccgagacggagccgattaacgaacagggcgacaccctcatagaccgttccccatgccggctgcgcggcaccaccgtgcgcaagaaacacaagacgatgaccgccgaactccatgagatcaaaaccgtgtacgaggccatgcccgaacggctcgcattgtccatctacttaggcggcgtgatgagcctgagaatcggtgaagtgctcgcgctgcgtcgcggcgacgtagacctgaccaagaacgtgctgcacgtggccggaagcgtcaagcccgccatgaaggacggcaaacaggtgatcgtgcgaggcaagaccaaaacggcgaacagcgaccgatacatagacattcccgaggcactgaggccgatcattgccgaacacctgcgataccacaccggcagaggaaaagcggcgttgctcttcgaggccaagaagggcggcgtgatgcgcgaaaacgtgttctcatactattggcgtcaggcccgcgccaccgtgccgagactacgcgaaggcgaaatgaagttccatgacctgcggcataccgccttgcagcatctggtggaaaacggcgcgaccctgaacatggtcatggccgtggccggacacagcgacatcaaggtggcaggcaaataccaagacggcgtaaccaagtctttctcgcagcagatcaccggcagaatcagccaacaactcgaagaggtgattaacccgtctgcgagcgcggcaacgccggaaacggatacgggcaagcccatgccggcgggcgcgacgattcaaggacggacggtaaacgatgagactcgggcgctcgccagaaccttggaaggcatggcattgacggtacgcattcaggtgctgaagaacttggatgccgcgaagcgctcgcaggtgctttcgtgcttcagtccagatgttcaaactgagacgatgactcaactactcagagaggtgatatagaccatggtgcaggttactcaagaacaaaaacgcaccctgaagaagttcgtggctttggggctggaactaggtacgttgagaaggtatgacatctgggaaatccattatctgcttacatatacgaatcccggtattgccgataatgaccgtgcgccccaccccgttaataccgctgatgaatatggcccatatagtgccggttccatgatgggcgtcaacttgggcactaatggcatgtgggagatatggcataaagcgagggatattgccgcaactgaagcggagaaaaacgagatagataaaatggcgcgatcggttttcatccagatagcacagttgggagcggagcggcaccggctaaaagttgaagaccgttggcctgggcttttggtcgaagacgagggcggttatgccatgactgaacatgacccggaacttagaaggtggcttatcaaggatgaagaccggcgacgtggtgatttcgctagtcgtgtatgtaccacgttcttgagagctatcagggaaagcccgaatgatgaaaaccatgtatgtaggggcgtactggagcttgcgggtatcgcgtatgcacattggaagatcgagaaacgtcttgccatgacccacacaagtatcgattggttccccgaagatgaacacgaaaaaggaaactgggactacttcgacgattggaaagactcacagatcagagcttcacgttcgttgcatggtggcgatgtggctgaggctttggagagattcatggccgcatacaagaacggtatagccccgtttcctgaagtggcaaagagactcggtgctaaataatcacagaaattgctgagactcggtggcagatggaattccatcgagtcttgctgtattcttaagtgctgacacgtcattagacgtgccccgttccgacaagaacggttatgcagagtccgagctgcatctacggtaacgtagaaaaatcccgggatatgcagaacatcggctgtggcacgtcaaaactgttccgatgggttaacaattactacgttcaaaggcgaccgtatacccacgtatgcgctcgccggtaaggaaccaccatgtctgcaacgaaggcagagccaacgatacagccgatttcggtaactgtgcccaaagcaaccgagcttcttggatttaaggatacgaaaagcacatacaacctgattcacgaaggcaagatcagggcccgtaaatcagggcgaatcttcctcgtgtcctaccagtcccttgtgaagtacgtggagggctgaaaaacgatgatgaccatgagaaaccccctcgaagctgacggcttcgaggggctgaacgaccatatccatagtaacgccgattcgattccctatgtgctgcccatgacggccggttacctgctggaatgcgcgtatgggccgtacaggctgaccgtctcgcggcgcaccgaggaaaccgcgcgcatgatggcgctgttcgcatacgcgagccatattcgcgccctgccgcttgtattctccgcatggacggcaagcacagccgactgcgtgatggtgcaggcggtgagcctgctgctgccctcgggcgtgctgacgataggcacggtgccgaacctctccaaggcgcggcgcgtgcccgtctcggcgaacgccgttgaccagggcatagccacccttctcgatacgcagctcatgccctcacgcgcccgcatggatgccggctatgtgcgccagcgcatcgcgcgaagcgccgacatgaaccgcagccggatactcgaagccggcgagcgcggcggtgccatcatccgaacactgggggcgttcgccggtgtgccgtggccgcaggcggcggctcggctgaccgaaggcggtgtgctatgagcatggcgcagcaggggaaaattgatggcggctatatcgattcgtcgggtgctgacgtggtggagatcggctgtgacgccgagttttgggagagtctgccttttctgacgcatacccgtgattatgcgtggagctgcggggtgtcgccgtggagcgtgtacggcgtggagcttgtgcgcgcggcctgcgcgataccgcccgagtacgtgctgccgcgcgagggtttcggctcgtatgggagcctgaacatgtttcttgccctcaccggtttcagcggcgacggcaagggcaacagcaccagcgcgggaagcgatttggtgccgttcgtgggtgattacgcgaccatagccattcccccgagcggcgagggcataggcagcgtgttctcgcacatggagcgcgagaccggggagaacggaaggcccacgggcccggcgttcaaccggctcgaccatatccgcgcgctgctggattacgacgagatcagcacgctcaccggggccgcgagccgtcagggctccacgttgaacgcgaccctgtgcagcacatggagcagcaagaagttcggcggctggaacaagtcgccggacaagcgcgtggacgtgcccgcgcacgcctaccggctgtgcctcatcgccggtgcccagccatcgacggccggatacttcctcgactcaaagaacatgggcgtggtgcaaaggttcctcacctatcccgtgaccgaccccgaactgccggaacagcgcaggccggtgaccgccaaaccgataccaaagaaccatttcccgcaaggctacacgtgggatgaatacagcatgtactacagggataacacggccagctacgagtgcaagccgctggccctgcccgaggaagcctcacgggagatgtgggcgcagcgcgtggccgtgaaccaccacaagcgcggcgacccgatggactcgcaccggctcatgctcaccgcccgagtcgcggccgtcatgcagatcatgcacgacggcgcactgaccgtcaccccgaacatgtggcgcatagcgtcctacgcggtcaaacgctcatgcgagttccgcaacgagtacatagccgaataccggaaactgaagagccacgactacgccgaacgccaagaggactacgaccgcgccgccgacatgatggaaccccggcacgtcaaagaagccgaaacggacatactcgaaaaactccgcaactgggacgacggcaaaggccgctaccggcgcgacatgcagcaatgcgtgaagaaacgactacgcgacgtgttcggcaccgcatgggaaaacctcatacgggatggacgcatcaccgcgatcacggacaccgacgccgaagggaaagaacaacccaccggccgctactacatcatccccgatacacactgaccccgtgccaacacggccaacaccgccaacaccaatgattccaacggttcccgctgccaacacatacggccaacaccgccaacgccaaaaacgccaacaccagcgttggcaccgttggcgcaacctgttggcaacgaaaacccttggaaacactcatgttggccgttggcactgttggcaccgcacaaacacaagacggcgagcgcaagccgaagggaaacgggtaggcgctcgccggcatacacgactcaaggacgattgaaatgaactaccaaacaaccagaaagcaactgaaggccggcacggaacgccccgtatccgaccggcagctgctcagcattataggcgtggcgctgctcgacataggcgaatcgctcgaccatatcgagaccatgcccgaacagctcgtgaaggacggtgcccgatgacacgcaagcaagggacgcgtatcggcatgagcccgttctaccgcgactacctcaaagccaaggcccgcaacaagaccacacccaaaacgacggatacggcaccatgccgcaccatgcgggacgacaccggcagcgaggaagggaaacggcagtgagaagaacacccgactacggggccgtgcggctcgcggcaagcatcgaagcccaccccgacgtgaagcaacggcgttccgacgcacgccgctacgccgtggaactcctgcgcatcgtggcccgcaccctgcaatcgggcgaaatgcagcacctgcgcctgaacgtgcccgcagacccgatcaccgcaagcgtcctaggcgcaagcctgtaccgcatcgcctacaagatcgaggaacacgggcaacgcaaccgcaaccttcgccccacgccggacggaggcgaccacgccggggaaagacggcagacgaacggccgcgccaccacgtgagcgctacggcgagcgccatgcatgacggaacgcaggcgctcgacggcggttcccacactctctccccggcccgcgaaatcttttagagggggtcgtgcgcgcgaggaaccccggaaggggcggcaacatcctcgagccggccacgggcggaacactacccgcatggccgctgttcctctccctccgaggcgtgtaccccatcgcgcgcgaggcgcggacggtttcgtgactattggtgacggaacttctggtgagacttgcaatgtgtatctaactacactataatgtgtaggtaagtacacagaatagaggtgagagcagagcagatgacactcaaggaactcagggaggccaaagggctcacgcaggcgcagctcgccgagatcagcggcgtaccgcgaccggtgatagccaagtacgagagcggcgcgaaggactggcggcacatgccgctggaacgggccatagcactcgcggacgccctcgactgccctgatctgagaaacatggccgaataaagcaatggccccgagacgctggaaccgtcagggggccgacgctccacagataacacaagaaccaagcattagccggaagcaccaccgattctaccgcgtggcccttccggcaggaaggaaccacgatgaaacacgaaccaagaccactcgaataccggaaccgggactatcccacaagaccattgaccgctctcgccggcgatgacggcacgatcaccctgataatgggattgggcatgggaacggacgtgcgcataaccctcgaccataacgaggcccggctgctgggcatgtggattgacaaggcggtggcatgatggacaaaaccacaacggcgctgccgaagccgaacaccaagcgcaacacgagcgcaagccccatcaccctgcactacgtcagccggcgcgacctgatcgacggacgtaccacgttcgccatctgcggcgagtacatggaccatgtggatatggggaagaccgaacaaggcaagagtggcagctacgtcgtgtgccccatgtgcgatatggaacacgacagactgacgcaagaccccaagggatgggcggaacaccgctattacggcgatagcggcgacctcatgcgcgaggcgatacgcgccgtgagcctgaccgagctcgaacacgcggacgtgacgatacccgaagcggcgatgaaagccggactcgaccccaaagaactgcgggatcacatcatggccggtgtcataaccttgagcgaggtggcggtgctcgccgacgcggtgggaatcaccccattattgttcatccgcaaagtggagctgtctcaagacaggcgggaaaacctcaagtccaagtagcagcgcggcggcataaggacttgccggcccgtctaccacacgtcttggaagggtccagattccatgacgcggggccggcaaccataccagaaaacccaccagagaacacccatcagcacgcactggcgaacaggacgcagcacactggcccgacgcatcgcatgacagcgagcgccgggccttcccatattcagaacgagtaggggtccatgcagcactctccggcgagacgaaaagagcacgttttgcatgaagtttttctcatggcgacaatttgcctaatctgaaggcgccgaactcagattgacgaaaggatgtggggccatgcgtgaatacatgcgtagggaacaaaggaaggaatcatttgccttcgatggcggcaggtcggcggcgatgaagataacggctgtgcagtgtggaatcaagcgtagcgccgcatcgaaaaaggcagcaagctcccgcgctgattcatggcgctgacgctggggcattacccctccccctcccatgcaaggctccccacaggtcatagcgccggtatccccccgctgattattaagcgttacggttaacgttactgaatggttggaatcattgccgttgttgggtttcagccgtataagcgtaacgttttccgtcactgttgcgtcgcccgttgacaagggtgtgatggcatcgattccactgatcgagccggcataccggtgtggggggggggagtgcccctagccggccccggtatgagaccgccggtgagatgaaattaaagtgcgcagggttcaaaacatttatcctgtgtgcgtacatgcggtattcgcttgtttcgatgtattgggcgacaactccgtagtccgaaaccggtttcaacagcgagctgtctcggtttgagacaggtgttacgaggtgtgccccaagtccgtgaaatgccctggtaaaccatgagaagtggggcgaaatgtggggtggacggtttttgggattaactgttttatcaatgattccagtgcttatcgcctgtttctagttcgaatctcgccctgtccgcgaaccgaggcctgggcaacatgcccaggccctttttctttttctggaacctgtcttcttgatcgccaccggggtgctgatatattggtttgtgatgccgtaacatgcggtgtccccgttgatatgacgggccaatcggcgtgagccgataagaaaaggcccgacgtttgcggcatcgggcctttgcgttgattaccggcttgcgcctttaatcaacaaggttgcaagatgaatcatatcacgatgcacggtaatctgaccgtgaacgggcgcaccgtgatcgtccatgtgggcgatggcgaggcgaacgccacggttgacggcacgcgcttcaacgtgcgtagcctgtggcagctctaccagttgctgagactgctcgtgtagcgtctcattaaggcgcggtgcccccctagtcgggtattgcgccggcaacctgaaaaccgataatgttggcaagtgcttgcaatttgtggtggacgattgcaagctaacgccttggattgttgccgctatccaatatctcattaggtctaccggtggaccaaaagtacgttgctttgtaaggggagttaatgaaatgaacaaacccgcacaatcgagcatcgaatcggtttaacgccactcacctcaacgggacgcgcggtaattgttagctaagttgacaataaaagagcaaaggcctaaattagcaatcagtcatcacgctgaggtgatgatttcactaggaaggagtagagatatggtatcgcacaacaagcgcatcgtggctgctcttgccgcggtagcagcaatgggtattggtttggccggttgcggcggcagcgacactgccggcgacacgaagtccggcagcgatggcggtgtggtcaacatcacctatatgcatcgtctgcccgattccgaaggcatgaccttggtcaacgacattgtggccaagtggaacaaggagcacccgaacattcaggtcaaggccaccaagttcgatggcaatgccgccgacatgatcaagaagctcgagaccgacgtcaaggctggcaatgcgccggatctggctcaggtcggttactccgaggttcctgaggtcttcaccaagggccttctgcaggatgtcaccgatgaggccgccaagtacaaggacgatttcgcttccggcccgttcgcactgatgcaggtggacggcaagacctacggtctgccgcaggacaccggcccgctgacttacttctacaacgccgctgaatttgagaagctcggcatcaccgtgccgaagaccgctgacgagctcattgagaccgccaagaagaccgctgcccaaggcaagtacatcatgaccttccaacctgatgaggccatgatgatgatgtccggccaggccggcgcttccggtccgtggtacaaggtcgacggcaactcctgggttgtcaacacccagactaagggctccaaggccgtggccgatgtctaccagcagctgatcgacaacaaggccgccctcaccaacccgcgttgggatgcatcgtttgataactccatccagtccggtcagctgatcggcaccgtggccgccgcttgggaagccccactgttcatcgattccgccggtggcactggtgctggtgagtggaaggtcacccagctcggtgactggttcggcaatggcaccaagaccggcgccgatggtggttccggtgtggccgtgctcaagggttccaagcacccggccgaagccatggagttccttgactggttcaacacccaggttgatgaccttgtctcccagggccttgtcgtggccgccaccaccgcggatgccaagaccccgcagaagtggtccgactacttcagcggacaggatgtcatggctgagttcaagaccgcgaacgacaacatgggtgacttcacctacatgcctggcttctccgcagtcggcgctgcaatgaaacagaccgccgccaaggctgccgatggttctgccaaggtttcggatgtgttcgacaccgctcagaagacctcggtggatacgctgaagaacctcggtctgtccgtcaaggagtgacctcactaggtcttgtcaacgggccggcttgaaatagccggccgtccaagacctccgatgcctcgcatcaccatagcgaaaggccggggcacatactccggccttccgtattgtttgggggtattgctgcaggggcgctgtggcccttgtcatttgttttactgttctttgcgaagacaggttttgtattatgactgcatccactactcaggcgaagggcaaagcacctaggcgtgccgccgccaagccgaagcggtccggcgctcagaagcgcgagaaccgcaccggctgggcgttcatggcaccgttcgccgtcctgttcactttcgtgttcatcttgcccatcatctgggccatctattccagcttcttccgtcaggtcaccgagggcggtggcgcatacggcggtggcgagctggtcaataaattcgtaggattccagaacttccagtatgctattacttccggcaacttctggtccggcgtcggcagggtgctgctctacaccctgattcaggtgccgatcatgatcatcgccgcactggcgttggccatcgtcatcgactcgttcgtggtcaagcatgtcaccggtttccgtctgggctacttcctgccctacgccatccccggcgtcgtggcctcgattatctgggtctacctgtacaacggccaaatctcgccgatcgtcaagggacttgccgccatcggcgtcaatgtggacttcttcaacaagaacatcgtgctcggctcgatggccaacatcaccacatggaccttcaccggctacaacatgctgattttccttgccgcactgcaggccatcccgcatgacctctatgaggccgcccgtatcgacggcgccaatggttggcagattgccacgaagatcaagctgccgaacgtgcgtggcgcggccctgctggccatgctgctttccatcgtcggcaccattcagctgttcaacgaaccgcagatcatgtctacggctgatccgggtatttccaagtcgtatacaccgatgatgatggccatgaacacttctcagggcaccattaccccgtctggtgacggtccggcctcggccatcgccattgtcatggctctgatcgcaggtgtgcttgccgtgctgtacaccttggccgaaaggaaggtgaacgagtaatgagctccgcaaccgttgaagaacgcgcccgcaaaaaggccgagcgcaagctcgaaaagcagcgtcaggctgcgcaacacgatttgcctcgctccatgcgaccgtccgcggccgtgaagaccctcaccgtggtgctgctggtactggtgttgatctacttcctgttcccgatttactgggccatcatcgcgtccaccaagacgccggcccagatgaccggtagcaacggcatgtggtttgctgtgccgcttgaccagctgcccaatgccatcgccactaactattccaagctgcttggctggactcgtggcaacttctggcgctgggtgctgaactccctgatctactcgggcgtctcggcattgatcggcaccatcgtgtctgtgatggctggctacgccaccgcaaaattcaacttccgcggcaagaacgcggccatcggcatcattatggcctgcatgctcatgccgtccgccctgctgaccatcccgatgtactcgatcttccacacgttgcacctgaccaacactatgctctcgatcatcatcccgtgctgcgtttcgccgttcggcttcttcctgggccgcacgtacgcacagagttcggtgccggacgaactgcttgaagccgcccgcatcgacggcgcgagcgaggcgaggatcttcttcaccatcgtgctgaggctcctggccccggccatggtgacgattttcctgttcctgttcgtggccacgtggaacaacttcctgctgccgttgatgatggtgtcttccgacaccttgaagcccgtgaccctcggtctgtacggcatggtctcgctggccacgttcaccgatcgcggcgccctgatgatgggtgcgttgctcggcgtgctgcccgtgatcgtgctgttcctcggcctccagcgctactggcagtccggcctcgccgccggtgccgtcaagggctaaccaatccgctgcccggcatgtcgtgtcactccttccggtgccgggcaacgtccctcccatattcagtgacacgattccaatcgtccggcgtcaccgtaagcgtcaaggatctacgcagtcagggtcccagggcccgcgatgacgccggtcattttgtatgcgacgaattcgtcgctttgtagttttttgatgaccaaccccacaaaggagcactcatgaccagcaccggccgcttcacgctgcccagtgaagagaattttgccgaaaagaccaaggaactcgccgaattgtggggtgcggacgccatccgcaactccgacggcacgcatctggacgaggcagtgctcgctcttggcaagaaaatctacagcgcctacttcccgacccgcgcccacaacgagtggatcaccctgcacatggacgagaccccgcaggtctacctgctgaccgcccgtatcctggccgagtccaacgcggtggatgtgccgctgatggacggtttcttcgaggaacagctcaagcctaaccgtgacgccgaccctcataagtactgggaagtcgtggaccgcaccacgggcgaggtcgtggacccgtccggctggacgctcgacccgggcgaggacaccgtgcacgtgaccgctgccgtgccgatgcacgaatacacggtgagtttcctggcctacatcatctgggacccggtcgagatgtacaaccacctgaccaatgattggggagacaaggaacacgagattccgttcgacatctaccatccggccacccgcaagttcgtgttcgatacgttcgagcagtggctgaaggacagcccgcaggtggatgtggtgcgtttcaccacgttcttctaccagttcacgctcctgttcgatgccaagcgtcgcgaaaaggtggtcgactggttcggttgcgcctgcaccgtgagcccgcgcgcattggacgatttcgagaaggagtacggttaccgtctgcgtccggaggatttcgtggatggcggtgcctacaactccgcgtggcgcgtgccccgcaaggcgcaacgcgactggattgacttcctctccggattcgtgcgcgagaacgtcaagcggcttgccgacatgtcgcacgcggcaggcaaggaagccatgatgttccttggcgaccagtggatcggtaccgaaccgtataaggacgggttcgaaaagctgggtttggatgcggtcgtcggctccatcggagacggcaccaccacccgcatgatcgcggacattccgggcgtcaaatacacggaaggacgcttcctgccgtacttcttccccgacacgttctacgagggtaacgacccgagcatcgaaggcctcgacaactggcgtaaggcccgccgcgcgatcctgcgttcgccgatcggccgtatgggctacggtggctacctctccttggccgccaagttcccgaagttcgtggacacggtgacccatatcgccgacgaattccgcgacatccacgaccgcaccggtggggtggccgccgaaggcgagctcaacgtggcgattctgaattcctggggcaagatgcgttcctggatggcgttcaccgtggcacacgccctgcccaacaagcagacctactcctactacggcattctggaatccctgtccggcatgcgcgtgaacgtgcggttcatcagcttcgacgacgtactcgcgcatggcatcgatagtgatatcgacgtaatcatcaacggcggcccggtcgacaccgcattcaccggcggcgacgtgtggaccaacccgaagctcgtggaaaccgtgcgcgcctgggtgcgtggtggcggcgcgttcgtgggcgtgggcgagccgagctcggcaccgcgcttccaagcgggccggttcttccagctggccgacgtgattggcgtggacgaggagcgctatcagaccctctccgtggacaagtacttcccaccggtggtgccggaccacttcatcaccgccgatgtgccggtcgacccggcggcccgcgaggcttgggaacaggccggctaccgcatcccgctgagcggttgcggcggtggccagtccatcaagccgttgggcggcatcgacttcggcgaacccgtgctcaacacgtatccggtcaatgaaaacgtgaccctgctgcgcgcggacggcgggcaggtgcagctcgcgaccaatgattatggcgaaggccgcggtgtgtacatctccggtctgccctattcggcggccaacgcccgactgctggaacgcgtgctgttctacgcctcccacaacgaagacaagtatgcggcttggagctcgtccaacccggagtgcgaggtggcgcacttccccgagcaagggttgtactgcgtaatcaacaacaccgatcagccgcagaagaccacggtgactctggccgacggcaccaccgaggacttcgacctgcccgacagcggcatcgcatggcgtgaagcctgattcccgcgttttggagaacggacccatcatgaccgaaagcaatgaagttttattcggcatcgcctcgcattttgcgctggaaggtgccgtgaccggcatcgaaccttacggagacggccatatcaacaccacctatctggtgaccacggacggcccccgctacatcctccaacagatgaacaccagcatcttccccgatacggtgaatctgatgcgcaatgtcgaactggtcacctccgctctcaaggctcagggcaaagagacgctggacattgtgcccaccacctccggcgccacctgggccgagatcgatggcggcgcatggcgcgtctacaagttcatcgaacacaccgtgtcgtacaacctcgtgccgaacccggacgtgttccgcgaggccggcagcgcattcggcgacttccagaacttcctgtccgaattcgacgccagccagctgaccgaaaccatcgcccgcttccatgacaccccgcatcgtttcgaggacttcaaggccgccctcgccgcggacaagctcggccgcgccgccgcatgccagccggaaatcgacttctatctgagccacgccgaccagtatgccgtcgtgatggatgggctcagggacggttcgattccgttgcgcgtgacccacaacgacaccaagctcaacaacatcctcatggacgccaccaccggcaaggcgcgtgcgatcatcgatctcgacaccatcatgcccggctccatgctgttcgacttcggcgattccatacgctttggtgcgtccactgctctggaagacgaaaaggacctcagcaaggtgcatttcagcaccgagctgttccgtgcctacacggaaggattcgtgggcgaactacgtggcagcatcaccgcgcgcgaggccgaactgctgccgttcagcggcaacctgctcaccatggaatgcggcatgcgctttctcgccgactacttggaaggcgatatctacttcgccaccaagtaccccgagcacaatctggtgcgcacccgcacccagatcaaactcgtgcaggagatggagcagaaggccagtgaaacccacgccatcgtagccgacatcatggaggctgccaagtgagccgtcagtcgaaccatacccgaaccagcatgatgggggccgagcaatgagcgatcagctgaccgaggtatacgccagcatcgacgccctagtcgattacgccttggatcatctcgacctcgatccacgcaacgcagactggacccgcaaccaaatcttcgccctcttccacctggattcctaccccggacccaaaaccacaacgtcggcggcgtcagtgtcagacgcagtccaagacattgtcggcagccgaagccaggccccctctgacgaaaagacccccgaccccctactcgccgccttccgcgccgccgccacaaccgccggcctcttcgatccggaggaaggcccggcctacgccgacaccatcatgggcatcctctccgccaaccccgccgatctcgacgaccggttcctgctcatcgagcacagggacggcggcatggccgccatgcaatggttctacgactactgtgtggccaacaattatgtcaagcgtgcccagctcgaccggaacccgcgcttcgactcgcacgggctgacggtgaccatcaacctcgccaaacccgaattcaagaacatgaagaaggcggcggccggcaacgccgtgtccggcggctacccgaagtgcacgatctgccatgagaacgagggcttcgccggacgtgacaagcgcacgctgcgcaccctgccggtcacgctcggcggtgagtcatggttctggcagttctcgccctacggctacttcgaccagcacggcatctgcgtgaacaccgaccacacgccgatgcatgtggaccgcgacaccttcggccatctgctcgacttcgtggaccgcttccccggatacttcctcggatgcaacgccgcgctgcctcgcatcggcggctcggtgctcgcccacgaccactaccagggcggcggcgaactgctgccgatgcacaaggccgccacttgggccgccttcacgctcgccgactatccggacgccgtggtcgaaatcctcgactggcccggtaccgccgtgcgtgtggtgtcgaaaaaccgccagagcatcatcgacgtatccgacatcatccgcgaggcatgggtcggttatgacgacgcggcgaacggcatcgccagccatgacgcggacggcaaccgccaatccgccctctcgcccagcgcgatcatcaccgaacgtggctatgagatgagtctcatcttccgcaacaatgcgatcagcgacgagtacccggaaggtattttccatgcacaccccgaatactggccggtcaagcaggagccgattggactgatcgaagcccaaggcctgttcatcctgcccggacggctcgtcgaccagctcggcatcgtcgaggaggcgctcgccgaaggccgcgatttgcccgatgaagtcagcgaattcagtctcgaatggggcgaactcgctgaaacattggccggaaaccgcgaccgcgaggccatccaccaagccgtacgtgacgagctcggcagcgtctgctaccgcatcctcggcaacacggccgtcttcaagcagaaagccaccacgcaaacattcctcgaaagtcttggttttgccgctaggtgaaacaggtcaagtgaagtaagctcaatactgaaggaaaaccgaaggcaagtccttccaaaggaggagatatgactactgttctggttacgggcggtgctggattcatcgccacccacaccgacatcgaactgctcgacaagggctacgacgttatttccgtagataactacggcaactcgtctcccgtggcgcttgagcgcgtcgagcagatcaccggcaagccggtcaagcgttacgacggtgacgtgcgcgatgaggcgcttatggaacgcgtcttcaccgaaaacaacatcgattgggtcattcacttcgccggtctcaaggccgtgggcgagtccgtggccaagccgatcgaatactacgacaacaacctgtactccacgcttgtgctgctcaaggtgatgaagaagcacaacgtcaagaagatcatcttctcctcctccgccaccgtgtacggcacgccgaaggaactgccgattaccgaggagacgccgaccggcggcaccaccaacccgtacggcacctccaagctgttccaggagcagattctgcgcgacgtacatgtggccgattcgtcctggaccatcgtgctgctgcgctacttcaacccggtcggcgcacacgagtccggcctgctgggcgaagatccgaagggtattccggcgaacctcaccccgtacgtggccaaggtcgcggtcggcgagctcaaggaagtccaggtctacggcgacgactacgacacgcccgacggcactggtgtgcgtgactacatccacgtggtcgacctggccaagggtcacgtggccgtcattgaccacatcgacaaggaaggcgtgttcgtctacaacctgggtaccggccacggctactccgtgcttgaggtcatcaaggcttacgagaaggccgccggtcatccgattccgtacacgatcaagccgcgtcgccccggtgacatcgccgcctgctacgccgacgcttccaaggcggagaaggagcttggctggaaggccgagctgaccatcgacgacatggccgcctcctccctcaactggcagaccaagaaccccaacggtttccgcgacgccgagtgatatgagcagatgagctccctctgatgagggagctcatctgtcgtttatcacacaatgcgcctatcggcggcccagcgggtgagctcggtgcgattcgaaagctgaagctttcgcagcaccgagctcacgtgcgtttcgaccgtcttgatcgaaatgaacagttcggccgccacctctttatacgtgtatccgcgtgcgatcagccgcatgacctcctgctcgcgggcggacagccggtccagctcctcatcatgagcccgtgccgcaccatcagcgccgccatcagaccccgccgccggcacaccctgaaaggccgaaagtacaaaaccggccagttttggcgagaacacggcatagccctcatgcacctgcttgatggatgaaatcaaatcagcgccggtaatcgtcttggtcacatagccctgggcgccggcgcgaatcaccgcccccacatcctgcggcgcatccgaaaccgacaatgccagaaacacggtggtaggggagtagggccgcgatttggcgaggatctcggcaccgccgccaccttcaccgccgggcacgtgcacatccagcaacaccacctgcggcttggtctgtgcgatcatcgccaccgaaccgggcacgtccgccgcttggccgacgatatcgaaggaatcacgcaacgtggcgattacgcccgcacggaacatctcatggtcatcgaccacggccacacgaatcttggctgtctcattctcgctcatcgatgttctccctgcgccgctttcagcgcgatcggcatatgcattctgacctcggtgccccagccggccctggacactatctccactgtaccgccgcgccgtttgatgcggccgataatcgattcgcggatgcccagccggtcgggcggaatggcgtccatatcgaagccttcgccatggtcgcgcacgaacacttcaaccatcgtgtcgctggcctcgcaatacaaagacaccggctcgccgccatgcgtgaccgcattgaccaacgcctgacgggtggcgtccagcagcgcatcggtctgggcgctcggccgcgcgtcgcccacggtgaccacctcaatcggtttgccgtgctcgtcctccacctcggcggcgatctgcttcaatccggctcccaccgaacgatccgatgtggaacgttcctgatacagccattcgcgcagctcgcgctcttggctacgcgccagggcgaatacggtggtcggttcctcggagtgcagctgaatcagcgccaacgtttgcagcacgccatcatgcagatgggcggtcatgtccgcgcgctcctcttcgcgttccttcaatgcctgctcgtgggtgagtcgttgcagcatcgcgttcgcccacggcatcaccgccaccacgataccgacgatcatcatgaatccgctggcaacaatgcgtcgaggagaggtgccccacccaggaatgctgacattatgcacatacaatgcccatcccatgaaaatcagtgcgatgccgcccaacatagacaacagctgcgtgcctcgcggactaagattcatccatgccagtgcgatgccgcccaaccctaccagcagcggaagcacaatctgggcatccgcaccggtgctggtgagcagcagtccggtggccatcaacgcgaaaccggccaatgccacgacggccggtttcggagcacgttggatggcttcggacaatgattccggtgcggcagccgattcgtcgtcatgagcggcaagtggctgattgcctcgcgcaagcggcgcctgatcaacgggcactgtgcgagccgcagccgtcaccgggtctccggcgggcatgaacacccacaggaatacataagcgatgatgcctgcgccgtagaggaaggtcagagcgatgaacgcaatccgaacccatgccacgccgatgcccaagtgcagggcgatgcccttgcacacaccggtgagccaacggccctgccgggggcgcatcaacggcatgcgcgcaggcagcaatggttcgggagatgacgtcatactcctattgtgccgcgctcagggcgttgcggccggggttttacccggtgttcagggaacaatcagggtgttccccgagcgttgtggcagtggtcgggcggtgtaatggaatcatgagcaatccaaacgcgaatccgtatcagccacagccgcagcctggtccgcaaaaaaacaagacatcgcgacgcttcttcacttgggtgcgatccagtggactggttcgcggcgacgaccggtggatcggtggcgtatgcagcggcatcgctttacggcttggctggagccccacactagtacgtgcgttggtgattgtatgtacattgttcttcggcttcggcgcagctctgtacgcactcggctggtttctgatgccggatgtacgcgatgggcacatcttggccgaggacctcattgccggccaatgggactggaattgtcttggatgcttcctgttcctagccgtggcaatcgtgattccaggtgcggggtgggtttgtattgcgctcgccgccttagcgctatggttgttggccaaaagcggcattcgccagcaggaagggtacggattcggggcatctgcgccgcgaccggtttcacagcctgtgtcgtatccagctccacagcctgcctcatatccagccgcgcaaccggtccctctatctcctttgtattcagctccgcaacctgtttcacaatctgtttcacgaaccgcgcctagtgtttcacagcctgtttcacagcctgtctatcagtcgatgcccagcgtgatgccgggcacagtgcccggcgtgatgcccggcacagtacccaacgggccgcttgcccccgaccgtatgaatgcgacggcttatgcccccaccgagtccaagcgccgcaagccggcgggcccaatcgtggtcttgagcatactgggccttaccttcctctcctttgccggtctgatgggactgatttgggtaaacgacatgggcattatcggcattatgcgtctgagcaccatctggattgccgcagtatgcatagtgatggggctggtggtcatcatcctcggattcagagggcggcgtaccggtggtctgattcctctcggactggttgccggtggatgcgcgctctgcatgaccatcgtttcaggcacgtatggcgtgtactaccgtgatcttggtgccagcggcatcaatactgttgtttcactgagccaatctgtcagtgcgagaaacagcgacggcatgaacgatgtgcaaaaggatggcatcttcgttgccgatgccagcgatgccacgttcgaaacattgcagcaaggtgtggcgttcaacggtgaaaactacaacaccgatcaggcaatcattgattggtccgattgggacaagacacatggaccgcacacggtgaagatgctggatggcaaaacttccatcagtaattgcccggtcggtaccatcaccatagccgcaacacaggcgcaagtgcatatcgttctgccggattcctgcacttacgccttcggcaccgccgactcctactccacttcgagtgacgtcggcggcaaatacgagatggtatacaacaactacatgggtctaagctttgttttcttcggagctgaaagcgccaccaatcccatgaatgggcctgattacgaatggttggataagggatccgccatgccggacaacggcccagaattaaaaatcaatattccctatgcagtggaagcacgcgtcaacgtggtgtacgcctccgattggaaaggctccacgttccagccgcttgccgatatatacgacggcaacagcacaagcaagaacacaaccgggcaatcggaatgatcaagccgttacaaccaggagatggaatcatgactgatgaaaccaaggaattcgcctccatcgaggatgcgacaccgaccacggccataccttccgaaaccgacgagaccaccgagaccacaaccatggtgaccgtcgatgaccgaaccgataccacggtgctgccatccgcagcggatgatgacaaaacggctgtgctacccgtccccgacgatcatgcggatgcgccggtctcggatgtggatacgcaggtgacaactgcctctccatcgcccatcgaaccaaccacagatcggattgccctggaaacagttgccgatgccgtggagggggatggcgggccgattccatctgccgatgatgtaccgatgtacgcagcatcttcagcgcaaccttcctatgagcagtctcagaccgccggcaaaccatgccagcctggggggagcgccaagagcgtccagaatgctaaggatgtcaagagtgccaagaacatccagaaacagagcatcagcgcgcctactgtggtattcggactattaggcgtgattatcggcgtgatcgcgctggttttcgggtgcatatctccggatcggatgatttcgctgttctcgccgaatccgcaattgctgacggctattatctgcgccgtagtgggacttattctggtaatagtggccgttgtatgggccatagtcggtgccgtcaagaagagaaaatagcgttacaaccattgcattacggtcccagtagaagcacattatgacgggagccgaccgataagagccgaccgttctatgctgatggggggggggaggcatagtaactatgaaacggatttcggcgcggcgggtagcgagcgtcatcgccaccgcgatggcgatgacgctggtattcgccacacttggctgggcgatgatgccgcaatggaacacacggccctacaccaagcacatcgctatcgcttctgccgacaccaccatcacccctgcccatgcgaacattccccacgagggacgatatcgtacgcgtgaaacccgactatccatcaagaccggcgacggcgtcacgctacccgccgtattacgtgaaccggtcgacgctcccgggccacgcccggcttgtctgttcattcacgggtccggtaccagcggtgccgaggatttcggcgatatcgccaacgccatggcctctgccggcatcgtgaccttggtgccggccaagcgcaacgacaactacaccgtgctgcatcgcgactacccgcgttttgctcgcgaatacgggcgttcgctcgacgtgctgcgtggcataagcggcgtggaccccgccaaaaccggcatctacgccgaatccgaaggcacctggatcgccacgattctaacctcgaaacggcaagacattgcctttgccatacttacatccgcaccggtgttcaatggacgtgagcaaatggccatggctgtcagcgcctatacgcatgaggccggcgcgcccaagcccgtggtcaaagacatggccaaattgatgtcgctggactacgcgccattcgatctggcctatgccgactttgatgccgaccggtatctgaaatccctcaccatgccggtgctggtgaactacggcacctacgatacggccatgcccatcgaacagggggcgcagcggatcatcgccacggccaacaagtccggcaacgagaacgtcaccgtacgctattttgccggcaaccatcagatgcgggctggtgagggcttattcaccccgaacctgccattggccgaaggctatacgcaagcgctggaaaattgggtgaacggtgtgactgccggaaccaaagccgatggatgggcaacgccccaagtcgccggtgcgacacctcaccagcgcttcgccgcgccgcaacgtaccagatccggtatcgtcggctcgctcggcgtgctggccggtctgatggtggcagggcccgtgctgatcgtgatggcggcgatattaggtattggcttgactgtgttttcttggctacagacgttgctggccgggcgacgtagtgtggcgactgtgcgggccatgcatgcgacgccgagtgggctgggagccgcccaacagcgtacgttgcacggcattgccggcttatctgccggtatcggcacagcggtgatggtgattaccgtgctgttgtatggctatatgagcgccgtaggcgtatcggctgtattggttatgcctcaaccgc

SEQ ID NO: 367 - DNA, 18524 bp, Unknown
  R42_10m  MAG No. k141_27685
ggcaacatcatcgagcgtggctcgcatgacgagctgatcgcgcaaaagggcgagtactatcagctctacaccggcgcggtggagctggagtagtcggtacgcctgcaaaaaccgcacctcgattatcgggttgaagtaattcttatccggtagttgggggcgcggttttctatgttgagagccgtgtgttggcgcaggattgcgaatattggcggtatttgctgcgctcattgccatttacttctcgttccccggagtcggcatgattattgcctcgattgtattcgctgtactgtttgtgctgtggatttggaaaggcaagaatccgttcctgggtcgttctttcgtgaccaatggtgcgtatatgtccattctgctgctgcaatttgtgctgtacttcttcaactttgcttgtgtgccgatttacaacgtgattggtgagcagatctacaacgtgccgttgaccacggtttcgctgtgtctaacattggtctacattgtggccacaattgttggatgcgtttctggtccagtaatcaacagactcggacgcatgcgcacactggttatcgctatcgtgctcatgattgtcggcttcgcaggatctgccatattcattaagagtgggttcggagtgctgacttttcttgcctgcttgttcattgctggtgttaccgctgtatatacgccaatctacgacgctgcgtcagatgcgttgccggtcgaggagaatggtcgtggcgtaggaattctcgatctgatgatgaacacttcggcctctatcggagtcggcgtatactccagtctcatggccagtgacaccatgggcaagggtggtctgttcggtgttggcagtggtgtggaagcgcagacctccaacatgttctggattatgtgtgcggtttcggtgttgtcgatgattgtactgttcgtatttcgcaagagttttacggcaaaacgcaatgtctgattgcgcctgctggtgcggagcatgttgatcgaacagactaccgcaccagcagcatctatcattcagaaagggaatatcatgcctgctatggatgaaacgcttgtttctcttgattgcattcatggggccgtgtccgtcgttggctcgatgaatgccgattataccgtcaccaccgagcgtctgcccaaaccgggggagacagtgctaggagggccgttgcgggtgcttcctggtggcaagtcggggaatcaggctgtttcggccgctcgtcttggagccaaagtccgattgtttggtgtgctcggttccgacgctaatgcggattttttgcttgaagcattgaacgataccggtgtggacaccagttatattcggcacgtggatggggccagcgggaccacggtcatcaccgtagacgcggcaggagagaacacgattgtttattctcccggctctaacgcttacgtcagtgttgagtatattcaatcgatgcgggataatctgacctcagctgatgtactgggactgtgtttggagagtccgatggaaacggtcacggcatgcgctcgcctctgccatgatgccgggctcaaggtattgctcaacgattcgccattcgttgctgaactacccgctgaacttatcgaggcttcggacattctgctggtcaatgaacatgaaatggcacagctgctggacatcgccgagcctgacgatgacgattgggatggactggactggtctgatgtggcgcggcagatgcatgacttcggctttaatcaggcggtaattacgcttggcggggatgggtcggtggtcatcgatggtgatgatatctatcgtattgcgccagttgcggttgcggccatcgacactaccgggtgcggagatgcctttatgggcacggttctggccggacttgcctcgggtcatgcgttggcggacagtgcgcagttggcctcgtacgtttccgcgtacgccgcgactggggtcggtgcgcaagcctcttatggtactgctgctcagattcgtgagcggtttggtacgaattgattactgagaagtgtggagtattgccggccgtgaattggtgcagacctaacacgttcatttaggcgctatgcagtgtcgaatgttctcggcgcggattttacgaagtattgccagcaaatgcatcaaggcaatggcggcggtctgggcgggactacggccacgcataacagtatcgagtactcgaatgagtcctatgacgcgaaaactcggaccgtgacgatgcatgccgttatcgactggagcgatccgtaccgattcggggattcgaccggcagttttactgcgccggacatcaccgttgtctttgacaagttcgggaaaatccagcgcattgactccacggtctggggattcccgcctgcccgataattatcggagggcctgaaacatgcacgttctcatcagcgctgcggattgacgatgctgcaaccatacggcgtcatacccgcatgacgtgagttacactatgtagtaaagttatttactgaaatactgcgtattgttacgtactgaggcgtggaaggctcaactatggtcacgatgaaggaaatcgcacagaaatcaggcttctcgcaggccacggtatcccggctgctcaatggggacccgacattgtctgtcaaagaggagacgcgacgtcgcatcatcgaggtcagcgagcagcttggctacgctaccggatcacgccgtatcgcattgccacgccgtgtggccgtactcgacaacgccacccgcgaggaagaactggcggacgcctatttcgatgaactacggtccgtgctcggcgacaatgccagagcccagcacatggaactcacgtcgttttcccatatcgacgatctgattgccgacgccggtgatttcgacggcttcatctccatcggaccgtccgtactctcttcggatagactgttgaagctccatctggtattgccctatggcgtattcatcgacaccaatcctgcgcccagcctgttcgattcggtacaaccggatttaagccaaaccattttggacgcattggatatgttggtgtcctcgggcaaacgacgcatcggctatatcggcggtactggcttcacgatgggtttgcacgaatatccggaagacggccgattaaccgcattccgcaattggaccgagcgtttggggctggatgcggaaggcctgatttacgcgcaaggcgcgttcactgtggacaccgggcgcactctaggggaggaagcggttaacgatcatcgagatgacatgccggatgcgttcatcgtggctgcggactcgattgcagtcggcgtactgcaggcgtttaccgctgcgggagtgctggtgcctcgcgataccagtgtgatcagtatcaataaccaggccatcgcccagtacacttcgccgacattgaccagttacgatatcgaccagaatgagctggccgatactgcgattacgatgcttgccgaggccatctccagtcggcgcacgctgcaccaccataccttcatctccaccaccctagtggtgcgtgacagtttcgtaccagcacgataaagaagctccctctgtgcgataaagaagctccctcgtcagagggagcttctttatcgctgttagaacagttccagattcacgtcgagcgtgtaggcgcgatcggcgggcagctggtactgctcatggacgggcgcgccccatgaatcgtctccgcccacgcccatttgcgcggccaacaggcgcaggaacgtgtgacggaccggcggcaactcgttctggtgggtcgcctcttccagcatgagcgagctgtacggcaacaggctcgccgcgaaatgttcgctgccggcctggctgatacgcatgccgtgtccttgggcgtcaagcacttcggtccaacgcaagtcttcatggttgccggtctcctgcggcaccagatacggtgcattgtcttcggccgcggtgtgctcgaaaatgccgagcttgccaccgtgcagacggtcgtgataggtttcctcggggccaaggccgtagaagcgcaggttctcgtactgcttgggaagtgtccattccaatccgaatgccggcagcgtcggcgcatcggtggcaccggcatatcgggcggtcagatgtacacgtccgctggcggcatccacctcatagcgcacggcaacttgggtttcgcccggttcggccaacgtatgacgaatgccgccaacgggcaccaacctcgttgacggcattcgtctttccaggacaccgcaatcgcggatgcatgccgtttacgcgttgaatacgtattggtcaaggcggcgcatggcctccttgacgcggctcaagggcaatgcgagattgacgcggatgctgtagggggcctggaacatgctgccgtcctgccaatcgacgcccacatcccaaccgcgtttctccaactcgggcaggctcaggccgtggcgttcgcaccactgctcgcagtcgagcagcagcatgtaggtgccttccggtttggccagactcactccttggaaatgcttggtgatgtagtcgtaggcgtaatcgacgttgccggtgagcaccgccttcagttcgtcgagccactcatggccttcgggccggtaggcgccgatcagcgcgtgcatggaaagcacgttcatgtcgttgtagtggcatttcgagcttttggccacgatgcggtcccggagtgtgggattgtagatgatgtggtagcttcccaccagtccggcgagattgaaggtcttgctgggcgcgtagaacgccacggtcctgttgcgtgcgtcctcgctgaccgattgggtggggatgtgctggtggttccccagagtcaaatcggaccaaatctcgtcggaaatgaccacgcaatcgttggccttgtacacttccatggccttctcgatttcccaacgttcccacacgcgcccgcaaggattgtgagggctgcagaacacggccacgtggatgtgatgctccttgagcttcctgtccatatcctcgtaatccatgcgccatacgccgcgctcgtccagcgtgagcggactgtggacgatgcggtagccgttgttttcgatgctccgggtgaacccgatgtaggtcgggctgtgcagcagcacgccgtcgccgggggcggcgaacgcggtcagcgcactgatcacaccgcccaggaccccgttctcgtagccgatcgcctcccgggtcaatccggtgaccccgttgcgcgtggactgccagtcgatgatggagctgtaatagtcgtcggtgggggagaagtacccgtaggcgggatgcttcgcccgttcgatgatggcctgcggaatcgtgggcacggtcgggaagttcatgtccgccacccacatggggatgacgtcgaaaccctcgcgtggcgggtccggcgcgaatcccgggtcggtgcccagtccgtcgaccgcgatcgaatccatgccatgcctgttcatgatggacgtgaaatcatacgtcattgtccgacaatcctttctcggtccgtggtggccggtcccaatctaaatcgggctcctgacggtgccgtggccgtgggcggcgatttgaccgcgtggcgtgttaggatatgcaccgttatgaggcagtgatccgttatcagcggggagtcttcggaagaacggcggcaatcgcccagtagaaccgacgggatcggcccgagacagccgaacacaagcggtcgcgcaggctcgcggctccgagtgcaacagttcggagcggcgcaaccggtgcgataagcgaggtggtaccgcggtgcggagcgcataccagcgctcgtcatcgtcctcgtaggcaggaacggcagacatggctgttccgggcggaacacagtcggttccggctgcgaggcgattgactaatcggcccacggttcggtacgtgacattcgtgaaaccagccggcacacgtcggcgcccggcaatcgccatcaatgacgctcctgtaggaccagtgcacagtactaacaggagatttacggtgagcgaaaacgtatatcccaaggcgagcgagggcggcgagaccgcgcacgtcgcgccgaaccccagcttccccgacatggaggagaccgttctcgactactgggacaaggacgacaccttccagcagtccgttgaacgcaacccttccggcgaccacagccagaacgaattcgtgttcttcgatggcccgccgttcgccaatggcctgccgcactacggccacctgctgaccggctacgccaaggacgtgatcccgcgctaccagaccatgaagggccgcaaggtcaaccgcgtgttcggctgggacacccacggcctgcccgccgagcttgaggcgcagaaggagctcggcatcgactcggtcgaccagatcgagaagatgggcatcgacaagttcaacgacgcctgccgcgcttctgtgctgaagtacaccaacgaatggcagaactacgtgcatcgtcaggcccgttgggtggacttcgagcacggctacaagaccctgaacatcccgtacatggaatccgtgatgtgggccttcaagcagctctacgacaagggcctggcctaccagggctaccgcgtgctgccgtactgcccgaaggaccgcacgccgttgagtgcgcacgagctgcgcatggacgccgacgtgtaccaggaccgccaggacaccaccgtatccgtggccgtcaagatgcgcgatgaggacgacgcctacgccgtcttctggaccaccaccccgtggaccgtgcccaccaacttcgccatcgtggtcggcgccgacatcgactacgtcgaggtccgcccgaccgaaggcaagttcgctggcaagaagttctacctcggcaaggatttgctgccgcactatgagaaggaactcggcgagaattacgaggtcgtgcgcgaactcaagggcaacgagctggcaggccgacgctactacccggtcttcccgtacttcgcgggtgacgaggccgaatccgaaggccacgtgcccggcccgaacggctacacgatcttcaccgccgactacgtcgacaccgtcgaaggtaccggcctggttcaccaggctccctacggtgaggacgatatgaatacgctgaacgcgcacggcatcaagagcaccgacgtgctcgacgacggctgccgcttcaccgcgcagtgccctgactacgagggcgatttcgtgttcgacgccaacctgccgatcctgcgcaacctgcgcgccggtgacggcccgctcgccgagattccggaagagcgccgcgcgatcctcttccaggagaagagctacgtgcactcctacccgcactgctggcgctgcgccaccccgctgatctacaagccggtctcctcctggttcgtgtccgtgaccaagatcaagccgcgtctactggaattgaaccagcagatcaactggattccgggcaatgtcaaggacggtcagttcggcaagtggctcgccaacgcgcgcgactggtccatctcccgcaaccgcttctggggttccccgatcccggtgtgggtgagcgacgatccgaagtacccgcgtgtggacgtctacggttcgctcgaagagctcaaggccgacttcggcgactatccgcgcgacaaggacggcaacatcaacatgcaccgtccgtggatcgacaacctggtccgcgtcaacccggacgacccgaccggcaagtcgcacatgcaccgtatttccgatgtgctcgactgctggttcgagtccggttccatgtcgttcgcgcagttccactacccgttcgagaacaaggagaagttcgaacagcacttcccggccgactacatcgtggaatacatcggccagactcgcggctggttctacctgctgcacgtgatggcgaccgccctgttcgaccgcccggcgttcaagaacgtgatctgccacggcatcgtgctcggctccgacggccagaagatgtccaagcacctgcgcaactacccggacgtgaacggcgtgttcgacaagtacggttccgacgccatgcgctggttcctcatgtcttcgccgatcctgcgtggcggcaacctgatcgtcaccgccgaaggcattcgcgacaccgtgcgccaggtcatgctgccggtgtggagctcctactacttcttcaccctgtacgccaacgcggccaacggtggggctggcttcgacgctcgccagctgcgcgcggacgaggtcgccggtctgccggagatggaccgctacctgctggcccgtacccgtcgtctggtgctggccgccgagaagtcgctgaacgagttcgcaatctccgacgcctgcgatgcggtctccgacttcatcgacgtgctcaccaactggtatatccgcaacacccgtgaccgtttctggaatgaggacgcttccgcgttcaacacgctgtacaccgtgcttgaggcgttcatgcgcgtgcttgcgccgctggccccgatggaagccgagtccgtgtggcgtggtctgaccggtggcgagtccgtgcacctggccgattggccgttcgtggtggacgagaagaccggtgccgataccgagcttggccgcgtgctggtcgacgatccggccttggtggacgcgatggagaaggtgcgcgaagtcgtttccggcacgctgtcgctgcgcaaggccgccaagatccgcgtgcgccagcccctttccaagctcaccgtggtggtcgagaacgtggacgccgtcaaggcgtacgacgatctgctgaagtccgagctcaacatcaagagcatcgagttctcgacgctgcaggatgccgccgcccacggtctgaagatcgtgcacgagctgcgtgtgaatgcccgtgcggcgggtccgcgcctcggcaagcaggtgcagttcgccatcaaggcctccaagtccggcgactggcatgtcgatgctgcgtccggtgcgccggtggtctccacgccgtccggcgaccttgcgctggtcgaaggcgagtacgagctgatcaaccgcgtggaggaggagaacgccaccgaggccgccgcttcggtctccgccgctctgccgaccggtggcttcgtgatcctcgacaccgcgctggatgccgatttgctggccgaaggctacgcccgcgacgtgattcgttctgtgcaggacgcacgtaaggctgccgatctggacatcgccgatcgcatcgccctggtgctgaccgtgccggccgccaatgtggccgatgtcgagcagttccgcgatctgatcgcccatgagacgctggctacctccttcgaagtgaaggaaggtgccgagctgggtgtggaggtcgccaaggcgtgatgctgtggcggactgaccgcgcctaatgcgtggtgcacgggcgcgtggaatgcacgaagtggtcctgccgtttagcggcgggaccacttttctgttccgtggtatgcttgcgctgcgacgatggcgttgcgatacggagcgattgacgaggtgacgataatgtgtgcgacgtactatgcgagaaccagcgatcacgggtatgagacctgcgcggagcacctggccatggccggttgcctcgccggagggtttgccaagggcttcgggtatcttgacgacggattgctggctggtctggtccacgatctgggcaaatattcggatgctttccagcggagaatccgcaaccccgatcattgcggacccgtcgaccattcgacggccggtgcgttgctgttgatgcggtatgcatgcccgttggcggcgatggcggtggccgggcatcacgcggggctgcctgatttcggcagttacggcgagctggagggtccaacgttcatgagtcgcatgaacagggcgcgcagggcgggggattgcaatccactcgctctggctcaagcgggagagacacaactgaatattccgcagtcggcgttcctgcacgggactcgatccgcgaagccgacgacctcgggcaagcgttccgagcgatggtcgctgtacgccgacatgatgttgacgcgcatgctgttctccgctttggtggatgcggatcgacttgatgccgaattcttcacttcgaatcgtattgaccgtgcggaacatcacatccttgaatctttgaagaagcaccttggtccgcagaacctggcgagtggccgggtgcccgcattcgatgccctgcgtgaggcgtcgctgacggtgtccgtcgagcgtgacgccgaagaccggtcccggatcgatcgcctggccgccatcatggagaacacagccgatggatatcttgccgcacccgataagcggccgattgatatcagacgctgtgagttgcttgagcgatgcttggactgcggcaaagatccgtcatacggcaccggcctatatacgctcactgcccccactggcagcggcaaaaccatttcctcgatcgcgttcgctctcgaacatgcgcgcaccaacaatctgcgacgcgtcatttacgtgattccgtatacgtcgattatcgatcagacggtaggccagttcgaggcgatctttggaacggacgccgtgttgccccactactccgaggcgccataccagctcaagaacgagtccgacatggatgaaacggatctcaggcgcgcgcttgccgcggagaactggaacacgccgatcgtgatcaccacggcggtgcagttctttgaaagcctgtactcgaatgcaacctcgcgatgccgtaagctgcacaacatagcggattccgttatcgtcttcgacgaggcgcagacgttgccggtgccgtatctgaggccgtgtgtacgggcgattgccgagcttgtggagcgatacggctccacggcggtgttgtgcaccgccacgcaaccggagctgcagccactgtttgatgaatccttcgatggcgaccatgtgcgtgttcctgagatttcgccgttcactcgtgacgatagggactcgttccgtcgtgtgaccatcaaacgacttggcgatatcgcattggatgcacttgcagagcgactgggaagccacaagcaggtgctgtgtgtggtgaacacgcgtagcaaagcccagtatctccatgaccggctggcggaagatgacgccgaaggcagtttctgcctgaccacgctgcagtgtgcggcggatcggcagcgactgttcgctgagatccgggatcgactggatgccggagcgtcatgccgcgtggtttccacctccttgatcgaggccggcgtggacgtcgactttcccgtcgcatatcgtgaagaggccggactggattccgtcatccagacggccggacgctgcaatcgcgaaggtcgtcgcctcgcttcggagagtgtggtccatgtgttttccacggaaggtggctgcgccccgttcctccggcagaacatcgcggcgttccgggcggtggccgatcgtcatgctgatttgaacacggatgaggcggttcgcgcgtatttcgcggaggtgctatgtctgagaaatggtggtgtcgcccgcgcgaacgtcggcaatgatgcgcttgatcggaagcgtatcctgccgctgcacgggcgtgatgcgaattggccttttgcggacattgccaaacggttcaggctcatcgatacgccaaccataccggtgtatatcccgctgcccggtgaggggtcgctcctgtgcgaacgattggagcgtggcgatatggatcgcacgctgtttcgcaaactcggcatatacgcggtcaatgtatggccgcggcatctcgaacagttgaagtcggtgggggcggtattggcggtcgggccggggaagagcgacgaagaggattgcttcgtcctgcgtgacatgggcttgtactcgtcgcgtctggggttgaggctggacggtgcgaccgctgatggcattttcgtgtgaggagtccgtgtgtccggccgtagatgcggccggacacacgggcgttccggctccgcgcagatagagaccaataaatttcaatccacgctccctaagggggagcgaccgtatgcgtcaacgaatacgcggtgcctctcttcgacggcgtgtggaacgccctcaccatgataccagcttaggatctgtatttattggagtgttcttattcgtctctatcttaatgatgtggtatgttggagtcgtcaacgacgaagacacctcgatgaaaggagggaagatgtcaatacgcttggaagtatggggtgaaaacgcccttttctcgagaagcgaattcaaaacggagcgcgtcacctatgacgtcatgacgccatccgcggcgcgcggaatactggaagccatattctggcatccgggcatgcgctggcggatcgacaggattcacgtgctcaatcctatccgattcgacagcatacgccgcaatgaggtcgatagcgtcatcaatatcggcaaaatacgaacgatggcggaaggacgtggggatggcggcgccatatataccgctgaatccatccaacaacgctcgtccactatcctgcgtgacgtccgatatgtgatagacgctcatttcgaactcaaccgggcgaaaatgtcatctacggattcagcggagaaattccagagcatgttcatgcggcgtgcggccaagggacaatgcttccatcacccgtacttcggtacgagggaattccccgtggaattccagttatggcaggaatccggcgatcccgtcggtttcgaacatgggcatcgggacctaggctacatgttgtacgactttgattatcgcaatccggctcatccggccccgttgttcttccgcgccgaactggatgatggcgtgttggacgtcgaatccgtggaggtcagatcatgatcatcggcgatttgtgcgatgagtacgccgtcctggtgtctcagaataaagctccggcctatgggtatgacaacgtcaatgcttcatacgggttggtcatcgtcgatgatggtaccttgatcagagttcgaccattgggggacttcagcgggaagaagcccgtcaacatcattccggtgccggctcgttttcctcgttcatcagggattgtggcgaacttcctctgcgacaacgtcacgtacctgctcggctgcgacaccaaagggaacgccaaacgttcggcgcaggcgttccaagcgtgcggcgaattgcatcgacgcatactcgatggcgtcaaggatcgtgccgcctccgccgtatgcgccttcttctcgaaggcgccgcaatggcagaccgcccaacgacttatgggggacgaggcatggaagtcgtcagcgacgatgaacttcgtcctggaatatgacgatggggagcggacaatattcatcggagagcttccgagcatacaagaggcctgggatgcctattacgggcgggaggacgatgccgatgaatcggcactggtctcaagcctggtttccggcgaacgcatcgttccggaaaaggtccatcccaaaatcaaaggtgtcgcgggagcccaatcatcaggtgcgtcattgatatcattcaatgccccggcattctgctcgcatggcgccgagcaaaatgagaacgctccgatgagcaagcgggaggcctatgaatatacgacggcgttgaacaccctgctcgccgaccgtgatcgggtccaacgcattggaggcgataccatcgtatcatgggccaattgtggcgataacgcatatcgtgacgtgtgggatcagtacatggggcaatccggcggactgagtgaaaaagtggtcgtggatgccacgcgtgcgctggcgcagggaaaaccttacgactacgagggaattcacctcagcccggatgaacaattccatattctcgcgctgtcccccaatgcggcacgtctttcggttcggttctatctgaccgatacgttcggggcgttcgcgcgcaacatcgatcggcattatcgagataccgccatccggcgccccgtctacgattcgacgacctccctgcctacatggagattgttgaatcagaccatacgaacacaaagcaaaaccgcgaaagtgtcaccgcaaatggcgggtgccgtcatgaaagcgatacttgaagacacgccgtatccgatgactctgatcaacgcggtggagcgtcggatcaatgccgaacatgatgtctcgccggataaggcggcgatcatcaaagcgtattacctacgcgcaacaaccaatgcacaattcaaggaggtgctacggatggacatcaatgaagagaacggctacctgccgtatgtgctcggccgcatgttctccatctacgagcagattcagttggccgccatacccgacatcaataccacgatcaaggacaagtatttcaccagtgcatccacgactccggcccgcatcttcccgattctgggagatctcgcggcgaagcacatgcggaaagcctggaagtcgaaggggctgaaagtcaagttggacaaggccctgggcgagctgaccgggagagtgggggaccgttatccctcccgtctttccctggaggaacgcggcgcattccaactcggatattatttcgaaaatcagaaacgattcgacaaagccaacaagaacaacagcgaacagggagagaacaatgactgaccgtaaacccatcgagaaccgttatgatttcactatcctctttgatgtgaaggacggtaatcccaacggcgacccggactccggcaacatgcctcgagtcgacattgaaaccggtaatggcctgacgacggatgtgtgcatcaagcgtaagattcgcgactatgtgcagacggccatgggcgagcaggccccttggcgaatctacatccagaacaggcagacgctcaaccgtctggatagtgaggcattggaagcggagcatatcgatgctcgtccagagagcaaagattttgccaaggaaattaagacattgaagaaatctgaccccacattggatttgcgtctacgagattatatgtgcagccaattcttcgatatccgaactttcggtgcagtgatgaccacattcgtcaaaggcagcctgtcatgcggtcaggtacggggtccagtgcagctcgggtttgcccgttccattgatccggttaatgtccaagaaatttccatcacccgcatcgcagtcaccacggaggcagatgccgccgacaagaacaacaccatgggcaacaaattcatcattccctatggcctgtatcgcatgaacggctacatttctgccaagctcgcacagaacgtcaccggtttctgcaatgaagatcttgacatgctatggcgagcaattctgaacatgttcgagttcgatcgttctgcggcacgcggcaatatggcggttcgtaaactgtacgtattcaaacacagtagcgcacttggtgacgctccttcgtggaaactttttgacagtatcgacgttcataagcgcgatggggtggacgttgctcgcagctttggtgattatgaagtccatgtgaaccgtgagaccattccagactccgtcaacgtaagtgaaatggtcgatcatacactgtgattctccactcaggccggggttggcattcagcaagccctggccttcatttacgcgcatcaaaaaaccaattgcacgaattgtttgcgagaggaagcgtatgcatgcacaatcggattatccagaggatgattggctggctctttctggccttcagcattttgcgttttgcaggcggcagtgggctttaattcatatcgagcagcagtgggaggataactatctcacgacggctggttctcttgaacacgatagggcccacgattacagtgaatcggaaacgcgcggcagcttgctgattatgcgtgatctgcgtgtgttttcgcggcggttgggaattaccggtgcgtgtgatgtggtcgagttccggcaatcggaggctggcgtaccgttgcatggacgatccggcacttggcttccttaccccgtggaatacaaacatggtgcgcccaagcagacggatgcggatcgccttcaactttgcgcggaggccatgtgtctggaggagatgctggcctgtgcgattccagaaggcgctttgttctaccaacagaccagacaccgggagcgggtcagttttgacgaatctttgcgcaatcgaatcgtcacgatgacgggggagatgcacgacttattcgctcgaggtcatacgccgaaggtcagaccgtcgaaggcctgtcgggcgtgctccctgcacgatgtctgtctaccgaaactggtcaggacgcgttcggcgagacagttcattgaggaagccgtgcgtggggaagtggaaatcggggagaagtcagaccacatatgaagcagttacttaacacactgtatgtcaccagcgatgacgcttacctatcgttgaagaacgacaatgtcattgtccagcaaggagataccacgctcgggaggattccactgcgctccctagaaggcatcatgagtttttcttataagggctcgtcgccggcgttgatgggcaagtgttcggaatttggcgtcggcctttcgttcttctctccacacggccgttactactgctcgatacttggtgagaagaatcgaaacgtactacttcgtcgcgagcagttccgtttcgcggacgacgaagacgcggccctgccttttgcgcagtcgttcattataggaaagatctacaactgccgttgggttcttgagcggaccaagcgcgaccatgcgctgcgcgtcaacagcgagcgtatcgcggagcaaagcgagaaactgcggcaggctctgctgaacgcgcgcgactgcacgtccatcgatgagctgcgcggcgtggaagggctggcagccaaagactatttcttcgctttcgacgacttgattctgcgcaacaaggacgatttcttcttccagcagcgtagccgcagaccgccattggatcggacgaatgcgttgatgtcattcgtgtactcgattctgaccagcgattgcatcgctgccttgcagggagtcgggctcgatccctatgtgggattcctgcacactgaccgaccgggacgtgcttccctggccttggatctggttgaagaattccgtccggctatcgccgaccgtttcgtgctgacgctcatcaacactggagcggtcaagccttcccagttcgagatccgagagaatggcggcgtgtttctttccgagggcgggcgcaaaaccgtgcttgctgcttggcagaaacgcaagcaggagacaatcacccacccgttcttcaacgagaagataccgtggggattggtgccccatgcacaggcgttgctgctcaaccgtgcgattcgcggcgatttggacgcttacccgccgttcatgtggaagtagttcttcttgggagggtactttggtcttgccgaggggcattggagtttgagccaactagagatggaaaccgggatgaggtgttggaatgatggttgtcgtggcctatgacgtcaatacggagtcgcctgaaggcaaacgcagactacggaacgtggctaaaacctgcatgaaatacggccaacgcgtgcagaatagcgtctttgaatgttcggtgtcaccgtctgactatctgattttgaaacatgatttggcggaaataatggacgaatcgcaagatagcctgcgttactacaatttaggggcgaagtattcttcgaagattgagcatcgcggaagacagcggcacctgccaatcgatgacgtgatgatgctctaatgtcggttcgtgtgacggttttccatgatgactgggcaatgcaaaaccttactgtgatgaagaccaaggcggataaaacgaggtaggacagtataggacgatacgattaaaatcgtggctgagcatcgatgcttgatgctgcagccatgtgaccagcgcgaactctgagttctcatgaaatacttgttctttcgcactgagattaatgaatgcttggagactgattatgttctcctcgtcgtttgataactcaaaagtggatggtctgttgatgtttttggttcgagaatttgtgtattgagcgatgtacatggattttcgcgataaaatcagttttgagaatagacggagcttccatattatggaatgctatgcccattctcgcggtcgcaccccactggggtgcgtggattgaaatatcctgttctgccgtgacccgcagttttcggcggacggtcgcaccccactggggtgcgtggattgaaattgggcaatcgcaaatactgcggcgtggaaacgaatgtcgcaccccactggggtgcgtggattgaaattggcggagccgctccgtctcttgctcactcatcttgtcgcaccccactggggtgcgtggattgaaataccaatcaatgacgctgcatcacagactgagaagtcgcaccccactggggtgcgtggattgaaattccgtcacccttgacggacacacgatccagagggcgtcgcaccccactggggtgcgtggattgaaataccgtccactcggtgttgacgaactgccagccttgtcgcaccccactggggtgcgtgga

SEQ ID NO: 368 - DNA, 110445 bp, Unknown
  R42_10m  MAG No. k141_28015
gtcaacgaaatcaacaccatgcccggcttcacgccgatttctatgtatcccaaggcttgggatgccaccggagtgagctacaccgaactcatcacgcgattgattgagggcgtgctgaggtaagtgtggtgcggaatcggctgccaaggaagaaggcgcgctgaacgtcatcgccttgccgcatgattggtccaactacggcgaggtcatcgagggcttcaagaagaagtacccggagatcaagatcaccgagctgaacccgaacgcctcctccaaggaggagatcgacgccgccaagaccaacaagggtaccgacgccgcccccgatgtcttcgacgtcggccaggccatcgccgccacctccaccgactatttcgccccgtacaaggtgcaggcctggaacaagatccctgatgctgccaagaacgtcgacggcgcctactacgccgactacaccggcatcatgtccgtgggctggaacgccgacaagtacggcgatgtcgcctccctgaacgacctgctcgatccgaagttcgccggcaccgtgtccctgaacggcaagcctaccgaggccggcgcggccttcaacggctatctgatggtcaaccagctcgccggcggcgacatcaacaacctgcagcccggtctcgacttcttcaagaagctcaaggaagccggcaacctgaacaccatcgatgtgaccaacggcaccatcgactccggccagaccggcgtggtcttcgactggacctacaaccaggcctcctacaagaaggaactcaagtccaagggcgtgaactggaagtacaagaccttccccaaagcccaggtcgtcagctactacaaccaggccatcaacaaggacgcgccgcaccccgccgccgcacgcctgtgggaggaatacctgtacaccgccgaaacccagaacctgtggttcaagggcggcgccaacccggtgctgctcgactccatgaaggccgacggcaccgtcgactaggccaccctgaaggacgccatcaccatcgaaggccagccggtcacctacagcaacgatgactccacccgcatcaccgagtggcttcaaaacaactgggacaagacgatcggcaactgagagtccacgatgaccgccgcaatcgcacccatcgcaccgaacggacccgccgcctccaaggccgcgggtccgtccgccgcatcgacccccgcttcgtccgcactggcgaagcaccgtcaggagcttggcacgctcaccaccacgctcccgttcttcgcctacaccgcctgcttcctgctcgcacccaccgtgatcgtgatcatcggcgcgttccaggatcgcagcggcggtttcacgcttgcgaacttccacaagatgttcgaagccaacaccatcgccgcgttcggcacgtcaatcctggtgtccgtggcctcatccctgatcggtgccgtggtgggcgcgctcgcctcctacgcgctggtgatcggcgccaagccgaacggaccgctgcgccgtatggtcgccgccatctcatcggtgctcgcccagttcggcggcgtgatgctcgcgttcgcgttcatcgccactcttggcatcaacggcatcggcaccatgctcatcaaaaccctgactggctataccgtgaacccgaattggctcagctccctgctggggctggtgaccgtctactgctacttccagattccgctgatgatcatcatcttcctgcctgcggtcgattccattcgtccacagtggcgcgaagcctgcgagtcgctcggcggcaacaccgtccaatactggacgcgcgtggcctgcccgatcctcgcaccccgcttcatctcggcgttcctgctgttgttcgcctccgcgttctccgcctatgcgaccgccgccgccctgttctcccagcgttcgatcctggtgccgctcatgatccagggtgccatgcgcaatgagatggaccccaaccagcagggcttcgcgcaggtgctggcattcgcaatgatcatcgtcgtggccatcgtcatgctgctgagccacgccgtggaaaagagggccggacgttggcaatgaccgaaacttccacaaccaagccgccgcagctgcgtgccgcccgcgtgcgcaaacagagcatcatcaaattcgtgatcctgttcgtcaccctggcgttcctgttcgtgccgctgctggccatgttcatcttcaccctgcgtcacccgttgtccggtcgctggtcggccgcgccgtggacggcgattttcaccggcaacggcgaatcgttgggcgccgatctgagcgtgctatggcagggcgtcggcatctcgctgtcgttgagcgccgtcaccgtcgtgatcatgctcatcctgctggtgcccaccatggtcatcgtgcatattcgctccaaagccttggagcgtgcaatcgaatgggtggccacgctgccgctgaccattccggccatcgtgctggtggtgggtcttgggccgatctaccgttggctttccgccgacgtgttgagcaccaacccgatctggctgtgcttcgcctatgtgattctcgtgatgccgttcgccttccgcgcgatcgccgtgggcctcaactccatcgacgtcaagacgttggtcgaagcctcccgatcgctcggcgcctcctggcccaaagtgttcttcaaggtgatcatcccgaacctgtggcagtcgatcctctcggcatccttcatctccatcgccgtggtactcggtgaatacaccgtcgcctcgctgctcggccgtatgaacctgcaggtcgcgctctaccagctcggccaatccaatgcccaaatttccaccgccatgtcgctgctggctctgctcttcggcgtggtgctcctcgttgcgctcgacctgatctccgacgcaatgcgtaagtcaagggaaggtaagtgacccgatgaacaacgattcaactcccacccgtcaggaaaccggtaccgcagtggacgccgccccggcgtccccggccattccggcagccgtgtcctccactgccgaggacgccttcaagaacgatcccaccgctaccctcgagggcgtgcgcggcaaggacgtgaccaaggccgccaaggccctgctcaaagacaccgccaagcgcggcggtggttccattcagatgcagaacgtcgtcaagatctatcccggctccaccgttcacgcgctcgacgacttcaacctggacatcaagcccggcgaaatggtcgtgctgctcggtggatccggttgcggcaagtccaccgcgctgcgatcgcttgccggtctcgaagacatccaaggcggacgcatcatggtcggcggacaggatgtcaccggtgtgccggtgaacaagcgcgagatggccatggtgttccaggcgtactcgctgttcccgcacatgaccgccctggagaacgtggaattcggcctcgaagtgcgcggcatgggcaaggccgaacgccgcaagatcgccatggaacagctggagctcgtggggcttgccgatcaggccaagaagtacacgcagcagatgtccggcggccagcagcagcgcgtggccctgtcccgggcgctggccatcaagccgcgcgtgctcctgctcgacgagccgttgtccgcgctcgacgccaaagtgcgcgtccagctgcgtgaccagattcgccgcatccaactcaccaccggcaccacaaccgtcttcgtgacccacgatcaggaagaggcgctggccgtggccgaccgcatcggcgtgatgaacaagggcaagatcgagcagatcgccgccccgcaggacctgtaccagcgccctgccaccgagtacgtggccacgttcattggactcaccaaccgcctgctcggcgcatccaatggcgacgaggccgtggtcttcggccagcgcgtgccgctgctcgccggctccgccaagggcgattccgtggccgtgctcgtgcgcccggagaacctgatgctggccttggctggcagcagcgattcgcacgtcggcgaacgcgcccgcgtggaggtcattcacttccttggctctttggttcgtgtggacacggtcatcacctccggcgaataccagcgctggaacaaaggtgaacagctcaaggccaccgtgcagctgcccgccagcgagctgccggccggtctggcggtgggcgatgacgtgattgtcgccccgcgtccggtcgccgcgctcgcctgctgaatggcgttgcgatgatcgtgcggttctgttctgttttgtgactgtacgatcgtcgaatggcttatcggcaatgatatgtgtgggacggcggcgatttttgggcgattatcgcgtgccgtcccacgccggtgtgggatggcatgaacgtcaaacgatgtacattcgtgccgtcccacagaatgtattgaggaatcgttgcaatgacgccatttcttcgtgcggcgtcatcagtcatatgtggagtggtgtgggccgccgcgaaaaaatcgggcaaaatcgcgtgccgtcccacaacaatcccgcagagtagaggactctctcggcatggggattgattgacgtagatcattccttgcccattgatgattttccccattcccaatgcaatcgaaacgccgtgccgtattcttgaagagtattgcacgtgtgatcggtccgtttgcggccagtgactatgggggataagtatgagcgaaccaatgccgtcggcgcagcagccgcaacaaaccccacgcgattggtggttcacggcccatcgccggttttcgacaatcggctcggcgctcgccattatgatggtgttctggatcgggctgaatattctggccactgaagcactacgaacgctgcttggcgccgatgtgcccgcttgggctgtgctgctcgcctcctccgggccgctgtatgtggtggccatgccgctgagtatgttggccttcactcgcgtaccggttattcgcacccggcagtaccccatgaaggcgggggagttcattcggattttcgtcatgtgcattccggtaatgttcttgggcaatatgatcggcaatatattgtctgccggagccactgatggtcaggccaccaatcgcatcaacgacgtgattcttggcagcgactggcgggtgaacgcattgttcataggcctgttggcaccggtttgcgaagaatggatttttcgcaaggagattatctcccgcctgcgccggtacggagaaaagaccgcaatcatgttctccgcattggcgttcgcgctattccatatgaacgtgttccagttcttctacgcctttggcctaggactgatgttcggatatgtatacacacgcacctcccgcctgcggtattcagtggctatgcacatgctgatcaacctgaacggggcagtgctcgccccattggtgatacaacagatcgatccccgcatcctcgacggcacaatcagcgaggccgaaatcatgcgtatggctgaaaccggcaacatgggcggcatgggcatcatgatgttgtacggcacagtgatgttgggcctctgcattgccggtatcgtgctgcttatcaccaagcgcaagaactgggagttctatcttgcgccagaggagttgccggcggggcttaaaatacgcaccgcctatgccaatcccggcgttattgcgtacctactgctgactgtgatgcttaccggttggatgctgttcgcatgactgtcatagccggacccagagaggtgagccgggagatatcacagattgtctgacgagccgccatcttcaacaaggtatttagtgcccgaaccggcgatggcgcgcgcggccatatctttgatggtggagggcagcacaccctcgcgcgcgaacacaagcacttggccggtcatgccgtaaggggagaagccggtgaacttgaccagcggtggctggccctccagtgccacgtcggcggtggctttggttacgcggtcgagaatatcctgactgatagcggacgggtcgccggaggccttggccgtgaattcgagcgtggccatgccttcgctggccggcgtgagcttggtcaaggcggccgtattgagcaccgaattgggaatgaccatcatgtccccggagcgggtgcgcaccacggtctgtcgccaggtgatgtcatgcacggtacctgtgacgccttgaatggtcaccaggtcgccgggttggattacgcggcccagcatcaggccgaagccgccgatgatgttggcgatcgtatccttcagacccagcgagatcgccacgcctccgacgccgagggcggtgaccagggtggtcggattgatgccgaacaccggttgcagcaccatcgccgtaccggtgacccagatggtcacgcgcgtgagattcacgaaaatcgaggcgctgggaatctgcgaactatccagaaccctgcgcagcacgcggctgatcacgcggtcggccgcgaacacgacggccagcacgacggccagccagatgagtttgccggcgttcacctgaaaccagcgtgcgatgtcttgtgcatattcggtcatatgccctactgtatcgaccatttctggtgaagtcgtaaacatgcgggcccacgtcgggttttggccgttgcggtggtgccgatggtgcgataccggtggcgtgccgtcggcaccaccggcaccaccgcggcaccgcggtgcagcatcgtcgtggtgatgacgtcgccgtgacgcctagtcccgatgctcgcggcaggtttggccgaggccacgggccagtcgaatcggatcgagaatctcgtccagctgctcggcgggcaggtcggtgcgttcgccggccacctcgcgcacggtacggccggtgtgcacggcttcggcggcgatgtcggccgcatgctcatagccgatgtagtggttgagtgcggcggcgatcgacggcgaggactgggcatacgagcgtcccagaccgacgtggatctcgatgccctccacgcaattgacgcggaacgtctccatggcgcgcgtcagcaacgccatgccggtcagcagctcatgcaccatcaccgggtcgaaggcgttcagctgcaactggccctcggccacagcccagttcacagtcacgtccatgccgaagatcgtgaagcagcactggttgacgcattcggggatcaccgggttcactttggccggcatgatcgatgatccggcctggcgagccggcacgttgagatcgttgaaaccgcagcgcggcccggaattgagcagtcgcaaatcgtcggcggccttcttcaggtgcacggcaaggctcttgatggcggccgacgtggccacgtacgcgcccatatccgtcatggcggccaccggatcgggcgcggcggtgaccggcaagccggtgatctgcgccagatgcttgatggcggacttgcggaatcgcagatccgcgcaaatgccggtgccgatggcggtggcaccgaggttgagctgggccagcagcggcaccacgcgatcgaatgcagccaaatcggatttcagcagcgtggcgaacgaatgaaactcctgaccataggtcattggtacggcgtcctgcagttgcgtacggccgatcgtcacgtcattgatatgtttgtcggccagatcgtggaaggccttggcgagtttcttggtggactcggcgagcggcccgatcgcgtcgataagcgcgagtttgcaggcggccgggtaggtgtcgttcgtggactgcgactcgttgacgtcgtcgttcggatggatgtatgtgtaatcgccacgctggtggccggcgatttccagcgcacggttggcgatcacctcgttcatgttcatgttcgacgaggtgccggcaccgccctgcatcacatcgaccgggaactgatcggccagtttgccggcctcgatttctaggcaggcggcgcgaatggcctcggccttggccgggtcgatcaggcctaattcctcattggcgatggcgcaggcgcgcttgaccgtggcataggcgcgaatcagctcgggatgttggctatcggtgatgccggagaccgggaagttgccgatagcgcgctgggtgtgaatgccccagtagacgttcgccggcacctccatctggccgatgcagtcatgttccagacgggttttgttcgatgtttcgctcatgcttccatcttcctgtgtgagggctggaaacgccagcatgagaggctgattgcgccttgtgagaaacctcacgcgggggttcattcgacggaaacaatccagactcactggttttcggtcaagcggtgtacccggggaatcctgcggggccgttcgacggtgagatgggggatggcgcggcatgcgtggcggtggcctgcatgccgggggcggccgaatcctgcgcattgtgcacgaagatgcgattccagtaattaagcatgtccttttggctcatggccaggtatatgcccatggccagcacggccacatcttctttaagcaggtctttgatttcgatggcgtcgctcaattcgggccaacgttgcagcacggcgagcatgccgcccacggtgaactcgaccatgagatcggttttcaggtcaaggttcttggggtcgcgttgcaatgtgctgagcatttgcagacggcagaagtcgcgcagcgattcggtcagttcaagcgtgctgtgcgggccggccaacagggccaggcggtcgaggcgctgccgctgctccgggtcggagagcgtggcggtgacgcggtctcgccattgttcctcgggattgccatttgggtcgggggtgcggttgatcggaatcgattcgacctgatgcaggatggctgaatcggccaattcgggcaggctggagaagtgataatagaacgaattacggttcacgccagcctcacgcaccacatcggtgacggtgatcttgcggtagtcgcggtcggcgagcaattcccagaaagcgttctctaggcgttctttggcgggcagcacctcggaatcatggcgtggacgtggcatctcttcctcctgatgcaccagcgtgatatggtcacgctgtctaataacttatcgggcagtataactattatttgtggacatgtctatgagctaatcggcgatttcagttgcgtcctccgctgagggcgaagctgcggtgtcagtgtcggtgtcggtatcggcgctggccggggccgcgctatctgttcctgtcgcagttcctgctggggtttcggctgttcctttggcggtcgcagaactcggcgcggaagccggggcgggcgtcggcctgcgtttggccgtggacgccttgaacagtatcgccagggcctcaaccaaatgacgccggtctgcgggggtcagccctacatacgcgccaagcatcgccggaatcgaagcggggaagttgctcatcacctcgctgaagctggtggcgccgttggcgtgcagcacggtgaacagcgcgtccaccgcacgctcgcgctgttcgggcgtaagcgtggcgatccaatggttcagctcctcgttaaacaactgcgagctggaactcaaatccggctcggtgatgaactggtcgccatccaatagccaggtgaaggcggaatgctgcataatgccatccgaatcggaagagaccacgcggcaaggctccggggtctcgaaaatcatgcccacaatcgacgaacttggcacgattttcgtcaccttcggctggatggtgcggtaggcggggctggtcacaatctccggcgggaaaccggggccgtccagtgaatagacatgctgaatgcgcttgcgcaccttggggtcggcgttcatggccgcgtaaatcgccagattgcctcccttggaatggccgaccagaataatcggaccctcccacagtcgcgccaccgtatccagataggcgctggctgaacgttgcgccggcaccggatactggaaagccatattgaaatcttccttccatccgatgagcgaatcatcggtaccgcggaaggaaataaccaacgtgcctttgtaggtcggcttccggcgcttgtggccgtcgggcagttggaaggtggcggcggcgaattgggtttgctcgccctgattgatgtgctcgaccaccgcgcccaggcgaacgttggcgtagcgggggttctcgcctgcggcctggaacaggtcgtgggtcaggtccggattgaccactgaaaccatttgggcttcgtgcggcttgtcgtcggcatgcgttttcggcgaacgatgcagctcgcggttggcctcgtcaaggcttaccgattcaagctcgggatgccagatacccttcagccagatcagtggatgcttgggctcgaaagcgcgaatgcgtgcggcgaacgagcctgactgcgtctcatccagcatcaacgtcggacagatactggccacatcctcatagatgagcgtggagatgatcaaggcgtcgatttcgttgaacggcaagtcggcgaaggagcgcgtttcggtgtgcgcgtaatcgataatgccggtcatacgcacctcctgcttccgttgatattgcatatccccttgggccatgtggtcttgcgattgcgtgcggccgtgcggctgcgcgcagcaattaaccatatacattccattgtagggattgtacggttttggccggcgcgatcgagcaagactgcaccgacggcgaacaattcgtgggaggattcccgtcagcttgtcgaaaattgtcgggtagcgggggttgcgatgccagccagccgaccaccctccggcgttacgtgccacttcccgccggcgggaggggtaaccactcaatccttttgacgaggcggaccgctggggccgtcaaaggttcggcagatcgaagcgggccagatccacgccttcgtggtcgagcagttcggccttgatgtcgagtcggccgccgtagccgccaaatgcgcggcccgagccgactacgcggtgacagggcacgatgatagtaaccggattgcgcttcactgcgcctccgaccgcctgcgcggccatgcggccgccaccgcgtcgttcggccaattcggcggcgagttcgccgtaacttaccgtcatgccatagggaatctcggccaccagattccacacttcatgttggaatggcgtgccggcgggatgcaacggcggcacctgatccgagccggggcgttcgccgtcgaaataggcggtcagccattcgcgggtcatacggaacacatcgggttcacgatcgggttcgcggttcgagtcgagaacggcttggtggtcggtggcccaccaccagtcttcaagacagagctcggtcaggccctcgccgtccgaggccatcatcatccggccgatgggcgtttcgactgtggcccgcatcagttgtcgttgcgtcataccgccattatcgcgcgttgagggatgaagcccataccgtgcctgatttcatgaaggacgggtcgtgctgtacggtcagtattgcgtgctgggcagcgatatctgacatagtgggggttcttgggccggcatgagtgttctttccgacatcccaaccgtctaactccgtttcgaggggctgatttgggctgttccggaggtctatctccgtttcgaggggctcctcatccgggaaaccacaagtataaacggctccgggctaacgtcattacgccgtttttggcccgtgtctactcagccaccagccccttgaaacgggagtagacctccggagaaggccaaatcagccccttgaaacgcagcgacccctctgattggagtcaatcagaggggttcggcacattgctgatgcagctggtccgccgtccgccttgaggcggaacgtaaccaagattcaggcgggattactccgcaacgagcgccaggaaggcggcggccacggcggctgtcgggttcgggaattcctcgtcctggttgaagaacggcacgtcggcgtagttcaggaacttcacttcggcacggtcgccgatcagggccttggcctcttcggccagctgatcggttatcgtcatgcgttcctgatttccacggccatggccgtgccagatgtgcccatcgcttggttctacccgctgtttatgctggccatgcccatcgcctggctgctgtatacggccaccgcgagttatgtgcacgacggcacccgataatcgttggaaaaccggtgggacacgcgggggcttggctttttcctgagattggcgtatctttgtcacctgttgcccgtgaaggtaacacatgcggacatagcttagttggtaaagcgcaaccttgccaaggttgagaccgcgggttcgagtcccgttgtccgctctcggatggctggttcaggatgattgattcagcctgaggatgacccgggcggttggcgcagtggtagcgcacttccctgacacggaaggggtcacaagttcgaatcttgtatcgcccactcgatgaatcgccggcagaatgttgccggttttttcatcacaagctcgggcgattggcgcagcggctagcgcacttcgttcacaccgaaggggtcgtaggttcgattcctacatcgcccacccgatatcacgctcgtcagtctatgatggcgggcattttctatatctgccgtgccacggttccttatatggcgtccggcctcgggtggcatttggctgtgagcggtttccgattatgagtggcgtccggccgtcgtgcaatcccgctgcgcgcggtgccgtttgggctgtaatacgggtgctttgaaccggccataacttcttcctatgtcccggggcttgtgtcgtgtgccgcggcgcgcttccatagtggatatggcggtgtggaaggggagccgccatacttacttacacaaggacgtcttggtccgccagggcaacgcgcatggaaaggggtttgcgatggtgtgcaccacgctgaatttcgcggagaaatacctgctgaaaaccgaagtcaggttcgttgccggtatgtccggcggtacttccgatgctggtactgatttcgatgtcgatttcggtggcgagggcgacctcggaagcgatcatgccaccggtttcaatcgctcgctatcggccgacgattattgggctgcagccggatatgccgatgagtcattgtattgatggacgtgatgacgcggtaagggcgcgtcgataagtgcggctggtgtcgcggctgatgccgcatctggtgctcgttcggtggtcgcggctgatgttccgtacggaccgcctgcaatggttttgcatcggtggtgcgtcaaaatccggaccgtcgccgacgctgtggacgtttggcggcgttgaaaggacagataatggattgtcaacgccgctgagaacgattggcgacggtggtgggacagcggatgccccaccaccgtcgccaagagtggtacttgtgtcggtggcgtccaaaacatggcccggcaccgacatcagatactctgaacgtcggcggattcccgttctgtgtcccagcgccgacgtctgattcctgcttatgcgagctggcgtcggtaaaaaggcagaacttggttcaccggcgatgtctcagcacgtttgcgcgcgtcggatccttctggagcagcaggaaaacgagcgccgcgacgagcaggacggcgatggagagcacgccgagggaggcgttgccggtcagggaggtggtggccaccaggaaagtgccgatgattgaggcggtcttagggaagaaacaatagtgagaccggggaccccttgaaatcattggggaatcatggtggcgatgcatgcgattaacacatgttgttaacacagatgtggaatgagggggggcgtgaggctcgtggtctgcgacgcatgagtgtgaccgtgagctccccagctgatgagcgcaaaggcagagattggtgtcacgcgggacttgtctgccgaagagcggcgattgatgcagggtctgtgcgatgctctgcagcagttgctgaacaagcagtaccagcggcacatgtgggactgttcgatagcctgaaaaattttgccgcagacaatctaggcaatgtgctggcggggatttcaatctcggttcgattggtgatttgccggcggtaatcggtgagcatttcaatgccgatcagttgggtgaaatcaacaggtcgttggcgaccatttgaacgccgaccgacttgacgagctgcaggcgctggcggaggaaaacatctccgccgaccagatcagtcaggtcgctggtgcaattcaggagcagggtgccaatctggacctcggatccattgccgaacaagcaggactgcccgctgacatcatcagccagatttccggactattgggcaagtagtcgccttaagctttaacgctgacggtgttgtctcggctattgcgtgttttgcggtcgctcagcaaatcatatgggtcgtaggtaaccgattgcgagcgctgctgtacacagatgtgtacgtgggtcgaagcggattcgtggtggcaggtgagacaagctgccctcgcatggctggaaaagcttcggtctcgtggagtgcgatgttaaagctgctcaggtcaacggaatggcggaattccgccgatgcaacttgtggttgcgctcgaataaccggcgattgcaacccaaagatggtggcgggcgacatggacggcatgccatagtgagcccatcggccgaacatgacatgataaagattacgtatgaagggacattccaatgagttttcgcgctaacctgcagtacctacgtgcgcaacgcaacctgacccaggaacgattggccatgttgcttggcgtctcgcgtcaggccatttcgaaatgggaatccgaaaaggcctatcccgagatggacaagctgcttatgatctgcgacctgttcggctgcacgcttgatgatctggtacttggcgatgtgagtcggcctgccgcgtcggcttctgcggccggttcgtcgaatgttgactcctcggctgagacggcatcgcctttagccgcttcttccaaaacggcgggcataatcgctcctatcgcggagcttgcgcaggatatcactggctacgatgaacatcgccgccgattcgcgctgctgattgccggcggtgttgctgcgattgtcgccggggttggcatcggcaacctgttcgattccagcaattccattctcggagcgacgccgctcaacgattttctgacgtttctgtgcgtctgtgtgggtgtgattgcggggctggcgatgctgattccaggaggtctgtcgcgtattgacttcaaacggcgtcacccatacgtagaagatttctacaccggggaggaccgcagccgagaattgcggctgctggtaatcggcatcgtcggtggcatctcggctattctgattggcattgcggtgacggtgtatgccgatgacatgctcggcgtctccgatggctggcccaacgcaatttttctgctgctctgtgcgcccggtgttttcgggtttgtctactgcggcatgagatacagtctgctcaatatcaacgcatacaacaaagcggccgaggacgaccgcaaggagcatgcgggcgagcaggatttctacgccaaactgaccggcgcggtgtgcggcatcattatgctgatagccacggcgactggcttgtgcctgctgtttttgaaccctgcggcattgcgcggcgattggtcggccgtcgggtcgagcgccgcggacggggcgatgttctggctgccgtggccgattggcggtgtgctgtgcggcgttgcggccgttgccattcagctgatcaaggattatcgcgagcgtaagtgatcaagtggcgatggtccattgctattagggcccgttgcaggggttgcgagatgtcgcccgcggcgcagagttgccgagggccggcaaatcactcccgcgtcgggtccttttgcaggagcaggaagacgagcgccacgacgagcaggacggcgatggagagcacgccgaacgaggcgttgccggtcagggacgtggtggtggccaccaggaaggtgccgatgattgaggcggtcttgccgaagatatcgtagaagccgtagtactcgttggcgtggtccttggggatgattttgccgtagtatgagcgggagagcgcctgaatgccgccttggaacatgccgaccagaatcgccagaatccagaactccacggccgatttcatgaagaacgcggcgaagaacacgatgcacatgtatgccacgaccgccgccgtgatcatcgccttgcagccgaatcgcgccgccagacggccgtagagaatcgcgcaggggaaggccacgaactgcgtgacgagcagtgccaccaccagctgggtggagtcgatgccaagctcggcaccgtaggaggtactcatcgaaatcaccgtgttcacggcatcgatgtagaagaagaacgcgatcatgaacatccacaacggcttgttcttcacgatcttgccgaacgtgcccgccagttcgctgaacgtgccgcgcatggccgagcccagctggtcacgggtggcgcgatagtgcacttggcggtagctggtaagcagcgggatggtgaacgccacccaccagatggcggtgatgatgaatgaggcgcgcgtgcaagccaccgtggaccagtcgaagagcgacgggccgccgaagatcagcgcgatgcagaagatgaacggcacggtggagccgatgtagccccagccgtagccgtgcgaggagaccttgtccatgcgctcgttcgaggtggtgtcgatgagcatcgaatcatagaacgtcagcgagccgttaaggccgatggtcgccagaatgtagacgaccaggaacggcagccaggtcaggggcagggccattgcgcagcaggtgaccacgccggtgccgaagaagccaaggaagaacttgattttcatgccttgcacgtcggcgatggagccgagcaacggcatgagcagcgcgatgaccaaggaggcaatggtttgcgcgtagccccaggcggacacgatgttgccgtccgccggcatcagcgatttggcgtaaatggggatgacggcggtggacagcagcacgaatgccgagttgccgacgtcgtagatgatccacttcttctcgcgggcggtcagtttggcgctttgcggcaccggttcgtggacatttgcgggatcagtcatatgcactcctcgacagtattcaactcaatctatcgtagaagcgcggactagggtagaaaaccgccaaagttgaacggcgggtgaataatgccgggcccctttcttaggggagccagagcaaaaaaatagctcccctcgctgaggggagctggccgcgaagcggactgaagggagccgatcgtggattcccccagatgaggaaatccactcaatcgtccggaaactattcaccgatcagcgcgatggcctcgtcataatcggggcattgcggcacgccgttgaggctgcgctggatggcgatggatgccgccgcgttggcgatctttaccgattcggccagactatggccctttgccagcatcgcgcacatcacgccggtgtggcaaccgcccgccgaacgggtgtgtacggccttggtcgggtatccctcgatatgaatcgtctcgccacctggctcacgaatccaagcgccgcgggcgccgacacgcaccaccagcggcgcgcgcagtgtagtgcccaagccgtcacacaactggtgcatgaagtcgtcgagtccaccgccgatggtgaccttgctgtcgtcgatcggcgcgcccaggcgctcggccagcgtcatggcctcctgacggttgcaggaccagaccgggcgtgcgagcaccaggtcctcgagcatatggtcattgaccagacgcaacgtattggtgggattgatcaccagcgtgtagtcgcgtgcagccgggtcggtaccggccttgagtaggaatccgtccacgccggtggccgtgtggtccatcagtgtgttgccgctgatgtgcaccacgtctttgggctgcggctccagcgtgttgaacgtgtccgcgtcgccatgagcctcggcgccataggaagcgatgaacgtcttcttcggcgcgccggagctcagcaccacgcggaaaccggaatcctcatcaagacgatcctggccgatatgcgtaatgccgttgtcctggaatgactggcggatgaaatgcgcccacaggccgttgcccagaatgccggcgtgctcggtcggcacgcccatgcggctggccgcctgcagtacgcgatagctgccgccaatggagggcttcggatgatcggccacggcgaatccgccctgtgccggcacctcgtccacattgagcatgatgtccacccagacttgacccagtgaaatcacgctgggctcgtgagtgccgatacctcgcctgagattcaacatgacagcctccttcgtcgtaagttgcacgaggaccccttcgtcccttgccgtctcttataccgagattatatgagagtttgttggatgcggaataggcagtccggcgtgttttatcgggtaaacgctacgatttgcagcgtaattcgccgctggcgaactgctggcgaactacttgcggaccgctggcgaaccaatgccgaaccgctcgcgaaccgctgatggcccactcgcaagttacgctcgaaccgcgcgtgaaccgccgaagttcgcccatgatacacgcaagagttgcggttgtcggtattgggctatatatttgtgaagttgtgtgttcggcatgtcgggtgaaaccggcggtcgaatgcgtgaaagacttgacacatcaaggttaagggagtccatcatggcagctcgttgcgcagtgtgcggcaagggaccgcagaccggtttcaccgtttcccattcgcaccgtcgtaccaagcgtagcttccgcccgaacctgcagtctgtacgcaccacgattgatggcgagaacactcgtctgcgcgtgtgcgtcaagtgcctcaaggccggcaaggttcagcgcgtggccgcgtgaatcgcgtactaacgtggagcaaaacccgtttgagcttcggctcagcgggttttgttgtttctgcggcctaaagaggccgtgcgaatagaataggccaatatgagcatcactatggacaccactctcgcttcgctggtcaccaacaagcgtcgcgtgtccgcgctcaaatcgctgggaatcgtcactgtcggcgacgccctgacctactatcccttccgcgtcaccgaaccggtgccgcttcgcgccatccgcgaggccgcacccggccagcagatggcatttgccgccgtgatacgagacatgcgcgtggtgccgatgaacgctcgccgcggctaccgactcgaggcgacggttgacgacgccgactttgcccgttcgcgtcgcgtacccggcagcacggcccggctcacgttcttttcgtatcgtaaatcgtatgtggattgggtcagcatgcggctgcgcgccggcacgtctgtggtggtctccggtatgcccagcgaatacatggggcagctgcaattcacgcaccccgaaatcctcactgtcgcgcccgggtcggccggagcaggagcggggcttgagggttacgctcggggtgcggcatccggcaatggtgcgtttgcgggaagtaccgatccgtatgccagtgtgcagtccgcgtatccgccggccgcggctgcctcttccggggccgcgctgaaatacgacgccgataccgtgcaagaggcgcttacccgcgtctgccggccccgcccggtatatcacgccagttcgcgtatctcgtccgaacatattcatgagacgattctgggattgctgtggatgatgggggcccgcacgtcatccacgcctgacgggcaactcgctggcgctgggtcagccggcattgtggctcccacgaccgacaccatcgccgtccaaaacggggaagagaattccggcacgaccgccgaatccggtgctgaggcgctctcccaatccatcccagatgtgctgcccgaatcggtgcgcaaggccaagaacctcatgcatcgggctgaggcgttcctggccattcatgatccggcctccacggcccggttcaaggaagccatcgaaaccctgcgctatgaggaggctttcgtttcgcagacctcgctgcttaaagccaggtcgcacgcccataaatccgcggctcactcttgcccgttggtaaccgacagtctgcgcgatcagttcatcgcatccctgccgttctccctcactgcagggcagcagcaggttattcatgatattgccgccgatttggctcatgactggccaatgcagcgtctgctgcaaggcgaggtgggctccggcaaaaccgtagtggcgctcgctgccatgctccaagccgtagacgccggctatcaggccgtgcttgttgccccgactcaggtgctggccgagcagcatgccgaaaccattggccggatggtggagcaactcaagccagcgattccagtcacgttgttgacgggcggcatgaagcttgctgcgcgacgtaaagcacttgctgcggcgtccagtggcgagccgggcattatcgtggccacgcacgcggcgttttccaagaccttccaagccccgcacttggccttggtggtaatcgacgagcagcaccggttcggtgtggaacagcgcgaaagtctcaacgccaaaaccgatgacggcaccacgccgcatctattggtgatgaccgccacgcccatcccgcgcaccgccgccatgacttggtttggcgatctcgatatttcctggctcaccgaattgcctggcggccgcaaaccgattcgcaccgtggtggtcaatgaggccgacgccgccaccatgggccgtatgttcgcgcacattcgcgcgcgagtcgacgcgggggagcgggcctatatcgtgtgcccgcgcattgatgcggatgatgaggggaacgaaggcggttccggcgtttcggcagcagccggttctgcccgcggacgcgccgcagcatctggttccagtgcccgcacagctgcgggcggccgtgcaacgcgcgcggcggccgacgccatcggcatcgacgacccctacgaaaccttcgacgaaaacggcgaaaccgtggctcgcccgccattgcatgcggtggccgaaatcgccgaccggttgcagaaactcccgcaattccaaggcattcggtttgcgactctgaccggccgcgacaaggatgacgtcaaaacccaggtcatggccgattttgccggcggcgagactccgattctggtgtccaccacggtgatcgaagtcggtgtggatgtgaaacaggccagctgcatcgtgatctttgatgccgaccgatacggcctctctcagttgcatcagctgcgcggccgcgtggggcgtggcggcaccaactcgtgggcgttccttatttcccgtgcggaacccggctccccggccgagcaacggctcgaagtgattcaccactcgctcgacggtgccgaaatcgcccaagccgacttggaattccgcggtgccggcgatgtgctcggcgacgcccaatccggcggcaagtccagcctgaagctcctgcgcgtggtcaaggacgccgacatgatcgccgacgcccgcacccgtgccgagcagcttctggctgccgaccccgaactggcagacgaggtccaactcgccggtgccgtcctcgacttcacccgaggcaacgaaaccttcctgacctccagctgaggctagggctgcgcccccgtaatcgcacgatattgtattttcatctggtaaacagaagtaaatgcttgtgccagagacggattgcatatgcatgggtgcttcgtggaagctgattctgtgttccgttgctgagttacggacgtgctggcgatacgcagctttcgcgttcgacaagctgcgtgggaaaaatgaagtaattctgttccacctttccttcccgcgctttgagaatcaggttgatgcattgtctggcgatgaggtcgaatggctgcctgatggtcgtcagggatggacacatgcttgccgcaggatagacatcgtcgaaaccgatgatcgataattgttcgggcagactgatgccgtgctgtcgggcggcgcgatagacgttgatcgcgccgagatcgttgaacgcgaagatggcggtcggtcggtcctgctccctcatttccaggagatcgcatgccgccttgtatgccttgtcagacacgtagtcgccaaccttgatgagatgtggatccgcgctgatgccgtttttctgcagcgccgccatgtatccgctcagtcgcgcctgcgaggactgtgaattagtagggccagtgatgacggcgattcgtcgatgccccaatgatatgaaatattgcgtggcgagcattcccccggtccagttatcaatgcccactcccaatgcgtcagcggagacctggccgaccggatcgacaatcacatatgggatgttcctcgtctgcagcagcgattcctcggccgatgagatattcgataagagaagtatgacgcctagtgggttgcgttcgatggcgttacggaggcagctgctggcctcgtttcttgttgcgtattctccggaatccggtccggcgcagcttacggtgatgccgaggccaaaatctctggcgtatgaagctgtctccttgaccatttccacggtgccgttgttggtcatttcgctgacgaccagttcgattgaccgtatggtttttgttgtgggaagttttttgcggaatccagcttcttcgaggagcagttccaccctatcgcgggtctcgtcggagactccatcacggccgttgatgaccttggacacggtagcgggggatactcccgccgcttgggcgatgtcggagaccttcggtctgtttgttgttttgattgtggccatgactcttctcttttcgtatgcgacgctgcaaaaaaagcgttatatatagagtagcgaaattttcgctactctaaaacagcttttttatcggcgtattgctgtctatatagcggaaatgggtgttgtagacatggattggctgctgtttcttcgatgagtacgatttgtgcatatcgttgcaataaagcccttttaaggcgaaaaaacaagataaagaaaatttcgccacgcgcaacgaagttttatttgctcttttttgcagaaccttgtatattgaacgtaccgatgaatgaaacggcaatggcaacgatgttgttggcgggctcattcagacgggttaagaagaaagagaaaaactatgacaaatgcaacggcgaaaccggatacttccgggatgcgcaagccgaagcgcgagtacataggcatgttatattgtcttccatacgtggtggtcttcctattcggcatgatcatcccgatgttctacgcgctttatctcagcttcttcaagcagtcccttcttggcggcaccacattcgcaggcttcgacaacttcatagctgcatttaaggatgaagcgctgtggagcggtttcagaagagtgctgatttatgcggcgattcagattcctctcaatttgatcctttcccttgtggcggcgctcattctggattcccagagaatccgccatatcgcagtgccgcgaatcctgctgttcctgccttatgccgtcccaggcgtcatcgcagcactgatgtggggatatatctacggcgacaagtatggccttgtcggccagattgcgtctatgatcggggccgctgcgccgaacatgctttctgaaaagctcatgctgttcgccatcgcaaacatctgcacttggtgttctcttggctacaacatgctgatttattattctgcactgatcggtattccgaacgagctgtacgaatccgctcgtatcgatggcgcatccgagctgcgtatcgcatggtcggtaaagattccgcagattaagggatccattatgatgaccgtgctcttctcggtgatcggcacgcttcagttgttcaacgaaccgagcatcttgatgaattccgcgccgaatgtgatcaccagtaactacacgccgaatctctacgcatataaccttgcgttcaacggccagaacctcaactatgctgcagcggtctccttggtgattggtgtcatcgttatgggtcttgtcgcagtcgtgaaggtcattggcaataagtgggagaacaagtgatgagtgaagcaatcgcaaaaccacgttccaagtcgctgcagcgcagagacgctaagctggcgctcaaggcgagccaacgctataagcgtatgcagcagcgtgaggcagctccaaagctgaccggcaagcagcgtgtgcttaactggctgctgcacattatcatgggcctgatggtcatctactgtctcgtgccgttgctgtgggtgttcttctctgcgacaaagaccaacgagggcatgtttagctcctttggtctgtggttcgatgacaagaatgtgttctggcagaatgttcaggaaactcttgcatatcagcatggtacatacgcacggtggttgcttaacacagtgatgtatgcagttgtcgccggatttggtgccactatcatcgccacactcgcaggctacgccattgccacaatgcggttccccggacgtaatagtctgttggcgatcaccttggcattcatgtccattccggccacggtcatctctgtcccgctgttcctcatgtactcgaagattggtctggttggtaccccatgggcagtgattattccacagctggccacgccgttcggactgtacctgatgattatttatgcgcagacatcggtgcctacttctctccttgaagcggctaagctcgatggtgcaaattcgtggaccatcttctggaaggttgccttcccgctgctgtctccaggtttcgtcaccgtactgctgttcacgctggtcggtgtctggaacaactacttcctgccgctgatcatgctctcggacaccaacgactacccgatgacggtcggtttgaacatgtggttgaagatgggtgccgaaggtaccgcggacggtcagattccgaacaactacattgtcaccggatgcctcattgcagttgccccgttgatcatcgcattcatgttcctgcagaagtactggcagtctggcctttcggctggtgcagtcaagcagtgaatcctcgccgcacggttattggcgatcacccattcgttgctctaatgaccgtgcggcatccacatccatttgaagaacaacaataagacagtaattcatgacacacaaaggagtaatcatgaagaagatgaccaaaatcgtcagtgcgctggcggcgcttactatggtagccagcgttgcggcttgtggctcaagtactggtgccaaggacactaaaactgcagtcactgtagaagacattaacaacgctctcaccgatacttccaaaaaaatcgagctgaacgtatggggattctccgggaagcagatggcagggccgattgaagctttccagaagaagtacccgcacatcaaaattaaattcaccaacaccggcgcggcaagcgaccatttcaccaagttccagaatgtcgttgctgccaataaagatgttccggatgtcgtgcagatgagtgctgaccgattcgaacagtacgctatttctggagctctgctgaatttcgccaacgatgatatcgaaaaggcgtggagcaagctttatgcaaagaccgcttggagccaggtgcattatgctggtggcctgtggggcgtgccgactgacgccactcctttggccatgtatgtgcgtaaggacattctcgacgagcataatctcaaggtgccaaccacttggcaggaattctatgaagaaggcgtcaaacttcacaaggaagatcccagcaagtacatgggcgtcctcatcaataacgatatctcctgctttacggatttgctgcgttcggctggtgcgcgcccttggaaggtcaattctgtcgatgacatcagcttgagcatgacttctggcactaccaaggagttcattgaattcctgcaaaagtgccttcaggatggggtcatggaggccgctccaggctggaccgatgcgttcaaccgcgccacgaatgagggcacctatgccacttatatttctcagaactggcaaggcaactcctacaagggacagaatccatctcttaagggtctgattcaggtaacgctgccacctgcattcggtgattctgccgatgatttcaagtcttcttccgtcggctccatgatgagtgtttccgcggcatgccctaaggacaagcaggctgcagcccttgccttcatcaactggcttgattccgacaaggaagcaattcagtcttggcaggataacaaccacggcaactacttcatggcagcttccgcttaccaagatagcgaagacatccgcaacatgaaggaaacagatggatactttgtcaatactgacgtgaactccgtctacttcgagtccatggacaaggtcaatactgattgggagtatcttccgttcatgtctcaggttggagtcgtatataaggatgtcatcactcctgaaatgaaggttggcggtgacatggtcggcgctatggccaaggctcagcagaagctcaagacctacgcaaaggacaacggcttcaaggtcaccaccgacgccgactgacatccggcccgccactgctagggagggcggccgaatggccgtcctccctttttgagattaaccattttccaaagaaggaagcgcatcgtgagcgttattaccaaagtcaccacctatgatttccgattcccgacgtcggccaccttctccggctccgacgccatgaaccctgatccggattattcctccgcctatgttgtcatcagcacggatgccggtgattccggcaacggattcgtcttcaccatcggccgcggcaatgatgtcgtcgtccgagccatcgactccatgtccgaaacccttatcggacgtaacgtcgaggaactgctcgacaacatgcgtctcgcgtgggatctgttcgtgcgcgattcgcagctgcgctggctcggccctgagaagggcgtcgagcatatggccattggcgccgtgctttcggctttgtgggacctcaaagccaagcgcgccggcaagccgctctggctgctcctttccgagatggagcccgaagagctcgttgcgactctcgacttccgctacctgaccgatgccctcactccgcaggaagccatcgatatcctgcgcgccgcccaggaaggcaaggcggagcgtatcgcccacctcaaggaagtcggttatccgggatattcgaccgccgccggatggcttggctattccgacgagaagatggtccgcctggccaagcaggagaccgaggtcatgggcttcaagcagatcaagctcaaggtcggccagaacctcgaggatgacctgcgcaggctcaagctcgcccgtgaagcggtcggcccggacatcgccatcgccgtcgacgccaaccaggtctgggatgtgccgcaggccatcgaatggatcggcaaattcaatgactacgatctcgcgtgggttgaggaaccgacctgcccggatgacgtgcttggacatgccgcaatccagaaggccatcgatccgattccggtggccaccggcgaacagatgcagaaccgagtcatgtacaagcagtacctgcaggctggcagcttcaaggtcatgcagattgacgcgacccgagtcgccggtccccaggagatcgtcctcgaatacctgctcgccaagaagttcggcgtcaaggtctgccctcacgcgggcggcgtcggcctgtgcgaagccgtcagccagctcgcgatgttcgactatgtgtccgtctccggcgagatggaggaccgcgtcgtcgaatacgtggacaaccagcatgaatacttcgtgcatccgaccgtcatcaagaacggacgatacgtcgctccgctcactccgggcaacggcacggagatgaagatcgacgaatgcatgaagtacctgcacaaggactgaccggtcgggaggacctgagatggacctgcatcttaaagacaaggtgatcattgtcaccggaggcttcaaaggcatcggcaagggcataacgctgcgactggccgaagaaggcgccattcctgtggtgctgaaccgtgatgacggtgccggcgacgaattccgacaggacattgaacggatcaccgactcgtatgacacgtatctgatcgacctgaacaacaccgacgacatcgcccccatcgtcaagtcggtcatggagaagcacggccatatcgatggcgtggtcaacaacgccggaaggaacgacaatctcgcgctcgagaccacgtcgtggcgtcagttcgaggagtcgattcacggcaacctgacccactactacgagctggtccatcagtgcgtgccggcgctcaaggccagcaagggctcggtggtcaatatcggttccaagaccgcattgaccggtcagggcaagaccagcgcctacgccgccgcgaagggcgcgattctgggactgacccgcgaatgggccgccgccctcgccccggacgaggtccgggtcaatgccgtcgttgtggccgaggcatggacaccgctgtacgcgcaatggatcaagacgttcggcgatgagcaggcgcagcgcgcgcagcttgagaagatcaccagcaagatcccgctcggccaccgcatgaccgagacgtcggagatcgccgacaccgtggcgttcctgctgtccgacaggtcgtcgcacaccaccggacaatgggtcttccccgacggcggatacgtccacctcgatcgggcactcggctaggagataccgcacgggggatcatcggttcgcgttcgcgcgtccggatcccctgttttcgattcatcgctccaacaccgctcggcccgcggacatattcgccaccgcacgcggaacgcctaccatatcgtcgaaaggaaaaaatcatgacttgcaacgcccaattcgaaggcgtgttctgcccttccatcaccatcacgaacgcggatgggaccattgactacgataattggggcaagcacctcgatcatctcatcgacgcaggcatcgacggtgtgttgctgttcggcagtatcggagaattctacgccatcgacgtcaagacgaaggcagaagcggtgcgtttcgccgtctcgaaagtcgctggacgcatgaaggtgctcgttggcgtgggagacaccaacttggacaatgtgagaacattggcggcggaaagcgaaacagccggagccgatgcattggttgcagtatccccgtactatttcggaccatcaccggattgcgcgaagcgctacttctctgcggtggccaaggcgacgacgctgccggtcattctttacaacttcccagccaggacgggcaacgacctcacgcccgaactggtggcggacctcgcagcggagaaccagaacatcatcggcatcaaagacaccgtcgacaccatcagccacaccaggaaggtcatcgctgccgttcgtaaggtgaatccatcgttcagcgtgctgtccggattcgacgagtactacaccgtcaaccgaatcagcggcggcaatggcgtgctgtgcggattgaccaatgtggagccggagacattcgtcagcctgcatcgtgcatggcagtccggtgactatgccacggccatcaagtcggctgagcgcatttcctatctgatgcgcctgtacgacactgccgacctgttcatcagcgccatcaagggcgcggtcaaggcgaagggactgccaatcgacacgtccatccatgaacccgccgtgcagctgaccgatgaacagtaccgcaatatccagagcattctaggcaagtaacaatcaaataagtctgaagacaagcaggagcagctatgctgaaagggataccgtcgatcatacagcccgatttattgaagattctcagtgaaatgggccatggcgatactatagttctcgcggacgcccactttcccgctgaatcattggggattcattcccatgtgatcagatatgacggtcagcccatcgaaccacttctcgatgcagtgatgcagcttataccgttggatcaatatacggagcatccggtgtttttgatggataaggttcctggagacgccgtcgacaccccgatatgggatcggtatcgtcaggtaatcgccaagcatgagcctgacaggcaaacggctattggcatgctggaacggttcgccttttatgatgaggccgaaaaagcctactgcatcgttgcaacaggtgagcagtcacagtatgcgaacatcatcatcagaaaaggcgtcattcgctaataaccgaataggagcaatataatgagcaatcctgcagatgcgggcatcaacctgaactatctcgcaaacgtgcgcccatcgtcgcgccagcttgcctggcagcgcatggaaatgtatgccttcatacacttcggcatgaataccatgacagacagggaatggggtcttgggcatgaggatccggcgctgttcgatccacagaatgtagatgtggaacagtggatggatgcgctggtggctggtggaatgactggtgtcatcttgacatgcaagcatcatgatggattctgcctgtggccatcgcgttacacgcagcataccgttgccgcctcgccatggaggggcgggaaaggggatctcgttcgtgaggtcagtgagtcagccagacgtcatggactgaagttcggcgtatacctgtctccgtgggatcgaaccgaagattcctatggcaaaggcaaggcatatgacgatttctacgttggacaattgactgagttgctcacccagtacggaccgattttctctgtatggctggatggtgccaatggtgagggcaagaacggcaagactcagtattacgactgggatcgttactacaacgtcattcgttcgcttcaacccaatgcggtgatatccgtatgcggtcccgacgttcgttgggctggaaatgaagccggacatgtgcgtgacaacgaatggagcgtcgtgccccgacgactgcgctcggcggagctgactatggaaaattcacagcaggaggacgatgcgtcctttgcctctacggttcgctctcaagatgacgaccttggaagccgtgaggcggtttccggatacggggatgacgtctgttggtatccggctgaggtcgatacctccattcgccctggatggttctaccacaagtatgaagacgacaaggtcatgaacgcagatcagctttttgacctctggctttccgcagtcggcggcaattcgtcgcttctgctcaatattcctccttccccagaaggactgttcgcagaaccggatgtggagtcactcaaggggttgggaagccgtatcaatgaattccgcaaagcattggcttcggcttgttgcgaagtcaagaccagtagcgcgaacgaagctgcaatgcgacttattgatgggaatcaagacacgtattggtctcctagcaccgatgacgtggcccctgctgtcacgctcactttcccgcaactgacgacgatcaatgccgttgtggtcgaagaggccatagagtgtgggcagcgcatcgaacatatgcgcgtcactggcgtgctatctgacggcactgagtgtgtactcggacagtccggcacagtgggataccgcaggatactccgtttcgacgatgtcgaagtatcttcggttacccttcatgtggatgattcaaggctcacgccaatgatcagccgtgcggctgcggtgcggatataaggcgggtatatcaccatgaaactcacattcgatggaatctcttcgtgctgggaagaaggcatcccgctcggcaacggacgcatgggagcggtcctgtgttccgaaccggaaaccgacgtgctgtatctcaacgatgacaccctttggtctggatatccacacgcggaaacctcaccagtgacgccggaaattgtggccaaggcacgtcaggcggcatccggcgacgattacaccgccgccacgcgaatcatcaaggaagccacactgcaggagaaggacgaacagatttacgagccgttcggaacggcccgtattcagtactcgacccctgcagacggccgtgagagcatgaaacgccagctggatcttgcaagggcgctcgccggtgaaacattccagatgggtgatgccaacgttcatgtcgacgcatggtgcagcgagcccgacgacctgttggtctacagaatgtcatcggatgcgccgattgatgtgaacgtcagtgtctccggcactttcctcaagcaatcacgcgcctcgttggaagcggtatccgacggccatcgggccaccctcatcgtcatgggccggatgcctggactcaacatcgggctcctgccttacccttccgaacatccttgggaagatgaccaggacggaactggaatggcgtacgccggtgcattctcccttaccgtcacaggtggcggcatcaatgtgggggacaacagtctgcaatgctcgaacatcaccggattatcgctccgcttccgcagtatgagcggattcaagggaagcgaccagcagccggaacgaagcatgacggttatcgccgaccatttggagaaaaccattgacgagtggtcgactgacctgcagaccatgctcgaccgccatatcgcggactaccgcagatatttcgacagggtggccatccatctcggttcagcccatgatgacgatacggaactaccgttctcggcgatccttcgctcggatgagaaaaaggaaccgcatcgtctggagatgctggcggaggcgatgttcgatttcggccgatatctgcttatctcctcatccaggccacacacccaacctgcgaatctgcaggggatttggaaccataaggatttcccgaactggtacagcgcctacacgacgaacatcaacgtcgagatgaactattggatgaccggcccctgcgcgctcaaggagctcatcgagccgctcgtctccatgaatgaggagctgctggcaccggggcacgatgccgctgacaagattctcggctgccgaggatcggctgtcttccataatgtcgatctctggcgtagggctcttccagcaaacggcgatccgatgtggtcgttctggccgttcggccaggcatggatgtgccggaacctgttcgatgaatatctgttcaaccaggatgcatcgtacctgtcccgcatctggccaatcatgcgggacaacgcgcgattctgcatggatttcctatcggagacaaagcatgggctggccccgtcccctgcaacatcaccggagaactgtttcctggtgaatggagaaccggtatccgttgcgcaaagcagtgagaatgccacggccatcgtgcgtaatctgcttgatgatttgattcaggcttctcacgatttggaaaaccttgacgaagaggacagcgctctggtccgtgaagcggaatccgtccgttcccaactggctgaaacgcgattgggagctgatggaagagtccttgaatggaacgacgaattcatcgaatccgatccacagcaccgccatctgtcccacctttacgaactgcatcctggtgcaggcatcacgtctaagactccgcgtctggaggaagccgcgagaaaatccctcgaagtgcgtggcgatgatggttccggttggagcatcgtatggcgcatgatcatgtgggctcgtctgcgtgatgcggaacacgccaaacgaatcataggcatgttcctacggccggtggatgcgaacgctgaaaccaatctgctgggcggaggagtgtacgacagcggattatgcgcccacccgccgttccagatcgacgggaaccttggattcccggcggccttgtcggagatgcttgtccaaagccacgatggctggattcgcgttcttccggccctgccggaggattggcatgagggaagcttccatgcgctccgcgcaagaggtggaatccaagtggatgcgacatggacggatcagacagtggaatatacgttgcgctgttcgaagcctacggagattacgctgaacgttctggggactgatatgggacgtgtcgcattgtctccggataagccattcaagggaaccatccggcgttaacgtattgcgttatatccgttactaaatgttgcggcccgtctttcctaatagaggaggacggtccgcaatctttttttgatgggaaaggagattccgccattttccacgattggtatgcgcagatgaacctgtacagtgaaagctatgcgtgtaatttctggacgattcaagggtgtggcgcttgctacgccgaaaacgggtacccggcctaccacggatcgcaccaaagaggcgattttctcgcacctcgactcatggggagtgctggatgacgcccgtgtactggacctgttcgccggtactggtgcgttgggcatcgaagcgctgagccgtggcgcgcgagaactcgtggccgtggaaagttcccggcctgcggcggcgctgattaccaagaccttgtcgcagttacagaagaatcgttcgtgggatgcctcgctcaaggcccgtgtgttcaccaaaaaggccgagcaagtggctggcggctttggtgaatcctttgacgtgatattcattgatccgccctacgcctatgagaccgctgaatgcaatcagttgttggccaatctggcggtgggcagcgccaccaacgagaacaccgtgattatgctcgaacgctcggtacgctccgacacccccaccgcccccgaaggctggcaaatcactgaaagccgcaactacggcgaaaccgccgtcttctacatcgagcccgcggatgacgactcggatatagagcgttccgacgattccgccgcgtagtgaatctcccaccgtgtggtgaattaatcggcgagccggcgcggatgggtggcggagacctcccagcccaaggccatcagggtcttgcggtcggccttatccagcgccttgcaatccagtgccgcgataaggtctggccggatctcggcggtgcgggccagcgcttcgtcgcggcgaaaacggtccaccttgccgtggtcgccggacaacagcacgtccggcaccgcaataccacgccacacggccggcttggtgtactggcgatgttcaagcagtgcgtcctcgccggtgtaggattcctcgacaatcgaatctgggttgcccatgaatccgggcatcaggcgggtgatggcctcaagcatcaccgacaccgccacttcgccaccgttcagcacatagtcgccgatcgaatattcgcgtacgtcgacgccctgggagcggtagtagtccgggatgcgcgcatcgtagccctcataccggccgcagccgaacagcagatggtcggcatggctgagctcggtggcgtcgcgttgggtaaacaacggggccgatgggttcgggaagatgagcaccggtgtgccggatagggcggaggattcagacggccgcgagaatcccagcagttcgtccaggcattcgctccacacttcgggcttcatcaccatgccggcaccgccgccgactggcgtgtcatccaccgaatgatgcacatcgtgggtccagtcgcgcaggttgtgcgctttgatctccaacaatcccttggcctgggctttgcccatcaggctgaggttcatcacctcaaagtattcggggaacacgctcacgatatcgatcttcatgttatccagcctaacggtagccccgcccgcattacacggccaccactacactattgcggtgatgaatacgacgatgaacctccccacccgcaaaaagcccgaagtgttgtccccggccggcaacctgaggggcctgaaaaccgcggtcgattatggtgccgacgccgtctactgcggcggcaaagccttcggcatgcgatcggcccccaaaaacctaagtcttgaggactttgaggaaggctcgcgctacgcccatgaacgcggcgcccgcgtgtacgtgacctgcaacgtgctgccgcgcaacaacgagatcgaagccatgcgcgagtacgtcggccagctcaaggacaccggcgtggacgcgctgatcgtctctgacatcggcgtgatgatgatggcccgccaagtggctccgaacctggaattgcatgtctccacgcaggccggcgtcaccaattaccaagctgcgaacgccttctatgagcttggcgctcgccgtgtggtgttggcccgcgagatggacttgcaggccgtgcgtgatattcgcgccaacattcccggtgacctcgacatcgaatgcttcgtgcatggcgcgatgtgcatggcgttctccggccgttgcctgttctccaactatctgaccgggcgtgatggcaatcatggcgaatgcgcgcagccatgccgctggaagtattcgatcgtggaagagaagcgccccggccagtacttcccgatcgagcagaccgagaacggcgcctatctgttcaattcgcaggacatgaatatgctggggcacttggatgatttgattgactccggtgccaccagcctcaaaatcgaaggccgcgcgaaaagcgcctactatatcgccgccatgaccaacgcctacaaaaccgcggttaatgaatacatgattcaacgcggttttgaagacgctgatggcaatgttctgaagcctttccgtgaccgtgtgattcgcccgggcgaccccgattttggccaaggaaccgaagatcaagtgatgagcaatgccgatgccgcgttcgccggtgtggccgatgagggatatgaccgtggctctgatactgcggttgccgattcggtcaccggctcggttgccgcagaacgtgaccgcgtgacggttgctgatgccgccgactcaactgcctctggtacgtcggccggcaccgccgtcgaacccgacggcatgagctcccacgcccgctccacgcgccgcaagtccaacaccgcggtcgaacagatcgagaccgattggaagcatgcggccgttcgcccggccccgcacgtcgaactgcccgaatggctgctcgaggaaaccgacaaggtggcccaccgcgactactccaccggcttctattacccggagcacaaggtcacacagaacaccgaccgctccgcctacttccgctcatggctggtagtgggcgaagtgctgagctggagcgcggacgaaggcggacgtgtcacgctgatgagccgtaacaagatcgagcccggtcaacaggttgaattcctgctgcctggcgagagaccattggtctttaccgtgccggaaaccggcctgcgcgatgccgatggcgcgccagtacccgccatcaataatccggcgcacgtgttctcgatgccctgcccgcaccaggtgcccatcaacgccgccatccgctcgcgcaccaaaaagcccaccctcaaagccgaataacctaccactccgcccccgctgactgggggtggtcatgggaatcatgaacaccgcccgcacccaagaaagaatgccttatgcctgaatacagcgaagaaatcctcgattccaacagcatcagctctaccgataaagccggtcgccctattccggtgaccatccccatcgcactggcccccggcatcaaggtggtgtacaccacgcgactgggcggcctgagcgccggcgattacggcaacctgaacctcggcggcaagtccggcgacgaacctgaggccgtactgtcgaaccgcatcgcactcgccgaagcggtgcaagcccgcctatcgctggtctcccaagtacattccggcgtggctgtggacgtggacgactcgttcgtcatcaacacccccttcggcttcgacgtgtccggcacacatggtgagactgacactccgcacgtcatcgaggcggacggccaggtcaccgcacaatccggcatcgccctaggcatgttcgcggccgactgcctgccggtgctgctgggcgacccggtcaccggcatcatcggtgcggcccactgcggccgtcgtggtctggagcgtggtgtgatcggcgccacggtagacctgatgaagagcaagggtgccgatccggcgaacatcgtggccacactcggcccgcgcatctgcggcgactgctatgaagtgggcgacgagatcgccgaccagttcatcaagcgcttcccgctgaccaagacgaagacccgtttcggtggtgccggcatcgacatcgccgaagccgcgatgattgacctcgccttcgccggcgtacaccaggtggtcgattcgatgccgcgcgtgcacgccgccacccagtaccttgaggaagacccggaactctccgaactgtgccgcacggacggcgaaggcccggccgagctcgcggagcgcatcgacaacatcagccacagcatgtgcacgctcgaaaacccactgtggtactcgcaccgccgcgccgcgctcgccaacaaaacacacgaaggccgcctcctcgccctcatcgtgcgtgactaaacggagaatgcgggcacattccgtggagaagatgtgatgcagttcacggacggccagccctcaccctacggtggtgcctatgactgagagagatttcgatacccccgtcgagacgcctaccgtccagccggcccccgctcggggcgccaaaccggcacaaaccgtgccggtggtggccgtggtgctggccgccggcttcggtacgcgcttcgaccccgacaatcccaagcagcttgtctccgtgggcggcaagcccatcgtgtgctggagcattgatgcctttgaacattgcgatcgcgtcagcgacatcgtggtggtggtcaatcccaaggtgcgcggtgaagtggaaacgttggttggcgagatgggctacaccaaggtccgcgtcatcattgacggcggtgacgaacgtgtggacagtaccgccgccgcgctcgacatgctggctactgctggcattccggacgatgccaagattctgatccatgacgccgtccgtccgttcgtggaacagtccgccatcgacggttcgattgatgcgctcgaccagttcacggccgcgaccgtggcctacacctcaaccgacaccgtgctgttgaccgaggatctgggcgatttgaaagtggtcaagtcggtgccggaccgcccgaacaccttccgcgcgcagaccccgcaatccttccgcttcgcgacgattcgtcacgcttacgatctggctgccgccgacccggacttccatcccaccgacgacacgcgcgttgtggtcgattatctgcctgatgaacccgtcgccattgtctccggtgcggaaaccaacctgaagatcaccacgctggaggatattcccacagctgagcgtatcgccgaggagattctcggtcgtgatcccaaggaagaggcccgcgcccgcatgcacgccctgctggcccaagcggccggccagatgcatcgctagactggcattatgcgtgaactcaatgttgtgatctccggcttcgaccactatgacggcgtggaggtcaatcccgccgtcgaagtgcccaaggccatcgccgagcaggggttgggcgtctcctctgctccggacgatccgttggagcaggtcgccgtcaccgtccatgccgtcagcatcccggtgagcttcgccaaagcctggcccacgctgaaagagacgattgaggccgccaagcccaatatcgtcatcgccaccgggctcaagcacgcagcccgaggcgtgatgcttgaacgatgcgccaccaacctgatggacgcgatcaagccggacgcggacaacgtgaccccacgccgcgaacccatcgaccccaatggcccggccgcctattggacccgcctgccgttgcgctcgatcctgaatgatttcacggacgattcgattccggccaccctgagctcggacgcaggcacgttcgtatgtaattcgctgttctacaacttgctgaactggaccgccacccaggagcgggtgctgggcggattcgtcagcttcccgccggtcgtgccggcggattccagccagcatggtctgccactcgaccagcagatcgccgctggccgtgatgtggtgcgcgaagccgtgcgctactatctcaagccctccagctccggcatcctcatcgcctagcacgctgcgcgccacgccggaatagaacatggttcgcacgcattgtaacgattgcgcgtcactcaacgcccagcgctagtgcgatgcgctacagtgcttcaaggatgtgccaagagctttatgcgtgtgcgaaaggaataaacagcgatggtggatcgtttcccggtggtgctgcgaggatatgacaaggagaaggttgatgctgccttcgacgctactcaggagagtgtgaagcgtgcgcagcagacgttggccagcatgcgtgagcagattgcggcggatgacgaccgtattctgcaactgcaggcccagcttcaggaagagaagaacaagaagccggaaggcaacagcttcgcttccctgggggcgaacgcccagcagatgctcgcctccgccgagcagacgagtaccgaactgctggaacgcgccaagcaggacgcatcctccatccgtaccacggctcaggctcaggccgaaacgctgatcaacaacgccaagctggatgcccagcatattgttgacgacgccaatgccaaggccgcctcgattctgacgaacgccaacaatcaggccgaatcagtgaccacctccgccaacgaggacgccgcacaactgcgctccgaaaccgccaagaccatcaccgaacagcgtcagaccgtcgagcttgagctcagcaacgcgcgcgaagagcacaccaagaagatggcttccgaacgctccacccaagagcgcgaaatcgccgatatgaaggcggaagctacccagcaggtcgccgcaatgcgcaaaagcgccaatgaggagatcaccaagcttaagtccgattccaacgatcagattgaggcggcgctcgccgaggccaacaagaagctcgccgacgtgcgcgagcaagtgtccaagatgatgaccgaagcccagcgcaaggccagcgaaatcattgatgcggccaagaccaagggtcaggaaatcactgatgaggccgaggtcaagcgcaccagcacgatgagccaggtcaacgccgaagtcgagcagatccgtcacgacatcgccgctcagcaggatgaggccacgaagaaggtcaacgaactcctgcagcacctcgaagagcgtcgtgtggcggccaagcgggaagccgatgagttggtcggccaggccaagaacactcgcgaccaagccgattcatatgccgcgtccaagcgcgaggaggcggacatccaggccgccgcaatcgtacataaggcgggcgaggaagccgatgcgcagatagaggagcgtcgcgccgccgcccaaagcgagcttgacggtctgtccaagcgcatcgccgatctgcaggaacgcgagtccgtcatcacccagcgtgtttcggaactgcgttctatgttctcgcaggcgttctccggattcgctttcggtggtaatgcggcggcctctggtcagagtcaggaagccgctgccgtggcgtcattgccggtggtcgcgcccgtcccggaagtccagcctgtacacaacgaggccgatgatcagccgggtgagttgagcggaaacgagtcggctgccgacgatcacaatgagacagatgcggcaccggctgattcggctgattcagctgcgcagaatgagcagtccgaatcgtctgagccgtccgagcaccagacacagggcgaaccggaggccccgactcaggagaatccagccgtatctgagcagaacggcgaatgacaggccttcgattagactactagcggtaagaattacggcacctgcgctttcgagccaggtgccgtattcgtttggatctgcgccacaagcgcaccatcacagaaggagtatgacatgagtgaattgacgcctctgaccggcgaagcattgaataccctgcgcggcgatttcgcacagagcggcaccaaccgtctggccatgaacgcggtgaccgccgccggcatcgacaaggtggctcgcaattatgaccgcgctcgtctgatgcagcgccgtttctccaccatcgttgacaatggcgaagccacccatcaggatcgctccggccgctgctggctgttcagctccctgaacgtggcccgtttcgtggccaagaagaacatgaacctgaaggagttcgagttctcccagaactacgcgatgtactacgacaagctggagcgcgtcaactacttccttaaggatgtggccgctctggtggctgccggagagccttccgactcccgcctgatgcagcacctgctcgccgacgtgatgggcgatggcggccagtggaccatggccatgaacgtgtacaagaagtacggcgctgtgcccaaggacctgttcccggagaccgaatcctccaagaacaccggtgaaatgaacacccagctgcgccacatgctgcacaccgccgtggcgcacatgtacgccgctgacggcgatgcctccaaggtcgaggcgattattgccgacgccactgctgccggccaccgtattctgaccatccacctgggcgagccgccggtctccttcgactgggaatggaccgacaaggatggcgaattccaccgcgacggcgagattacgccggttgagttctggaagaagtacgtgggtccggctgatcttgaggactacgtgtgcctggtggacgatccgcgcaccgagcacgccaagggcaagaagatcggcatcgagcacctcggcaatgtggctggcggcgacgccaccgagtacctcaacgtgccaaaccagttcatgaaggactgcgtcaagcagattctcgttgagcagggcatcccggtatggttcggtgccgactgccacccgttcatggaccgtgagaacggcgcttgggccaccgacctgttcgagtacggccgcgtgtacgacgtggacttcgatttggacaaggaagcccgcgtgcgcttcggtgactccgccatgaaccacgccatggctttcgccggcgttgacgtggccgacgacggcaccacccgccgctggcgagtggagaactcttggggcaccaagatcgccgacaagggctacttcaccatgtccgacgactggttcaccgaatacgtctacgaggtcgccgtcccgaagagcatgctcccagccgaataccagaaggctctagaagagcccgccaccatgcttccggcttgggatccgatgggcgcactcgcataagaaagagcccggtgggctctttcgcgagtgcgccgagccgcggcagcggcgaggtgatgttgagtctgccgtaggcagtcagtcggagagctttggcctgaaagatcagcgcgcctgaggcgacaggccgtgaagcgaacagcccggtgggctgttcgtaggcctggctcgcggtcgtaagaccgtgagggacgccgaaggtaggattgagtctcgccgtaggcgagtccgtgattgttgggctcggagagcactccgagctagcccgaaaagccgggaatgccgatccatatcgtagcgaaacactaatagacaaccggttgcacaaacgtcgaaaagatgccataatagccgtacgccatgcgctccctcaagcaggcgttccgttcaatgaagacggagactgatatacacaagggaaaaccggtaaggagtatcgattgaccgaaatcaccaagctgagtgtggaagacctgcagtcgttgcgcgattcgtttaccgcagatgagacgaaccgaattgccatgaacgcggtgaccgccgcaggcattgacaaggttgccaagaactatgatcgtgcccgtctgttgcagcgtcgtttttccacgatagtggacaatggtgaggctacccatcaggatcgttccggccgttgctggctgttcagctctttgaacgtggcccgttttgtggccaagaagaacatgaacctggagcagttcgagttctcccagaactatgcgatgtactacgacaagctggagcgagtcaactacttcctcaaggatatggcctgcttggtcgaggccggggagcctgaagattcccgtctggtgcagcatctgctgcgtgaagtcatgggtgatggtggtcagtggactatggccatgaacgtgtacaagaagtacggtgccgtgcccaaggatttgttcccggagaccgagtcctccaagaacaccgacccaatgaacaacaagttgtgcaagctgctgcgacaggccgttgcgcatatgtatgagaaccccgagaatatcgatcagatcgtgaagaatgccacggaagctggccaccgcattcttaccattcacttgggcgagccgccggtctccttcgactgggagtggaccgacaaggacgacgagttccaccgtgacggcgagatcacgccggtcgagttctggaagaagtacgtgggttccgccgatttggaaagctatgtgtgtctggtggacgatccgcgtaaggaacatccgaagggacgcaaaatagccatcgagcatttgggtaatgtggtcggtggcgacgccactgagtatctcaacgtgccgaaccagttcatgaaggactgcgtccgtcgcgtgctggtggaacagggcattccggtatggttcggtgctgagtgcggaccgatgatggatcgtgaggccggtgcttgggccactgacctgtttgagtacgatcgtgtgtacggtgtgcgctttgatttgtcgaaggagcagcgcgtgcgctttggtgactcggccatggatcacgcgatggcctttgctggtgtggatgtggctgacgacggtactactacccgtcgctggcgtgtggagaattcttggggcgccaagattgccgataagggctactttaccatgtccgatggctggttcaccgagtacgtctacgaggtcgccgttcccaaggccctgcttcctgaggaatatcagaaggctttggaagagccggcgatttccctgcctgcgtgggatccgatgggtgcgcttgcataagaaaagccgacggctcttcgcataacacaaggttcggcagattgactctgccggaccttcttggtatctcagcggaaaacttataatccgatggcgagggtgctgactccgtggatcatcagttcgacgccgatgcacaggataataaaacccataatgcgcgtaagccctaggatgccgccgggccccagtttatgtaccagtggtgtgcaccagcgcagcagcgccataatgacgatggatatcaccaatacggcgataaggatggccagccgctcacgaggttccgtataccgggccgataggccgatgacttcgccgatggcgccggggccggcgattagtggcagtgccatcggtgtaaaggcgatgtcattgtcttgatgcgcttccggatcgccatgatcagaggccggtaccagcattcgatacccagaatgcgccaccacaaaaccacctgcgatttgaatggcgggcagttccaggtggaacatgtcgagaatgaacgagccgaggatggtaaacgccgccaatatggcgaacacatacagggatgtgtaccgcgcctgacaacggagttctttcttgggcaggtcggcggtaagggtggcgaagctggccactgcgccgacagggttgatgataggaaacaaggccaataaggccattgaaaagactgcgatgtctgctctcacgttccataagcgtaatgcaaccggttgtctcagtcaacgtgagaactatatcgagtgtcgggcgcgccagtgccctatggcgatgtgaaggatagtgtttacagcgactttctccgtaccagtgtcatgtgtttgatgacggtggtggcggcctctccgtcaatcatgcgcatggcaaggtcggctgccgtggagccctcttctcgcaacggctgttgcacggtggtaagcgggggattgcaacgctcggcgattggatggtcgtcgaatccgacaacggcgatatcgtccggaactgttagcccgcgctgtcgaatcgcctcgatggcacctacggcgatacgatcggagccagccagcaatccgtcgatatcgtcatgtgtatccagcagttgcatcattgcggaaaagccggcggtcgcatcccatccggtgaacagtaccctgtcgtcgggcagttcgtcaccgcatacacgtcgatagccggtgagccgatcgggggatgccgggttggagcgcggtcccaaaatcgatatgggatgccgacgtccggcgtcatgcatggcttgggcggcgatttgggctccatacgtgtcgtcggaatagacgctggagaaaataccctcatatgagcgatcctccatctggccaagcattacgcaagggatacgcagtttgtacatttcctccagcaaatagttgttggcgtagggggaaatgtcgataaccgcgtcgaatgagcgtcgttccagatgttgttgcacgcgatgacgttcgaaatcggtggatgcctgcaataataccggtagatatgacgattcgctaagtttctccgtgatgccgctgataaacatcgcataggtcggatcgtcgaaaagctcgtcgagcggctcggtaatgaggatagcgatggtctcattgcggcccactgccagtgcgcggccctgtgcattgggaataaagcccatgctatccgcgattttcttgatgcgtgcggtggtctcgcggctaatgcgtggagaattgttcagagcgcgcgaggcggtggaacgtgagacatttgcggctttagcgacatcggccaaagtaacgcgattgcgctttgccacggtcataattctcctttgaatgcaacagtaatgcaatgctatatgaaacgattgtaacccaatgtctcgcaacacacaggacaaccggttgcatatttttttgaaatctgttatcttcatagcaagcaatgaggcaagtcacacaaaacgtcagaccttatggctgtcgataacacagataattccatccactctttcaaaggagaaaagatgtttgggaaccacatgaagaagaccgttattgctgcatgcgcaaccgttgcatctctgagcctgctgttggcaggctgcggtaccgatagctccagtggcaaaacgcagattcgtttcgccacttgggataaggccgaagatgtggaccgtcagcagacgctggtggatcagttcaacgagtcgcatgacgatatcgaggtcacgcttgaggcctacggttccgacttcgatacaaagatcagcgccggcatgggctcaaacgatacccctgacgtcatgtacatgtggaattacccgtcctacgccgacggtctggaaccactcgatagctatatcgaaaaggaaggctccgactggaagtcggacttctactccacgttgtggaactacaactcctacgatggcaagacctatggcgtaccggtcggcttcactacgcacgccctctactacaacaaggatttgttcaagcaggccggcgtcgaagcgccgaccaatgactggacttggaccgacctgcagaaggctgccaagaagatttccagcaagaccgatgccaaaggcttctccttccagatgaagcccgatccgtatgacttcgagatgtacctgtggagcaacgacaccgcttacagcgacgagaacggcaccctcgaaggcaacatcgattccgccaaggccatcgacacctatcagatgttccaggacatggagaaggatggttccgcggtggccacagaaggcaacggcaccgatgagttccgcgccggcacgaccgccatgtacatctacggttcctgggccctcagcaccctagacgaggacggcctgaactatggtgtggtcgatatccccgcattcgccgactcagaccatgattccgtgtccatcctgagctcgtccggcatctccatcgctaagagcagcaagaacaaagatgccgcttgggaattcatcaagtactgggccaatgccgactcaaacaaggctcgaatcggcagcgagctgcccgtgctgaccagcgtggtcgagtccgagggcatcactgacaagagccagtacaagccgttctactcgatgctggaacagtccgacggctacagcccttccagcttcaaggtcaagggatggtccgagatctccgacaagcttgccctctccttcgagaagatgtacaacccctcctccctcgaagatcccgcttcggccatcaccgaagcgctgaagtgatgaccatctgggcaaaggaccattatgaaagtgctagcaaaggtcaataaacgggcctggccatacctgttcatccttccttggatcatcgggttcctagtattcacgttgggacctctcgtcttatcgttcgtcatgagcttctttgactggtcgattaccggaacccccaaattccgtggcctaggcaactacatcgagatgtttaccaccgacgatcaggtgctcaagtccctgtccatcagcctgaagtacgccgcgattttcgtgccgctcaacatgattatcgccctggttctcgcgatgctcatcagccagccggtcaagggtgcgaagtttttccgcacgattttctacatcccggctgtcatctccggcgtcgccgtatccatcatcttcggatggctgctgaacggcaattacggcgtgatcaactacctgctgtccctgctgggcatcgacggcccgcagtggctggtcgacccgaagtgggctatcatcgcggtcatcttcgccagcgcgttcggcgtcggttcgatgatgctgatcttctacacggatatcaagaacattcccattgacctgtacgaggccgccgccatcgacggtgccggcccggcgcgtcagttcttcagcattacgttgccaatgatcaccccgaccatcctgttcaatctcatcacgtcaatcatcagttcgttccagcaggtcaccctggtcatgctgctgacgaacggtggtccgatgaagtccacatatttctacggactgatgacctacaacaacgccttcaaattccacaagctcggctacgcctccgccaacgcatgggtcatgttcatcatcatcctgctgcttagcgcgctggtgttcaaatcttccgatacgtgggtgttctacgagtccacggcaaacaagaacaaggccaagaagggtaagaaggcaaagggcaaggaggtagcgcgatgaagatgtcgctccgttccaaggtcgtgatctacgccctgctcgtcatggtggcgatctacttcctctccccgttcgtctacatgctgttctccacgttcaagacatcggctgaggccatcgcctatccgccgagtctgttcccgaaggaatggcaatgggagaactatgcgaaagcatgggatgcgcagccgttcggcaagtacctgcttaactcggtgattgtcaccgtgctcaacacgctcggcactgtgctctcctgctcgctggtcgcctacggtttcgcccgctacaacttcaagggcaagaacatcctgttcatgattctgctgagcacgatgatgattccgtgggacgtcaccatgatcccgcagtacatggagttcaaggctttcggctggatcaacacattgctcccgctgattgtgccctcgttcttcggctccgcgtattacatcttcctcatgcgccagttcctgctcggcgtgcccaaggaatacgaggaggctgcgcgcatcgacggctgcaacgacctgcagatctggtggaaggtgtacatgcccatcatgcgtccctgtctgattctggtgggtgtgctcaacatgatcaccgtatggaacgactacctcggaccgctcatcttcctgcaggaccgcagcaagtacacgctggcgttgggcttggcctcgttcaagggcgtgcaccagacccagatcatcccgatgctgtgcatcaccgtggtgatgatcatcccgcccgtggttgcgttcctttccggccagaagtacatcgtcgaaggtacctcaggttccatcaagtaataccgttggcgggccaagggtggctgagccccattgctcggtcactcctgtggtcgcctgaactgtttccggggcgaatgatgcccccacgcacgaaatgtttcgggccatcggtctcggcccgggccaagtgcgcccaaaccgcaccaaggagtatgacaccatgattcgcgattcgttttccaccgcactcgggttcgagctgccaacagacggctggatggtgagcgaggacgcttatgagcctgaccgcaacctgcagtacgagagtctgttcgccctatcgaacggatatctgggcattcgtggcagccatgaggaagggaacaagcccacgttgccttacctgtacgtcaacggggtgttcgacaagtccgaaacgttcatgaaggaacttgcgacattgcccaactggcttggcatccgcctgtacgtggaaaagcagctcatcggtgtcgacgaatgcgagatcctcgaataccgtcgtgcacttgacctgaagcacgcggctttggtcaaacgggtgcgtctgcgtgacccgaaaggacgtgaaaccctgattgaaggcgtacgtttcgtcagccgtgcgcatgcacatcgtatggctgtgcgactgtgggtcacgccgctcaattactcaggtctaatcgaagtggagcagattaccgacggctccatcatcaacttctatgatgcgccccgtttcaaggtcaagcacaccgttgtcaccgccaatgagccgctcggtgagaacggggtgtatatggaggtcgccacgcgtgatgagaatctgcacgtgggtgtcggcagccatcttgaaggcacctgccgagatcgggatgtgttgggcaatcgtgtgttccatgcctttggcgagcaaggcgttgaattctgcgacttccgtgccgatgaaggcgacagcgtggtgctgaccaaatacgtggcaatgttcgatggacgtgacactccggccgacgaactgcacgccaccacctgccgtgaggtcgaggacttcgttgccgaagggttcgagcgtgaattcgaggttcatgccgatatttatcgcaagatgtgggggcaggccaacatcgatatcgagggagatcctgagcttgatcgtgcgattcggttgaacgtattccacctgatgagtaccgccaacgaacatgatgaccgggtcaatgtgggtgccaagctgctcaccggcgaagaatatggcggccacgccttctgggacaccgaactgtttatgcttccgtttttcgcttatgtgttcccccagacggcccggcacctcgagtcctaccggtaccgtctgctcggcgcagccgaggccaacgcggccaagaacggattccagggtgcgcaatacccgtgggaatccgctgatgatggcagcgaacaatgcccggactggaccatcgagccggatggcacctgctaccgctgctatgtggccgtctatgagcatcacgtgacagctgccgtggctttcggcatcgcgaactacgcgaccatcaccggggatacctcgttcctatacggtcgtggtgccgagattctcacgcagaccgcccgtttctgggcaagccggtgcgaatggaaggaagacgccggacgttacgaaatcacccaggtaaccggtcccgacgaatggcatgagcccgtcgacaacaatacgtacaccaactatttggcgcgttggaacatgagatatgtaatcgcgctcgtcgaccgcatgcagcgcgaacatccggacgactatgcggcactgattgccgccaccggattgacggatgccgagcttgcatcgtgggatgccatacagtcgaagatctatttgccccgcaaggaggacaccgacctgctcgaacagttcgagggctatttcgatctggagccggtgaccatcgaagaatacgacaagaacgactggccggtacggcctgcggcgctcaagcaattcaaaaccagcgagacgcagatcatcaaacaacctgatgtggtgatgctgctgcacctgctcggcaacgaattctcccagcaggaaatcgaaaccaactatcattactacgaaaagcgcacgttgcatgggtcgtcattgagccccagcatctacgcgatcatgggattgaaggttggagacgattccaaggcctaccgctatctgcgacgtgcggctatgctcgacctgctcaacctgcagcgcaacacccgtgagggcatccacgcggccaatgccggtggcgtatggcaaacggtcgtgttcgggttcgccggagtgaacatggacgacgatggcgtattgtccatcacgccccacatgccccacgaatggtcgtcgctgacattccgtctgcacaaccgggagtcgtggctcgagattcgtgtcggtgcgaccaatggtgtcgatgtggaggtgcttgacggaccgtccgccatcttacgcatcaacggcgagaccgtgaccgtgcccggcgtgaaggatgtgtcatgaagcggggtatggccgttgccggcctgattgtcgtgaccgcgatttggggcggtggattcgtcgccagcgatatcgcgctcaatagcctgacgcccatgcagatcatggccatccgattcctgcttggtgcggtgctgatgagctttattagcgtacgcgagttccggaacatcaatctcaaagaaattggtgccggtgtgcttatgggcatcgcgctgttcgcggccttcgcgctgcagattatcggcctgcaatacaccacgccgtccaagaacgcatttctcaccgcattgaatgtggtgatggtgccgttcatcgccttcctggtgctgcgcaaacgcgtcggatggcgtggcgtactgggggcctgcttgtccgttgtcggcgtggcggtgctttcgttgaacggcaatatgacgctcggtttgggagacgcactgtcactgctgtgcgcggttggctttgccttccaaatcttcttcaccggtctgttcgtgcagcggtaccgtgcgacggttctcaactgcgtgcagatggtcaccgcattcgtgctgtctgtggttgcgatggtggctatgggccaggtgcatctgacgccgacgaccgacggatggtggagtgtgctgtacctcggcgtggtcagtaccaccatctgctatctgttgcagaccgcctgccagcagtatatcgacgagaccaaagccgcgatcatcctgtcaatggagtccgtgttcggcacactgttctccattctgctgctaggcgaggtggtcaccccacgcatgattgtcggatgcacgatcatcctcgtggcggtcgtcatctccaatctggctgcgtcctccgaagacgaacagcccacagacacgcctgttcccgaaccatccggcgaggtttcgggttgattgcccgtctgattcacgccatacacaccacaatcattcgcaaatgagcaaaggagccatccatgcgttatcaagccatcattttcgatctcgacggcgtaatctgccgtaccgaccaataccattacctggcatggaagcaggtggccgacgagctcggcattcccttcgacgagcaggtgaatgaacggttgcgcggcgtgagccgtatggccagcttcgatatcatcctcgaacggtatgacggcacaatgagtgacgaagagaagattcattggaccgacaagaagaacgagatatacaagtccatgcttacacagatgggacccgacgacatgttggaagatgtggccgacacactgcacaagctccgtgccatgggacttgaccttgccatcggctcatccagccggaacacgaaattcatccttggccagctgggattgtcggatttcttcgatgccatttcagacggtacgaacattacccgttccaagcccgaccccgaagtgttcgtcaaggcggccgaatttctgaaccgcgcgcctgcggagtgtttggtggtcgaggacgccgaagccggtttgcaagccgcgactgccggaggtatggactccgccgcattcggcgagatcgccatacgttccgggcttggcacatggaacttggaacggttctccgatctgatcggcattgtcgcctaatcccagaagcgtcaaccacgacccgcaacgattcggattgctggtaatcccacttgtatacgtccgtcatcgggcgtatacgagtggaagaatgccgatttgcgggatgtggcggacttgcgcaaaggagtacatcacatgatgagcaagcagaacgattgggagaatccctccctgaccggtcgtaaccgtcttgccccgcacgcctatttcttcggatatgagtgtgaggcggatgcctctacctatgagcgcgaacgctcatacggttatcagagcctgagcggtgcatggcggttccgcctattcaatggcccggccaccgtgccacagcaggcgttgctgtcaatcgccgatgattgggatgaggtgcaggtgccgcatatgtggcagtttgacgggtatgggggtctgcactataccgacgagccgttcccgttccccgtcgacccgccgctggtgccgtccaccacgcctacgggcgtgtaccagcggatggtgaatatgcagccggctgcagatggtgagcgcattattctgcgtttcgatggtgtggacagttatgctgagattcatgtcaatggcacatacgtcggcatgacgaagggctctcgcttgtcggcggaattcgacgtgaccgatgcggtgcatgcggggttgaacctgttcgtggtcacggtgctgcagtattcggatggtacctatcttgaggatcaggatatgtggtgggcatccggcatcttccgtgacgtgtatgtggtcagacgacctcagacgcatctcaaggacttcatggttcgtactcatcgtgtggatgatacgctcgcacgggtcaccgtgcaggcttggaccgaaggggagtcctgcgtcgaatggaccattctgcgtgacgggaatatcgtgtccgccgcgcattcggattcgggcgaacgtgccgtaatgaatattcctgaccccgaatattggaatcccgaacatccgttcctgtatgacatgcgtatgcgcatcgtcgggcgggacggttctgacgaaatcgtgccgcatcacctcggactggccgaagtcaccgtcgaggatgggctgatgtacctgaacggatcgtacttcaccatgcacggggtcaaccggcacgatagcgacccgaggcatgggcgtgcggtcagtatggagcgcgtgcgccgtgatttggaaatgatgaaacggcacaacatcaacgccgtgcgtacgtcacactatcccaacgatccgcggttctatgagatgtgcgacgaactgggccttatggtcatggccgaaaccgatttggaatgtcatggattcgaaaacgtgggcgacatcgcactcatcaccgatgacccggcatgggaagttccctatgtcgatcgcatcgagcggcatgtgatgcagcagcgcaaccatgtctccatagtaatgtggtctttgggcaatgagtctggattcggatgcaatttccgtgccgctgctgaacggtgccggcaacttgacccatctcgtcctgttcattatgaggaagatcgtttcggcgaatcggtggacgtgctgtcgaccatgtattcgcgtgtctcccagatgaacgatttcggagagcatccggctaataagcctcgtgtgatctgcgaatacgggcactcgatgggcaacggtcccggtgggctgagcgaataccagcaggtgttcgaccgttggccgagtatccagggccattttgtctgggaatggtccgatcatgcggtggcaatgagaggggatcgtttggcgctattggccgagcgtgaggtgcaggccaaaggcgtggaccctaatgggctggacgacctgtggtatgcctacggcggggatttcggcgattaccccaccggcggaaacttctgcgtggacggtctggtgttcccctggcaggagcccagtccggggcttgctgaatatcggcaggtgatttgcccggtgaaggtcagctgcacctataccgaggaggatggcaccgctctgcttggcattgatagtcgtcggtatttcactgatttgtccgacactcggctgcgggtgtctataagtgtggatggtgaaatcgtggacacgacactgctggaggtggggcccgtgcccccgctcggtcacatggacataccgttgcgccgtgaagcgctgctggaacaccatggcggtgaagcgatgctcacggttaccgtgctgtccgtggaacagcatgagtggtgtgatccggatgagccgctgggctcctaccagttccggctgcatgccggtcagggtggctatggcccggtgcgttcgaatgatgggtcggcgctcgccgtgacctctcccgttcgccaaacattgtccaccgtcgaagacgaacggtatctgaccattcgcgccggtgccatggtgcttcggtttgacaaggcgctcggtgccatagccaactggagcgatggcgatcggaacgtcattgattcgccgatatgtttcggcctgtggaaaccattgatcgacaaccttacgcaggaatactccgcgctctggaagccgtattatctggacgtcatgcagacggacactcgtggcgttcaatggcatgcggaacgcgaccaggtgatcatcgaggtcgagcagcgtctcgccgctcctgtggtattggccggcatgcgaacgagactgacctacacagtgcatgccgacggccatgttgacgtcgcggtgaccgccaccgcctatggcgactaccatgacatcattccgcgccgaggcctgtccttcactattccgcgggattgcaggcaggtcgcttggtacgggcacggcccgggcgagaactacccggattccctcgccgccaatccagtgggcgtgtggacgaatgacgtggatgccatgtttacgccctatgtgatgccgcaggattgcgcgaatcacgaaggcacccgctgggtaacgttccgcgacggaaacgggaacggtgtgatggtgacgcggacggcgccggccgatggtgagtccgaggcgttctccttctccgcgtggccgtacagctgcgctgatatcgacaaagccaagcatgtgaacgagctgcctgagggtcatggatcggttaccgtcaacatcaatgatggcgtgttaggtctcggatcaaattcctggggtagcgaggtgcttgattcgtaccgtattcgatttgaggattgtgcgttctcctttacgctgacgccgattcacgacgacgaacacgtcagccgcaatccgaactgtggtgcgggtgcagtcggtaaggaggtgcagtgatgcgactatacgacagcttggaaatgttcgataccggattgtctcatgtgcgcaaatggatgcgatgcggtcaagccattaggcaatcgacccgtctgccgttggacaccgcgtattcgctcggcgattcgctgaccttctgggcggtaccggcaggcgcgctcgctgatgatcgttatgtcgggcaccgccggtaccacacggtgctctcgcccatcgacgagccgttagccgtgtatgtccgcgcaaaaacggcattgcggccagccggtgcatacagcgacgtttcggatcgcgaatggtttggcctgccgaatgacgatgaggaaggcgtaccatgcgtcgtgcctgtcgggggtgtcctgattatggaagaatgcgaagcgatgcgcattaacgccactcccgaggccgtgggtcgcgtatcggtggtccgcgtcacggtggaggggttcacgttccccaataaataagagataattcaggtcctgtgcgggtgttccaatcgcccgttcaggaagatgccagccggccgaccgttccatgaaacggtcggccgacttcgtttttccgtgtacggttattacagtgaagagtctgctatgccgtatgcgcggtattgcattgccagcatggccgcatcctgtgttctcgttggagaactcgttgcggggaaccaataaagaaaggagtcgagcaatggcagcactacgtggtccggatagttccgaggatgaacgtcgtttgggggagcaggccgtctttcctgagaccgtcgatgtcaacattcgtcagcttgaccccattcccgcgccgcgtgctttcctcagggagcagccgctcaccgatgagatgagcgagctcgtgctccactcgcggcaggaaatccgcgatgtgctcaacggccgcgacgaccgactgctcgtcatcgtgggcccctgctcaatccacgacccgaaggccgcgcacgagtacgcagaaaagctggctgccgtcaagcgcgagttggaagaccgactcgtgatcgtgatgcgcgtgtacttcgagaagccgcgcaccaccatcggctggaaaggcctcatcaacgaccccgatctggacggtcgcttcaatattcgtaagggcatgtggctggcccgcaaggtgctcaccgacgtgctgagcctcggcctgcccgccgccaccgaatggcttgaccccatcaccccgcagtacatctgcgacgcgatcagctggggtgccatcggcgcgcgtaacaccgaatcccaagtccaccgcgaactggccagtggcctgtccatgccggtgggcttcaagaactccaccgacggctccatcaaggccgccgccgattcctgtttcgcggccggcttcgagcatcacttcctgtccattaacttggacggtcgcgtgatttccgccgaaaccaaaggcaacccggattgccatctggttctgcgcggctccagccacggcccgaactacgatgccgaatccgtgcgtcaagctctggaagacctcaaggtttccaaagcgtccggcccgagccagcatggcctcgtcatcgatgccgcccacggcaactgcggcaaagacgaaaaccgcgaagccgaagtcatcgaagagatcgctgagcgcctggcgcacggcgaacaaggcatcaccggcgtaatgatggaaagcttcttggtcggcggtcaccaaaagccggccccgctcgaccagttggtctacggtcagtccgtcaccgactcttgcgtgccgtgggaacgcaccaacgaactgctgcacaccctagccgacgccgtcaccgctcgccgctcggctaaatagctttgtctttgtaaaaatgctcactgagacccactcagtgagcattttttgccaataacggtggtcatgtcagtttgttcccgtgacaccttatccttgggaaggatactgacccaaggagagatgttatgcagcagcaggaggaagcagcacattcgctgcatccgttgcaagtcggtccgcagccgttgaacaccccagaagagcttcgcgccattcgtcaggcgatgggggaggggaagaacccgctcgttgccactgatgtgccgcgttgggaagatcaggtgggtgtcagtcgcatcatcaaccgccgcgtattggagttggagccgctgcccacgcccgcgcaagtgctcgctgaactcccgctgactgatcaggctcaggaaatcgtcgcctactcgcgtgatgagattcgcgcgtgcctgtacggccaagacgacaggctgttggtcatcgtcggcccctgttcggttcatgacccgaaggccgcgctggactacgcgcgccgattggccaagctgaaagatgagctcggtgaacagctgctcatcgtcatgcgcgtgtacttcgagaagccgcgcactaccattggctggaagggcctgatcaacgacccggatattgatggcagccacaatattcgcaagggcctgttgcttgctcgcaaaaccttgcttggtgtgctgaaggaaggattggcggccgccacggaatttctggagcccaccagcccgcagttcatctcggacgcggtgagttggggcgccattggtgcgcgcaacacggaaagccagatccaccgccaattggccagcgggctttccatgccggtcggctttaagaatgccactgacggctcggtgaaggcagcggtcaacggttgcttcgccgctgctcagcagcacacgttcttcggcattgaccatctggggcgtgcctgcgcagtcgagacccttggcaacccggactgccatgtggtgttgcgcggctcgattcacggcccgaactacgatgccgaatccgtggccaaagccatggaagacgtacgcgccgaaatgcccgccgaatccgcagcctcgcatggtctgattgttgattgctcgcacggtaactccggcaaggacgaacatcgtcaggccgaagtcgtgcgcaatattgccagcagaattgcagctggcgaacagggtattaccggcatcatgatggaaagctttattgaaggaggcaatcagaaggccgcgccgcttgatcagctggtctatggcaagtcgattactgacaagtgcatcagctgggaagaaaccgaggccttgctgcgcgagcttgcggaagccgtagccacacggcgttggcactgagttgcgtcatcggctctctcgcgggagcaatgcaacgaaacgtctctacccctcagcctgccattcggcggccacctcccctgacaaggggagccgaaagtgttgtgaaaggaacttacgtatgggtatgaaaactgtagctattattggcgcattggatgaggaagtggtgctgatcgccaaatcgctcacgcatgtgacgcacaccgccaagggcagccttgacatcgtgtccggcacggtcgactccttcggttctgacgtcatcaaggttgccgcaacggtaggcggcatgggactggtcaatgcggccgccaccacgcagctgctgattgacgagattgccccggacgccgtgattttcagcggcatcgccggcaacctcaacacccacctgcacatcaacgacgtggtgctcggcggcaccctgcgctacctcgacactgacatgcggctcgtaggccagtggaagcccggcacggcggacgctccggtggaggaattccactctgatgaccgtctgctggaagtcgccgacgaggcgcttgccaatgcgggcattacccacatcaccggcatcatcgcctccggcaactacttcgtggacacgccccaaaaggtcgaggaggtcatccgactcaccggggctgacgccgtggagatggaaggcgccgccgtggcacaggtcgccgcccgcaataacgtgccggcactggtgattcgtgccctttccgacaacgccgacaccgattacgaggtattcaaggagttcgacatctccgagtacgccgataccgccgcccgtctggctgtcgacatcgtcaagcgcctgtagtcggcgggctggcccatctcaccatccacgttttgggtatgatgaccacaatatgagcgttttcaaactattgcttataacctgagccatactcggtgttcggcacagcgatgtgcggggttcatcgctggggccacaagccgtaccagttcttctcccgcatgccggtcgctgtgctcaattcgttaagcgacgacaacaccgtcgcgaagcattgaatacacaatgcgcacgctgcactggggtttatctgcagcatgaggagagaaaaaatgactgcaagcgcaaccgcggctgtgaccaaaccggtgaagaaggattcggttcctgagatcatcgccgcttccatggtcggtacggccatcgaattctacgataactactgctattccattgccgctgctagctacttcggcatgatcttcttcacggacgtcgccaagtccaaccagaccctcgccacgctgatggccttcgtgaccttcgccgtttcgttcctcgcccgtccgttcggctccatgctgttcggccacttcggtgacaagctcggccgtaagaagacgctggttatcgccctgatgaccatgggtatcgccaccttcctggtcggctgcctgcccggttatgagcagattggcgcatggtccgtcgtgattctgtgcatctgccgtgcctgccagggcgtgggcctcgccggcgaatggtccggtgccgcgctggtcgccactgaaaacgctccggccgacaagcgcgccctgtacggttccttcccgaaccttggcgccccgattggcttcttctgcgcttacggcctgaacctgctactcgaatccaacctgagcaaggaacagatgattgccttcggctggcgtatcccgttcctgtgctccgccgtgctggtgatcattggcctgtacgtgcgtgcccgcatgtctgagaccccagtgttccagaaggccactgaagagaagcgcacctccaagcacccgctgcgcgacctgctgccgtactggaaggaagtcgtgctcggcaccgtagccatgggtatcacctataccctgttctacgtactcggcacttggtcgctggcctacggcgtcaagggcttgggcttccagcagggcgagtacctgctcatgcagatgtgctccgtggtgttcttcgccatcttcatcgtggtctcctgcgtgtacgccgacaaggtgggccgcaagaaggtcatgattgccgtgaccgccgccgccttggtgttcagcttcttcgtgccgatgctgctcgtgcactccgccgcccatatcatgatcttcctgtgcgtcggcttcatgatcatgggtggtttgttcggcccctgcggcgcctacctgcctgagctgttcccggtgcacgtgcgttactccggcgccggcctgagctacaacctcgccgccatcctcggtggcgcattcgctccgaccatcgcccaggccctggtcgcctccaagttcggcgttgccggtgtgggctggtacatggccatcatggccgccctcgctctgctcgctctgttcctgattaaggaaagcaaggacaaggactacgagctgtaaatagagctccccatattatgctcccgctggcgggagctgtccacgaaagcggactgagggtggccaatgggatttcggttctttgaccaccctcagtctcactgcgttcgacagctcccgccagcgggagcattttgttatgtcgtcccaccaaaaatgaacaatagacgaacttacgtagtttgggcatctcactacgccttgcacgttttactctggaaatcatggatatctggcagatcgtcgtgattgtggtgctcgccgcgctgatactggcgtgggttgccgtcatcgcctacaacaaaggccgcgtttcaggtcggctcgccgccgaacaggacctgtccggcgacgaggatacgcgttctctattcggtgatgatgcgcccgtgcgccccaccgagcgtcgcctgattgaagtcctgcccgaagccctgattgttaccgaccgcaacggcttggtccaatattcaagccccggctcagtgccattcggcctggtctccggcgaccgactcaactcgcgcgaagtcgaggacatcctcactcaggccgccgccgacggtggcgtgcgtgagcgtgaggttcagctgccggtcaatcgcaattcctatccgtcctctaatggccgaggactggaggccggccagtcacgcccgtccaacatgctgtatttgcgtgtgcgcattggcgatatcggcgatgacctgtacgccatcttcatcaacgacatgtccgagcagcgccgtttcgaggccgttcgccgtgactttgtgaccaacgtttcgcacgaactcaagactccggccggtgccatctcgctactggccgaaaccgtgaccgacgccgccgatgatccggacgccgtacggtatttttccggccgtatctccaaggaatccgcgcgcctgaccgaactggtacatcatcttatcgacttgcagaaagcccaaagcccgcaaagtgtgattgatgcgcggcgcatttccgcgctggatgtggcacgcgctgccatcgccgccaatcagacccaagccgactcccgccatgtggatattcgactgagtgtcaacggacagtcagtgcccacgaaggtcgaggagctggccgatggcgaaggttacttggaagaatcaggcagcccggccacgagcggtccgatgatcaaggccgacaaagaggccatacaaaccgccgtcaagaacctcgtagagaacgccatccattactcgcccgaacacaccactgtggcggtcggcgtgggggagcgcgatggcaaagtcaccattcgcgtggtcgatcagggcatcggcatccccgccaaatcactggaccgcattttcgagcggttctaccgggtcgacccggcccgttcgcgcgagaccggcggttcgggactcggcttggccatcaccaagcactgcgtgcaggagaacggcggtcggatttcggtctggtcgcgtacgggggaggggtcgacgttcaccatcgagctgccggccgccacggatgaggatgacgacgaggcccggccggacgagtcgacacaagcgtagggccttggttggtgcccgatatggtgccattccattgccgcacaatcacacagtgggcgaggtgcgcacaccgtgcgtagcacaattacgcaattacgtactttcaggaaacagcaggctaacggagaacaaatggttacgatagtatcggaaaactttgcgcctatgcgcacgggaacatacccaagaaaggctactatggcacgcattcttatcgtcgaagacgaggaatcctatcgcgagccgctggtataccagctcacacgcgaggggtacgacgtgtccgccgccgccactggcgaggaaggtctggaactgttcaccaagggcggcatcgatttggtgctgcttgatttgatgctgccgggcattgacggcactgcactgtgccgtcgcattcgtgagcagagccgtgtgccgattattatgctcaccgccaagagcgccgaaatcgataaggtcgttggccttgagattggtgcggacgattatgtgaccaagccgtactctttccgtgagctgctggcccgcatccgtgccgtgatgcgtcgcaatcaggccacggcccaggcttccggcactgtggatgacgatattccgctggtgtgcggcgatatcgccatgcaggtaggccagcatcaggtcaccgtacgcggcgaaaccgtgttcttcccgctcaaggaattcgaactgctcgaatacctgatgcagaacaagggccgtgtgatgacgcgtcaccagctgatcgaccgcatctggggttcggattatgtgggcgacaccaagacgctcgacgtgcatgtcaagcgcgtgcgctccaagatcgaggaagatccggcgcaccccaagtatctgactaccgtgcgcggtctcggatacaagatcgatactcccgcggagtaaatggaaggcggccttcgggccgccttttttgttgtggattgtgggctcgccgcaggcgagtccactccaaaaactacgtagcctcaacgtagcccacaaacatccaagtgttcatcttctgtttactgatttcggttttgggcccttgaaaccaccaatacgcttgtagttgtcatgaattgaccgggcagcgctgagccgcccgcgaatagttgatagagggattaagtaataatcatgcagaagaacatcctcattcgctccattgccgctctgtccggcattgtgatgctcgcttccgtggccgcctgcggcgataacaccgccaccacgaccgacaacagctcctcctccgattccacttccaagtccaccccggtctccggcaacttctcgggcgccggcgcctcctctcagcaggccgccgttgaagcctggatcgccggcttccagggcaccaaccctgaagccaagatcgcctacaacccgtccggttccggcgctggcgtgcagaccttcctgaccggtgccaccgcttgggccggctccgataaggcccttgccgatgacgaagttgagcagtccaagtccgtgtgcactgaaggcaccgccttcgatgtcccggtctacatctccccgatcgccgtggtcttcaacctcaagggcgtttccgatgccggcaagcacatcaacatggacgctgccaccatcgccaagatcttcgacggcaagatcaccaagtggaacgatccggccatcgccgatcagaacaaggacctgaagctgcccgacaccgccatcaccgtcgtgcaccgctccgataagtccggcaccacccagaacttcgtctcctacttcaaggacgtcacccctgacaactggacctacgacctctccgagaactggccgaacgaggttggccagggcgccaagggcacttccggcgtgatctccaccgtcaagcaggccgacggcaccatcggctacgctgacttctcccaggtcggcgacctgggcaccgtggccgtcaaggtcggcgacaagtacaacgagatttccgccgaggccggctccaaggtcatcgaggactccaagcaggacgacaccgttaagggcgacaaccgcatcgtcatcaagatcaaccacgccaccgaggccgagggtgcctacccgatcgtcttggtctcctacgacatcgtctgcccggcctacaaggacaccaagcaggctgagttcgccaaggcttggctgacctacgtgacctccgacgagggccagaaggccgctcaggatgccgccggcaccgctccgctgccctcctccctgaagtctaagatcaccaagtccatcgaggccatcaagaccaagtgatgacgtcggcccgcaagggtcgtgtggactggacctgacaactgaacgatagactgtagtagtaagagcagtcgccgccaactttaagccgcagtcgtaaaccatacggctgcggcttaaagcgggtcaggacccgaacggtttggcaaagtcacagacgaaaaccgcaccacttgaatacttgataaccaccctatataaggagaatccgtgagttcgcaagacaaaacggctgtgcagccagttggaggcaagaccgccgacaaggtgtttcgcggtgtggcatacgcctgcggcatcctgatcctggttgtacttgccgctgtgttcctgttcctgtttttccgcgcctggccactcatcggtggcgatcaggccgccaacagcgacaccgtgtccagcttcaccggcggcaaggccagcagcttctggggctacgtgctcccgctgttgttcggtactgtgctcgtgtctttgctggcactgctgattgccttcttcgtgtccatcggcattgcgctgttcatttcgcactatgcacctaagaagctcgccaccgcgctgagctatgtggtcgatctgctggctgccatcccgtccgttatctacggtttgtggggcggcctgattctggtgccggccatctacccgttctggaactgggttgccaaccacttgggcttcattccactgttcgagggcccggccgccaacccgtcgcgcaccgtcgccaccgtggctgtggtgctcgccgttatgattttgccgattatcacctccatgtcccgcgatatcttcatgcagaccccgcgcctgcacgaagaggccgcgctggcgctcggcgccaccaagtgggagatgattcgtctggccgtgctgcctttcggcaagtccggtattgtgtccgcctccatgctggctctcggccgcgcgcttggtgagacgatggccgtgttgatgatcctgtccccgggcctcaactactccatcaagctgctgcaggcctcgcagaaccagaccatcgccgcgaatattgccgcacagtaccctgaagccaacgatctgggcgtctccacgctgattggaaccggtctgattctgttcctgatcacgttcgtggtcaacttcatcgcccgtaagcttaccgagaaagcgactgcgtgatgactgctgctgagaacactgaaaagactccgatggacggcacgcccgaaatcgacttcgatcgtttccgcccgacccgttccgccatccagcgccgtaatatcatggaccgcttcatgtgggccctgatcgcggtggcgtttgtgatcgcctgcatcccgctgatctccctgctgtggaccactatcgtcaacggcatcaagcgcctgaacctgaacttcctgagctacaacatgaccggtgtggtcggtggtagccagaccccgtccggtggttacggcggtgtgctgcacgccatcatcggtactctcgaaatcaccgctggcgctatggttatctccattccgatcggtttgatgtgcgccgtgtacctggtcgaatactcgaaccgcggcaagctcgccaccacgatctccctgctcgtcgacgtgatgagcggcatcccgtccatcgtggccggcctgttcgccttctcgatgttcacgattctgctgggccccggtaccatcaacggtttcgaaggctccgtggctctctccctgctgatgctgcccaccgtggtcaagtccagcgaggaaatgctgaagatcgtgccgaacgatttgcgtgaggcttccttggctctgggcgttaccaagcagcgcacgattaccaagatcgtgctgcgcaccgctctgccgggcatcgtctccggtgccattctggccatcgcccgcgtgattggtgagaccgcaccgttgctgatgaccgccggctacatctccagcaccaacgtgaacctgttctccggccagatgaccaccctgccggtgttcgtctaccaggagtactcgaagctcagcgcgaactgcccgcccaacgccgacgccacctgcgtgaccacgattccgatggaacgtgcgtgggctgcggctctcgtgctgatcgtcatcgtgctgctgctgaacctcattggccgaatcgtggcgaaggtcttcgccgtcaagaccgagcgctaagccagtcgctaagcctaagccttaagaacacaaggaaatataaggaaacatcatgggacaacgtattgacgtcaaccacgagaacatctattacggcgactttctggccgtggaggatgtgaacatcaacatcgagccgaacaaggtcaccgccttcatcggcccgtccggctgcggcaagtccaccgtgctgcgcaccttggaccgtatgcacgagatcatccccggcgctcacgtcgagggcgaggtgctgctcgaaggcaagaacctgtacgacaaggacgtggatccggtggccgtgcgccgcgacgtcggcatggtcttccagcgcccgaacccgttcccgaccatgtccatccgtgagaacgtgctggccggtgtgcgcctgaacaaccaccacctggccaagtccgacgccgacgatctggtcgagtgggctctgcgcggtgccaacctctgggaagaggtcaaggaccgtcttgacaaccctggcatcggcttgtccggtggccagcagcagcgtctgtgcatcgcccgcgccgtggccgtccaccctcaggtgctgctcatggatgagccctgctccgccttggacccgatttcgaccttggctgtcgaggatctgatcaacgagctcaagagcgactacaccatcgtgatcgtgacccacaacatgcagcaggccgcccgtatcgccgactacaccgccttcttcaacctgaaggcagtgggccagcccggtcacctcgagtacttcgcggacaccatcacgatgttcaacaacccgcaaaacgaagaagccgagcgctacatctccggtcgcttcggctgatcgtttcctgcgcgcagcgtaatgatttgtgcgtaggagaaacggcaaagcccgccgcaaggcgggctttcgcatattcaacgcgagtattgccgagtattatcgttctcgcaacggagcgagctggaatacttcgtcggactgggcggcgacttcccgcttcggtcgatcgacgggagaacggcgggtaaagcggtacaagacaagtccgcacgatgaatactctgtgatgaatcttctgtttacggtgcgagtgtggaagaatggtcacagcaaggtccagcaaaggagcataggtgagtactggtctgatcgtcggcattgtcgttgtcgttattatcgttgtcttgattggttggggcgtcagcgcctataacaacctggtgacgctgaagaaccgtgtgaagaacggttgggcgcaaatcgacgtgcagttgaagcagcgcgccgacctcatcccgaacctggtgaataccgtcaaggggtacgcatcccacgagtctgaagtcttcactcaggtgaccgccgcccgcgccggcgtagtggctgcggccagcaacccgagcacgaccactgctcagcgcgccgccgccgaaaaccagctgtcccgcgccctgttcaacctgcaagccacggctgaggcatatccgcagctgcaagccaaccagaacttcatggatctgcagaaccagctcaaggaactggagaacaagatcgcctacgcccgtcagttctacaacgacgtggtcctgaagctcaacaccgccatcgaaaccgtgccgacgaacatcatcgccggtctgttccactttgagcaggcgcaatacttcgaggccgatgacgcttcccgtcaggtgccacaggtccagttctgacccgcttcaggcccgtccggtaagccgccggccgggcccgtattgtcttaagagagggaagatatgcggatacgattcattcgcgccggaatcatcagcattgttgccacggtggtgttggcagttatcaccttggcgataatcgggacttccgcgttcggcgattcggccgacctcagctaccgcacgctggactatgacgtgaccgccaccgcgaacggtgatttgaaggtcacgcagcatatcgacgtcaagatgcgtgagcgtaccgacagtgacgacaacaccaagccgtggaagcagctgttccagcaatacacgctgaactccggcaccttgactgatatcagcgatatcagcgtgcgcaacgtcaccgacggcatcgactacgcacaacagagcgagcccaagctgcccagtgacgtctcttccgacaaggaatggaacagcgactacgccaaccattggtatgtcgccgatgtgagcgatggcagcgaccatccaaaggcatacacgcccggtaccgatggcctcaagcccagcgcctccgccaccgaagatgacacaaccgtggagatcggctggaatattccggtcaccaccgaggccgacagcatgaagttcgatgtaagcttcaccatgcacgatgtggccaccaaatggaaagacgtggcctccttccaatgggagccgttcggcaagaagaaccaagtgcctatcggcacggtcaccggcaccgtccatttccccaacggcatcaccggcaaaacctcatggacatggctgcacaccgagcgcacctcggaaaccaagcgcaacagcgacggcagctacacgttcacggcctacaacatccacaatggcgactacctcgatgtggtcgcggcgttcgatgccgccaaagccaagggcatcgcccgcaagggaaccggcaatcatctcaaggacctgaaacaggacgaatataagcaacagcagcgctggctcgacaagcaacgattcgctgccagagctcgtctcgtgttctggattgtcagcatcgtgctcggcatcgcgttgtgcgcgtggggtatctgggctgtgatctccagcaaccggcgtgcgcaatacagtggcagcgtcgaatactggcgcgaccagcccggcatcagtccggcttccgcagcccgtctgattcgcgtggtcgatccgtcgacgcgccaatccgatgaaggccgccagctgaccgccaccatgctgtcgctcgccgtcaagaaggccatcgccatttatccggggccgtcggacatgtatcgcggcatcgacatgagccaggccacgccggtgggcttgagccaaatgattgccgccgaccaaggcaagcagtatgcggcaggcatcaccagcaccatcgtgattctgccgctcgccattgatgaggcacccaacgcgcaacagttgggattgagcgaatcggaagatgcgctgctgaacctgctcatcgtcatttctcagcgcgtgggcagcccggtattcgacctgaaccagatgaaggcgacctgccagaactggcaagacggctatattgagctcggcaaattcaccggtgcatgcagcatggaataccagcggctgggtgccacgcgctctgtgggctggcaatggatcctacccggcgtattggccgccgtgctgggatttggttcgctgctggccaacagctttatcggatacccggtggctggtcttatcgggctgccgatattcctggtcggactgttctgctcgatggccggcgcgatgaccgtgctcactgatcaagggcaggatatcgccggccggactctgggccttaagcgttatatggaagacttctccaacttcaccgaccggggtaccgccgatttggccttgtgggattggtatatggtctacgccgccgcgtttggcatttccgatcgcgtgatgcgtgaactggccaaagcatatcctcaggtcaacgacccgacttggctggatgccaacgcctccaactcgttgttctactggaactaccgcccgtatggctggtacagccaccgtcataatggtccattcgaccacgatgctgccgggcagatggacctaggcgttggcggcccagctccggcttacggaggcacgtcgtttgccggcggattctccgacctcggctcgcagctgaactccggtctggcggacatcagctcgaccatcagcgcggcagcaccatccgccgattccggtggcgatttctccagcttcggttcgggcggcggctccggtttcggcggctcgttcggtggctcaggtggcggctcgttcggcgggcggtagcgcatgcctatgtcgaaacgcattgttcgtgccctgggcttaagccttgtcggtgcgctgattcttgccgcactctgtgccggtgccttgattctcggcacagatggtgccgacctgagctaccgcacgcttgattacgatgtgaccgccaccgccgacggcgatcttaaagcacggagcatatcgatatcaagttgcgcaaacgcaaggatgacgatggcaagaccaaaccgtggagatcggctggaatattcccaccaccgtaaaaaccaacagcatcaagttcacggtgagcttcaccatgcatgacgtggccaccaagtggaaggacgtggcgaccttccaatgggagccattcggtgagaacaatcaggtgccgattggtacggtcaccggcacggtgcatttccccaaaggtgtgaccgcgagcaactcgtggacttggctgcacactgaacaaacctcggaaaccggccgaaccaaggatggcagcttcaccttcaccgtaaatgatgtgaaaagcggcgagtacctagacgtggtggccgctttcgacgcggccaaggcgggagatatggctcgtgtcgagaccgacgatcatctgcaggagttgaaggaagacgaagccgacgacgaacggttctggcgcaatctggaacgccaacgcgccacaaggcgcctgaacaactggatgaccaccatatcggccggcctgatattcgggattattggtgttgttgcagccttacgctcctccggacgttcacgttaccgtggctccatcgaatattggcgcgatcgccccgagctgagccccgcatcggcggccaaacccatcgatatcgtgacttccggcgacaaacccgacatttccgagcgccaactcgtcgcgaccttgctttctctggccgtgaagaaagtcattgctgtgttccccggttcggcggacctgtatatcggcgtggatctgaaacaagtttctccggtggagctcagtcagcgaatcgggtccgatccatacaagcgcaataatgcgcgtaccaatagcacgattgtgatgctgtggcagtacgattacggcgtatctgagggatttgatgaatcagtattcgtcgaatccgtatttgatggatctggatctggcggatctggatctgccgcatctagcgtgtccgatgcacaccagcccgatctcagtgcttctgagcgggcattgctctatctgctcaccgtgatttccgagcgcgtaggtcgtacggcatttgacatggatgacatcaaagacgcctgcaaggattggaaagatggctacaaggaactcgaaaagttcaccaatgcgtgcaagaccgaattcgcggcggcggatatcgcgccgaaaaccgagaacggatggctcattcccggggcaatcaccgtgctgatcggtggcgccagcatattcatcaacggtttggccggatatctggtggccggggccctcatcggcattcccctgatgacggtcggcatattctgcttcctgatggggaattcctacgtgctgaccgatcatggtcagcagatggccgggcaatgcttgggtctcaaacgatatatgcaaggcttctcgaacttcaagtaccgtggagtcgcggatttgacgctgtgggattggtatatggtctacgctgccgcatttggcatatccgaccgggtgatgcgggagctggccatggcctatccgcaagtatccgatccggaatggcttgatgccaatgcctccgacacggtgttctattggaattatcgtccgtacgactggtatgggttgcgtttctacaatggctcggcgttcgcggattccgtggctgacagcggattggccggagcggtgccagcgttcgggggcacgtcgttcgcggctgggttctctgacctcggcacgcaattgtcgtacggatttgcggatatcaccgcgacaatcaatgcggcctcgccatccggtggctcaggcggctttggcggtagcagcggcggttccggcggcggttcgttcggcgggcggtaagcgatgtgcttctgaaagtccctatagctttgaaagtaaaaggcccggtgtcataagacatcgggcctttctctcaaaatcgaggtgaggagacctcaacagtcaggtccaacggggcgaaagtctgtggcgccgccgagaagattgcctcgaagctagcgtgacctttctgctacaacacagcataccagcctccaccgaagctcaccagtacactggactgaccaaaccaaggtctactagcgtgccactttggcgcggtgtcgttgtgtcaaccggcataatgacgtctcaaaattcaagaggaggttctcacggtaggcaacaaccatgacaaccgtccgagacaagaccggcaataccgggaaggtctgatgaccggcctgttgatcgccctggccaatcaagttggacagtggcggtcgacggccatcatcattgccgcactggtattgctgggaatgagtctcagacgaggccactgatctatcagcggaacagccggaatccatggggttccggctcctcgttttcgctgaactgggtatgagtaagttgcgttttctattccgtgaagttgcggaaatttcatagattgattgtgcgggcaggccgagagtgtgaaatccaacgggatgcttaggcttgattgtggatatcgagtttccataagtttcacgaagggaatcaccatggcattgttccgtaacctcggaccgttctccaccaccgccatcggccacggcgaaatgccgctgaccatcgaaaacaaccgcggccatgaggtcggcatcgaaaccctgcatgcctcgctggacgccggctgccgccacatcgacaccgcttgggcctactactgctccggcggcgaggagcagaccggtgaaaagctggtgcgcgaggcccttgagacctggaaggggccgaaggacgaggtgctggtggccaccaaggtgggccacttccgcaacttcaccgacggccgccccacgtgggatgtggacggtcgcccggagaacctgattcggcgcggcaaggagagcgcactggcgctcggcgtggacaccatcgacctgctgtacttccaccgcccggacccgaaggtgccgtacaacgagtccgtcgaagccatcaagcagctggtggacgcgggcgtggcgcaggaggccggtatctccaacgcctccatcgagcaaatcgacattgcgcgcggcattctgggcgacaagctcgtggccgtgcagaaccagtactcgccgattcacctggagacccaggacacgctcgactactgcgccaaggtcggtctggccttcgtgtgctggagcccgctcggcggctaccgtcacccctatgatgagaccaagttcgacccgttccgcgaggtcgcggcggcccacggcgtgagctaccagcaggtcgtgctggcatgggagctcgccaagggcgaccacatgttcgtgattcccggcgcccaccaccccgagaccatcctcgactccctcaaggccgaccagctcgaactcacccccgaagagctcgccaagctcggctgattgcccattccccatcctcccgaatttgtgccgctgacgttggcttaacgtcacaaattcgggaggattgattcgtcttgaaggaaccgccatgcgcaaaaaactcatcctcgacctcgataccggcatcgatgacgcgctcgccatcgcatatgccctaggcagtgccgacgagatcgatctgatcggtatcacggccacctacggcaatgtcgcggtgccgctggccgcgcgcaacgcgctggcggtggtgcacttgttcggccgtgacgacgttccggtctatcccggagtcgaccatcccatcgccccggcaacattgccgaaaatgcgtggcaccacaccagacgagcggacccaggcctacgcgcgctggcagaacggcggcgcggacggctggcaaacggacgcttcgtgggcaccaactcccggctcggtggcggtccaccatcccaacggcatcggcggcgcaatcatccccgactccccgcgcgctccggaagcaccaggctcggcggtcgatttcatcatcgccgccgcgcgcgaatacggcccggacctgaccatcgtacctacgggcgcgatgaccaccatggccaccgtattccgcaacgctccggacctgaaggattccggcgtgaacgtgacgttgatgggcggtgcgttgacgctgcccggcaatgtaagcccggccgccgaagcgaacatctcccaagacccagagtcagcagactatctgttcaagtgtggcgcacgcaccaccatgatcggcctcgacgtgacccaccagaccgcgctcacccgtgagaaagcccatgaatgggcgtctctggggacgccggccggcgacttcctcgtcaccatgaccgactactacatcgacttctacctgaagaaccagccggagatccgcggatgtggactgcacgacccgctggccgtggccgccgcgctcgacccatcgctggtcacgaccttcgggttcaacttgcaagtcgatctcgagggcccgttccgaggccgtaccattggtgaccgctcgcggctgcaagatttcgacaagcacactcaggttgcgctcggcgtcgacgtgtcggaattcctcgaccgctttatggctcgcgtcaccgccgcggctcgtgggtaaacgcttatgctttggcggtcgtgtcggttgctgaagcgtcggttagtagtgcggacaatgcggttctagcttccggggtgatccacatggtgtgtggataaccctgtggataactagcggtacgattcgtcgtcgtgtatatgcgggatggcatcggtcggtgtgcatatgtttatacacttcaatatgctggagggtgaatgttccatgcctgatctacggtgacgggcggcaagcgacgaggtgtatggatggttactgcaagggatgtggcaaagcgcgccggggtgtctcaggccacggtgtcatatgtgatgagcggtagcaggcccatttccgaagccaccaaaaaacgggtgcgcaaggccatggatgagttggggtatgttcccaatatcaatgcgcgatcgttggcgggtggcaaggtcggtgtcatcggtgtgctggtgcatatggatgagaataccgatttggccgagcttcgcccgttcctggtggtaatcatggaggaggcgagaaagcgggggtctagtgtgatgctcgttccggccgacgaggggattgagggactgtgccgtatggtgcgtcaaggcgtggtcgatggcgtcttggtgttcgacgtcgagtggcatgatgaacgcctgcctgagatagcgcgattggatattcccgttgtgctggtgggtacgccagaaaacgcacatggcctgccgtgcgttgatgtggattatcgtcgagtggcgcagatggccgtcaatcgtttggcggaacgaggggcgcagcggatggtccttgttggggactggggaagaagtctcgaccgttatgcgtttgctaagttcttcgccagcgaatctcgtgtggtggctcaagtgctgggcatggaatatgagatattcatcccgcgtgaaaaaggatggagaggcatctgggcgatgaaggatgaattgaagcgaatggctcaatgccatggcggtattgcagtgcgcacccctcatgcgttagattcgctgctgcagctttgtgtggaaatgcagattcagcctggacgtgatttttccctggtcgcggtgtatgtggatggtcatgacgaagagttgcgcgtgccggtggataatgtggatccagtgccgcagtccgtctccaaagccgccatggagctactgttcgatcggatcgatggacataaaactggtgaaagattgctggtttctccgcatatcaccatccgcagctaaggaatatgtccgattctcggcctcgtgcggttcttgacgtcgcgtagtttatgcgcatcaacacgccggtgttgcgtgcgtcaggttcaatgatatattcatttatgcgcatcaatattgaagcgtataactaattgaaaggacttaggtatgaggggtaatacaaagaagttcgccctaaagtcagccgtggcggtggccgctacggcagccatggtcgtgccgatggccgcatgcggttccggtaccgcaggtggcgggaaaaccaagatttcgttctattcctacttcaaggacaaccagattggtgaggtcgtcaaggggttcgagaagaagaaccccgacattaccctcgacgtgcagtatggccaggatccggcacagtacatctcgacactgcaaacccgtcttgctggtggcaagccgccgaccatcttcaatctgacgatggataaccgtaccgatgtcatgaaatccggtgccgcgttggacatctccggcgaggatttcctcgatggcatcgacgacacaaacttcgccttgttccagcaggatggcaagacctacggcatgccggtttccgcatgggtgggcgcgttcttctacaacaaagacattctcaagaaggccggatgcgataaattccccaagacctgggatgaattcatcgagatgggtaagaagatcaactccaacggaagcaccgctttcctggaggacttcaatactcagatcgctggctcgttcaccggcttgctggctagctattacggcgagcagggtaagtccggcgatcttgacgcggacatctggtccggcaagtccactttcaccaaggactggactccggtattcaagagatgggaagctgccgccaaggccggtgtaattcctcagaaatccgttggtctgtcggccgatcaggtcaagcaggaattcgtgagcggcaatcttggcgtcatgcgctccggtccatgggatctgcctgatctgcagaagtcagacatcgacttcggcgtggcaccgttcccggcctacagcaaggaagacggccagtggatcaacggtggccccgaccaaggcttcgccatcgcgtccaaggcctccgacaaggagaaggccgcagccaaaaagttccttgcctatctcaacagcgaagagggcctcgaggcgtttacctctgccgctggcaccctgtcgctgtcgagcaagtacaatgccgaacctcctgccgaactgaaggatgtagtggataactacttcaagcagaacaagttctactgggtcaactggccgaagtcccctacggtgatgtccaccgaggacatcgcccagcagcagaagatcgtgcagggccagatttccgccaaggaggctgccaaggctctcgacgccaagtgggcgacgctgaagtaacccatcacaccaccagttcctttctctcctcctgacaaggccgtgccgatcgcccgttcggcggcaggcacggccttgctatgtcaaatcgaccataattctcaaggacttcccatgaccgctgcaaccattgggcatgcttccaaaccaaaatccaagcgtgcatcatccttatgggcggaaaacctctcctcattctggtttcttctgccaatcatcatcatcttcttcatccttaccgtcgtgccgttggcacagtcgttcttctattcactgaccgattacgacggatactccgaaaacttcagcttcgtggccttcagcaactacgctgcgatcttcaaggacccgtcgctgctatccgccctgggcttcaccctgctgtatgccttcggcaccacactgttggtcacctgtttcgccattccgctggccgtgaccctcaacaaagccatgtggggacgtagcttcgcccgttcgctgttcttcttccttggtgtcccggcgcaggccatcattggtctaatttggcagtacatcttctctccactgggttccggtgtgatgaacaaagtcatcgcggtattcggtataccgaatatcccttggctggccgatgacaattgggcccggttctgcgtgattttcgtggccgtatggatgcaggtcggctggcacgccaccctgtacctcgcctatctgcaaaccatcccggcggacctgtacgaacaggctcgtgtcgacggtgccaattcccgtcagcagttcttccatatcactctgccgcagctcatccccggcatcgtcgtctcgatgttcctcttgatgaccggcggactgaaaatctacgatctgccgtacaccttgaccggcggtggccccggatacgccaccaatacgctgtcccaggccatcatcctcaaaggtatcggccaaagtcagtacggactgggctcggcgttgtccgtatgcttcaccatcgcctgcattctcgtcatcgccgcgcagaccggcattgccaacgccgtggaaaagaggttccaatgacaccgtctcagcgtgaactcgttcgcaaaatctttcgcaccatcgtggtgcttggcctggccctgatttgcgccgtgccactgtactatgtgatcgtcagctccttcaagacctcaatcgatatgatcaagaacccattggggcttccggagcagtggacgctggagaactacaaggaggccttcgccgacggcaccatcattcgtgcgttcgtcaacacgctgattgtcaccgtggtggcggtgctgctgcaggttctggtcggttcgatggccgcattcggcgtggtatacaagaaatccaagttcaccgccatcgtcggtggcgtactgatggtcaccttcgccattcctgtgcaggccacaatgctgccgctgtaccgcatggagtccgagaccggacttgtggattcgctgcttggcttgattgtgctgtatatgggctcgtgtgtgttctgctacttcctgatcgtcggctacatgaagtccctgccacaggaattgttcgaagcggccaaaatcgacggtgccggcccatggcgcatctactcgcgcatcgtgttgccgctgatcaccccaatattgaccaccgtcgtcgtattccaaaccatgggcacttggaacgacttcctcctgccgagtgtgttcctcagctccacggataaccagaccgtcgtgctgcaggtatacaacgccgtgcagcagttctccacgaactggcctctgttcatgaccatcacggtgcttgccctggttccggtgttcattttcttctgcttctgccagaagtggattgtctccgggttggttgccggctccgttaagggctgaggacgaaatgagatcagtcatgagtgacgtacagaatgctgcacagcaagccgctatcgaacgtgctactgcagaagtcggtgcctcaacggatttctctcaattcgctggaagttcgctgccgttcggcaatggccaggttcttctggatcaatccaccggtgctcccatcgcttttgtgaacgaagataatcccaatcgtcattatctgctggacgacagtgtctcttggcacacatcggaccagtattggggcagcggctatgtggtcactaccagtggtggctcgcagtggaacacgccgcaggtatatggcataaccaatggtctggaacagcagacgttcgcactgtgcggtgcgggactcgtcctggacgttacccgcagtagcggcgaacggctgaccgagcgttatgaatggcgcaacgtttcgaaccagccggtgaccatcacaggcttgggcatccagaccccattgaacgaccggtatccgggcgctcgcaaagcgttgagggaatgtgtgcatgcgcatatattcgcgggaggcgactggagctgggtgctggccgagccgatggacggccgcggtgcgcgcttggggctgatcgttacggaaggcgcaatcaatgcctatgccatccaatcgcgtaaccaggtcacgtattcggatatccgcgggcacatcgtgctgcaggtcaccgattatgcgctgaatcctgatgcgttcggcgggcagccgaccatcacgctggagccgggggcctcgtatgcgctgacgtgggaactgggatggtatgcggacgaggatgcattcctggccgctacgattgctcctgcatcgttctcctcgttaagcgccactgtgggcgggcatatcgatatcgccacgaatcgtgctgttacggcgctggatgacggtcttaccgtcgaacggactgtgagcggagttcggttgacggccgaacaggcgggtacctaccaactgcagcttgtggatggagaccatcgtgcacataccgaagtactcttccacaagacgttgagggataccgtcaacgaccgtgcgcgatacatcctggagcatcaggtggcgtatgagcgcgtcggcgcgttggctggggccatcgtggctaccgatacccgcaccggacagcatgtgctggatcccagttgggatgactggtcggatggttccgagcgtatcgccatgccggtattgctacaacgtgcgctgaatcttgggctgcttgacgagtccctacgagagccggcccagcgtgccgccgatgcgtggcgcacgttcgccgagtccgcgctcatcgacgccagcggcgcggtacgtcgcggctcggggctgccggaatccaaattcggaggccgtatctatgactgcccgtggattatcagtttcttcaccgaacattatctggccaccaaggatgcgcacgatctcgatatggcggtgaacatcgccgatcgggcggccgaaattggcggcgaacacttcctgagcatcgagttcgccgaatccagtgcggccttggcgcgtgtgcttaagcagaccgggcgaaccgaggagacccaacgtctgctcgatcgtgtggtggtcagtgcggactacttcctgggattgggtatcgacctgccctaccatgaggtgtcttacgaacagtccatcactgcgccgttggtgagtctgctgttggaagcgcatcgcattaccgggcgcgccgaatacctggatggtgccgtggagcgattggattggctattggcgttcagcggcccgcagccggactcgcgtctctacggtgtggcgattcgacattgggatgggtattggttcggcatcaaccgacaattcggtgatgtgttccctcattattggtccacgttgaccgccgaagtgctggcacggttgccgcaagaaaggcgctccgcacgtaccgatgatttggccaaggcgattttcgaggccaatatggcgaactatggcgcggatggttccgccacgtgtgcctatgtgtttccctccaacgtcgatgggcggtccatgcatcaggccgacccattggccaatgatcaggactggcatctcaatatctggatgcgcatgattgccgaagagggcttctctgcgctctgagcccagcggcgctctattcggggcacgccattgcagcggtggcgtgcccttttggggatgctcgaatagggaagtaggcaaggatttttcatttggtgccgtccgagctaattggctataaacgtatcgaacgtgcctgtaaccgatggagaaaacgtaaggaaagaattctcggaactttgtcatctgcctgaactgacctttagcagtccgatgccaatcagctgccgtatgacgtgtcggccacgcagtcatcgcaatcgttgctctccggtatgaggaccgccgcgactttttaagcgataccagagacataccgaggccggagccacgagacgagtaacagtttgcggtagatccccatcgctctactgcagagcatgaaccgccttatcaaaacgttcggccatcagattgatggaatgcatgtcaatgcggcgcatcgctgctcgagataatgcctgagataaggctgatcgcaatgtcggcaaccaatgatccgcatatttacggcttacaccgaacaaagacagactctcatcggacatcaatttatctatatcgacttcggtgtcacctaataatgacatctggtgtgagtcgggtagcgacggatcgaatggttcaggattcatgtcaaaagcgggtgccaattgccaggaattattcttacgcaaatacccgtggtttcgtagatggtcatcagtgttgccgatggccgcgccaaacattgctctccgccatagctctatggtgtctcctcctgccctacgcgtaaattctgctagatccaaccagtctccgccgtccccatctcttgcttccagcgcggtcattgcggatatataaggtaatcgctccattcgctcaactgatggtgcagacacgcgatcaaaacggtgagtcaatagcacggtccggcttctctcctccgaatcctttattgcaatgacgcgatgttcgggcactttgatgccggccatgttcgcgatttccaaggtgacggcttcccagccgataacatcccaatcatcgccgttcggtttcggaaatttggccagccacagcgcattacgatccgacaccgaagctttaggtcgtgcgcctccgagtgagccggttgcccgatacaacctgcgtaaggagacatcacttacctcgcggttctgttccaccgcatccgcagtgtccaataactccggcagctttgacagtacgggtactccttcatctcctgccgctggcttgccatcaacaatgaatcgaatggcaccctgtcttgtcagatcgttgacgccgaacaaatattccgactcgctgacacgcgtccgtttaagactgcgggaaaacacctttctgccccaacggtctggggcggaatccgaaaatggaccaagtccagagaagaagaatggggccagcgagcggggcatagatgggaagaggtcgaaggaatcgctgctgattgtgtacgtcgaatcatagcggaacgataggtcgtcgccagtcgcatacaatgtgccggcaggagcttccattccaggccctagcgtaatcagtacagttgattcgatagtttttgccatcagggattcacctccgaacgcgcttcgggagttgttggccagcgcggagacgcccaagatcggtggaataggggtcgcatgcggctacgagtgtgtcagcaagttgcaacacgcgcgcgatggttaacagcgaatctgaccggacagccttgccttgctccagatttgacactgtggtcgggctgacaccagagcggtgtgctacatccgcaaccgtcaacatcagtagtttgcgctgttgcgagaactgttcgcctaggatgcgtaaatcgcgtttggtggtggtgggcacatacttcattgcgatactccgagtgttataacatatagttttccatgaataaaatcatttattcactagtatactattgattatctgctatgcgataccggaatgaggaaggtttagcgtctcgatgtttctgctcatacgcaaaaggactttctgccaacaaatagccagaaagtcctttggtctcacgcgtatatgaggtttacaatcccggaatcagaccgccgggcggatcgagcgtgaggtattgctcctccagatcgatgtcggggaccaaggcctccacgaacgggaccaatgcggtcttctcgaccacatcctcgcccttggaattctggccggttaccaccggctcggtcaaacgaatcttgagcagggactgagcgggggagtcgaccacatccaccactttgccgaccacttggccggcgggcagtcccagaccgttgccctcgactagacgggcctcaaggccaataagatccttgggataccattcgtcggcttcgagcatatcttctgcgtcgtcggcctcgccatagagttcgacaccgtttagggcctcggcggcattgcggtcgtcgacgccctcaagcttgagaatccaacgatccttgaacgtgcgcgagccctcgacgatgtactcggtctcgccatcctggctgtagagcacggagtccggctcgaagcgccactcgggatcatcggtgtacaggcgcacggtgacttcgcccttcaggccctgtgcgcggccaatacgagcgaccctcagcaactcgagctgctgagggtcgtcgtgcatgtcttgctgtgccatgctgtgaattgttccttatcggttatcgacggacgtccatgatgtcaacgcggaccttgtggtcagacagtgcctgaatcacggtgcgaatcgcgttggcggtgcggccgccacggccgatcacacggccgatgtcttccgggttcacgcgtacgcgaagcagttcgccgcgcgcgttctcatgggacttgacggaaacatcgtcgggaaaatcaacgatgttcttgatgaggtgttccacagcctgtgcaagcatagctagcctttcgtttccgctcaggcctcggccggagcttcttcggcggcctcttcagccggggcttcctcagcggcggcagcggcttcggcttcagccttggccttggcggcagcttcggccttggcggccttcagcttctgagcctggttctcaacggccgcgatgcgggcctcggcgtccgggccagcctcaacggtcttcagggtgccttcggcaccttcaaggcccttgtacttctgccagtcgccggtgatgttcagcagcttgaagacgggctcggacggctgagcgccgacgccgagccagtactgagcgcggtcagacttgatctggatggtcgagggctgggtgttggggttgtaggtaccgatctcctcgatgaccttgccgtcacgcttcttgcgggaatcgacgaccaccacacggtagaaggcgtagaacttcttgccctgtcgcttcagacgaatcttggttgccaaaatggctctccttgtaatgctaggtgtgcgggttctcggtttgccatgtggggcatgaccggccggaatccacgtgtcctcgcggctcggggtgtagagggcgccacgcgcgcgcgaataaccgtactagtgtaacgcggaagccggatattgcgcatcggtccggtcgtgacgcacggaatcgccggacggacggcgtgtcggcggcgcacctaccgtcttcatgactgatagcctgattgatggcagtgcgagacgggaaagggggcgctgatcgatgggtgagtgcgtgatcggccccggtgcccgggcgcgtgtggatgcggatgacggattcttcttcggcatgggggccttcgagaccatcgcggtatccggcggcgcgcccgtgtttctggacgaccatctgacgcgtttgggtgagacgttgcgatacctcggcatcgaggcgcgtcgcgccgatctggagacgatggttctccgcgcatgcgccggactcggcgcatcggacgattcggccctcaagctcacggtcaccgagcgcaaccgcgtcgtctcgttgagacgcaacccgtatgccgcgccgggggcgaagcgcgtcttccgctgcgacttcgccgatgtgcgcaggaacgaatcctctcccctcgcgcgcatgaagacgttggcgtatgccgaaaacatcatggagaagcgtcgcgcccgtgaccgcgccgtcgacgagccgttgttcctcaatacgcggggcgaggtcgccgaaggggccgtctccaatatcttcgccgtcatcgggggagacgtcgtgacgcctcccgtctcctgcggtctgctgcccggggtcatgcgccatgccgtgatcgggttcacgggggccgtcgaacgcccgatcatgcccgacgagctgcttcgggccgacgaggtgttcctcaccaactccctgatgggtgccatgcccgtggccggtatcggcggcgtggaattcgaaccggggagcgtgtcgcgcgacgtgaacgacgcctatgcccgcatggtggcgcggacgcgggcccgggcgcagacgaaggagttccggtgagcgcgcaggtgttcaagctcaggacgttccgaccgcttgccgacatcgtggagcgcgtgcgcggcgaggaacgcttcgcgttcctggactcctcgatgccgggggcgcaggggcgctactcgatcctgggactcttcccctatcttgtgatcgaacacgggcggggcggatgcctcgtcgacggcgttgccgtggagggtgatttcctcgatgtcgtgaagaagcggcttggaccctgcgatggcgcgcgcgatccgcgtctgcccctcacgggaggcgcgatcgggtatctgggatacgatttcggccgcgaatcgtgcggcgtgccgactaggcacgatcccgtcgcggccacaccggaggcgagcatggtcttctacgacctgctactcatcgaggacgtccggtcgcggtcgttgttctgttgctgccaggggcggacgatgacggccgcccacgccctgacatgggcgcaggacctggtggattcatgcccgcccgcccctcatcccgcgcgccgacgttcgctcgccccatgctcctccgatttcacgcgggccgggtacggcgacgccctggcccgtctcgtcgatcatctgcgcgccggcgacgcctacgtcgtcaacatggcgcagcgcctgcgcctggagacatccgggagcccctatgccatctaccgttatctgcgcacccacaacccggccccgttttccgcctatctgcgcgcaccgggtctcgacgtgtgctgttcgagcatggaacggttcatggagattcgctcggggcatgtggtgacgcggcccatcaaggggacccggccgcgcggcggcacgccggacgaggatcgggcgaaccgagaggaactcgcccgcagcgagaaggaccacagcgaactgctgatggtcgtggacctcgaacgcaacgacctgtcgatcgtctgcgaaccgggttccgtcggcacggaccccgactttgccatcgagacgtatccttccgtattccatctcgtcgcgaccgtcgaggggacgctgcgcaaggatcgttgcgccgtggacgcggttcgcgccgcgttccccaccggttcgatcaccggcgccccgaaggttcgcgccatgcagatcatcgacgagctcgaacgcgcgccccggggattgtacacgggcagcatcgggtatttctccgatacgggcgattgcgatttcaacgtcgtgatccgcaccatcgtgcgggagggaggcgagacgtcgctcggcgtgggcggaggcatcaccgtggaatccgatttcgacttcgagtacgacgagacgatgcagaaggcccgggcgctgcgtgaggccgcttccgttgacagggggagcgtcggcgagtacaatcacgggcaaaacgaataactatcttcagggcagggtgcgattccctaccggtggtacagcccacgagccgcaaggcatgatttggtgagattccaaagccgacagtacagtctggatgagagaagatgaaagtacgttcatgcttcgtcgtacgccctgaaatgatgccatatcatttcagggcgttttcgtgttcgcatgaaccttcttttgtatgccttggatagcgtatgggcgcaacatgcttggaggcgtacatggacgatgcgcagtacatgggactcgcgatcgagctggcgaagcgaggggccggatacgtgaaccccaatcccatggtcggcgcggtgatcgtcaaggacgatcggatcatcgggcaggggtatcacgaggagttcggcggattgcacgccgagaggaacgcgttgcggcattgcacgcagtcgcccgccggggcgacgttgtacgtcacgcttgagccgtgctgccattacggcaaaacgccgccatgcacggaggcgatcgtggaaagcggcatcgcaagggtcgtcgtcggaaccttggactgcaatcccgtggtgtccggcaagggcgtgcgcatgctcgaagaccacggcatacgggtcgatgtgggggtgctggccgacgagtgccggcatctgatacgggtgttcagcaaatacatcaccacgcatacgccgtatgtcatcatgaaatacgccatgacgatggacgggaagatagcgacccataccaatcaatcacggtggatcagcggcgaggagtcgaggcgtcgggtccatcagctccgtcgatccgtcgcggcggtcatggtgggggtgaacacggtgatcgaggacgacccgttgctgacatgccgcatggcacacggaaggaacccggttcgcgtcgtctgcgatacgcgattgaggacgcccctcacctcgcggatcgtgcagacggcgaatgacgtcaggacctatatcgccaccgcctgcgatgacgaacgcaaggcggaggactaccggcggcacggctgcgaaatactcgccgtcggaaggaagggcgaccacgtcgatctggcggacgtggtgcggcgcctgggggatatgcagatggacagcgtgctgctggaaggcggtagcgcgatgaattggagcgccctcgaacagcggatcgtcgatgaggcgcacgtgtacatcgcgccgaagatattcggcggcaccgcgaaaagcccggtgggcggccaaggagtcgccctgccttccgacgccgtcatgctccggccccgcgcctgctcccgggtgggagaggattatctggtggaaagcgaggtggtgtattcatgttcacgggaatagtggaggaagtcggaacggtggcggacatacggaggagcgccgccaactgcacgctgtcggtcgatgccacgaacgtgatggaggacctccatatcggcgacagcatggcggtgaacggcatctgtctgacggtcgtcgatttcgaccggcgacgcttcaccgtcgacgtgatgaatgagacgtggcgcagaacctcgcttggcgtattgcgccgcgggaacggcgtcaacctggaacgggccctgccggtgaacggaaggttcggtggccatatcgtcaccgggcacatcgacggcacgggcagcatatcctccgtgcggcgcgaaggcaatgccgtgtggtaccggatcgcggcgcgaaacgagatactcgaaggcatcgtcgagaaaggctcaatcgccgtcgacggcatcagcctgacggtcgcggagatcacggaaagggacttctcggtatcgatcatcccgcacaccttggcgcagacggtgctgggcgagaaacgggtcggcggcgtggtcaatctcgaaaacgacgtattgggaaaatacgtgcggaacatgatgacgacccggacgggactgacgcaggatctgctgtcccggtgcgggttctgagaaaggatgcatgaatcatgaaccatcagtcggtgcaagcggcgttgcaggcgctgcgggaagggaagctcgttctggtcatcgatgacgaggaccgggagaacgagggggatctcatctgtgccgcgcagtcggccaccacatggaacgtcaatttcatggcaacccacgccaagggattgatctgcatgcccatgagcgagcaactggcccacaagctgatgcttccgcccatggtcgagcacaacaccgataaccatgaaaccgcttttacggtgtccatcgattaccgtggcaccacgaccggcatctccgccgaagaacggggattgacggctcgcatgtgcgtctccgatgacgtggaacccctcgatttccgcagaccggggcatatgttccccctggtggcgaagaagggcggcgtcctggaacggaacgggcacacggaggcgaccgtcgacctcatgcggttggcgggattgcgtgaatgcggcctgtgctgcgagatcatggacgacgatggccggatgatgaggacccccgacctgacccggttcgcccaggagcatcagatcccgctcctgaccatcaaggaactgcaggaatacaggaaagcgcacgatacgctcgtcgaatgtgtctcgaccgtggcgatgcccacgcgatacggggaattcacggcgcactgctatgtgaacaggttgaacggcgagcatcatgtcgcgctggtcatggggaatctgggcgatgggaccgatgtgttgtgccgggtgcattcggaatgtctgaccggtgacgtcttcggctcgttgcgttgcgattgcggtcagcagttggacgcggcgatgcggacgatcgcggagcatggctcgggcgtgctgctgtacatgcgtcaggaagggcggggcatcggtctggtcaacaagctgaaggcctaccgtctgcaggacgagggcatggacacgctcgacgccaatctcgcgttgggattccccggtgacgcgagggagtactacatcggagcgcagattctcagggatttggggatacggtccatgctcctgctgaccaacaatcccgacaaagtgtatcaattggaagactatggaatggagatccgcgacagaataccaatcgaaatcgaagccaatgcttacgacagtttctatctcaaaaccaagaaaaaccgcatgggacatatcctgaacatggaggaggaataaatgcacacgttcgaaggcgatctggtagccgaaaacatcacgataggcatcgttgtggcgaggttcaacgagttcatcacctcaaaactgctggcaggggcgctggacaccctgaaaagggagaatgtccgcgaacaggacatagcggtggcctgggtgccgggcgcctttgagatacccctgatcgcgtcgaagatggccaagagcaagcgctacgatgcgatcatctgcctgggcgcggtcattcggggcagcaccagccactacgattacgtgtgcaacgaggtctcgaagggaatcgcgcagaccagcctcgacaccggtgtgccggtgctgttcggcgtgctgacgacggattccatcgaacaggcgatcgaacgggccggcaccaaagcggggaacaagggttccgagtgcgcgcagggcgcgatcgaaatggtgaatctgatccgctccatggacctctgacggcgaaccacccggctgcgggcgggggtcttccagacgttcccgcccgcttcgcgccacacggccaaggcccgatcgatcgccgcgcccgctaccgcagggtgagcgttgcggccaaagccagatggtcggtgtccggcacttcgaaggacgtcacgccggacggtctgagcccttgggtgaacagaatatggtccagttcgatgcgcggccacttgagccagcgcgggaaggtgaggttcggtccggcggcttgaatcagactcgcgtccttgaatccggacttgagcaacgcgcggaagctcgggtggtcggtgctcgagttgagatcgcccataacgacgacgatgttgcgattgctgacggattttgcacgggcgagttctcgcagacccagaatgccggccgaccaatccgcgcagccgcgcatcggcgatttcgggtgagccgaacaaagcgtcaccgtgcgagtaccggaggttttgagggtgatggcgggaacgtcggcggcagggatggagaccacgttgggcaccgctgcgctcggctcgtagcgggaatagatcacgttgaatccgccattatcggtctctttggcgtctccgaactgatggtaggggaggagttcgttgatgtcggcttcggtaagacgtgtgatgaggtcgtcggtgacttcctgcaaggccaatacgctgatattgcgttcgcgaatattgcgaatgatttcagcggcgtcggcgcgtccgtatcgacaattcatcgtcataaccgagaactggggcgagagtgtttcacgcaccgtttcacggtgcccatcggggactgtttcgggtccttccttcggagtgtttgaggtgctcgatgtattgctgttatggctttttgacagcgtcggcgaagttgtttcacgggctgtttcacggtgggattctctgcgtttgccggctgggtcgattgacgtaccccagtagttgatgcgctgtgagctggcaatcagcgcgaccacaataagcgacgacatcgcagtccattcatgttgccatgcggcgaccgcggccagaatcatcaaaggaacccacagcagcggagtcagggcaatcatgtacggaagcggcatacgggcctcgagaccggcgggcagcgcgcttaaggccgtccataacagtgcgatgattgccaccgcgctgaagattgtcgtcatggaagttcctttcgaaatataaattgaaccgagatataacttggctcccctctgcgaggggagccaagttgtgagatcagcggccgaacagtccgccaaggcctccgccgaggttcggcggcagttcagtgccaccatcgacgttgcccatcatctgttcaaggccggcgggcaggggcgggttctgcggcttcttggcgaaggcggaaccgccggtcgaaccggaggatttgccggccagcttgtcgcgcaatgccttctcctcggcctcgcgcttcatcggattgccggatttgccgcctttcttcttgttcttgcccttcttcttgccgccgcccatagccgggccgccgaagccggggatgccgccgcccatgccgccacgattggacatgcgcttcatcatcttcgcggcctgctcgaaacgctgcagcaaagcgttcacctgagaaaccgtcacgccggaaccataggcgatacgggcgcggcgggaaccattgataatcgacggatcgcggcgctcggccggggtcatcgagcgaatgatcgcctcggtgcggtcgatttccttctcatcgaactgctcgagttccttgcggtgctgggccatgcccggaatcatgccgagcagcgacttcatcgagcccagcttgcgtacctgctgcagctgatcgaggaagtcgtccaggccgaaggagccttcggagattttctcggcggccttgcgggcctcttcctcatcgaactgcttctgcgcctgctcgatgagcgtcatgatgtcgcccatgtcgaggatgcgcgaggccatgcggtccgggtggaagacctcgaaatccttcaggccctcaccgttggaggcgaacaggatcggcttgccggtcacggacgccacggacaacgcggcaccaccgcgggcgtcgccatcgagcttggacagcaccacgccggtgaagtccacgccctcatcgaacgccttggcggtcttgacggcgtcctggccgatcatcgcgtcgatgacgaacaggatttcgttggggtgcacggcatcgcgaatgtcgcgggcctgcttcatcagctcctcgtccacgcccagacgaccggcggtatcgatgatcaccgtgtcgtagagcttctgcttggcgagttcgatggaatcgcgggccaccttcaccgggtcgccggagatctggcccggagctgcgacggcctcgccgccatcggattggacgcccttttcgggagcatagacgggcacgccggcgcgttcgccgaccacctgcagctgcgtcaccgcgttcggacgctgcaaatcggccgccaccagcagcggcgtgtggccggaatccttgagccagtagccgagcttgccggccagcgtggtcttaccggcaccctgaaggccggcgagcatgatgatcgtcggcgggttcttcgcgaagttcagcggacgatcgaccccttggccgagcacgtcggtgagctcctcgttgacgatcttcaccacctgttgggcggggttgagcgcgtcggacacctcggtgcccagtgcgcgctcacgcaccttgccggtgaaggaacgcaccacgtcgagcgccacgtcggcgtcgagcagcgcgcggcggatttcacggatcgtaccgtcgatatccgcctcggaaagcttgcccttgctcttcagatgcttgaacgcattcgagagtctgtctgtcaaagatgaaaaagctgccataatgggcaacagtctagccgccacgcgggaaattgcggtgttggggacgactctttccggggattgcgtcgcggagtagtcagggatgttgggcattcagacggcaaatgccgtgccgtccgctcgtggcgaagccaatcgagtgcttccgataccatggaaaccgtaaagaatcctgtgttttttggaatgcttacgctgttttgaaaatcgctggacaccgcttatacgcagactgccgtgcgctccgaaccatgacgttcgggccaacgcagacatgccgtgcaataaggaaggcccactgatgcccacccaaaaactactcgaacgcaaagccctgatcgttggcatcgtcatcaacgtgctgcaggtcttagccggcgtggccgtgttcttcatgaccggcctcaaggccatgttcctcgacttctccttcaccgcgatttccgtcctgtccggaatggtggcggtgtacctctcgtcgcgcacggtgcgaaccaccgagcgcttccccaatggcatgttcgcactggaacccatctacgcgatctgcaaggccattttcaccatgtcgttgttggtgtattcgctgattgacgtgtgccgagtagcgtacgactacttcgtgttcgggtccggcgaacgcattgaaaccggcccggtggtcatctacgagatcctgaccgtaatagtgtgcttcagcctatacatgtattaccggcgctccaaccgctccatcggcgattccagcaccatgctcaccgccgagtgcaagagcacgttggtcgacggatcaatgtcgttcggcatcggcgtggttgccatcttcctgatgctgctaccggccggcggtccgcttgacttcctgcactacaccggcgatttcttcatcaccgtggctttggtggcattgaccatcaaggaaccgttcagcgtgctcaaagaggcgttcgtggaattggtcggcggcgtgcatgacgacgatgagaccaacgcctacgtggaggccgaggcacagcgccatctgcctgccaacaccgactacgagcagacgctgatcttcaagaccggcatgaactacaccgttgacgtgtatctgagcggcatcggcgaaaccattgatgtagccgacctcatcgaatgcaagcgctcgctggagaaggagctcatcaagcgcctgcacatcgtggacgtggacttcgtgtttgactgattgatgggtttgaagcggctacttcaggctccaagtggaaccctgcgggccgtcttcgatggcgatgccggcctcggtcagggcgtcgcgaatctggtcggccttggcgaagtccttggccttgcgggcctcggcgcgggcgttgagctgctcggcaatcagtgcctccagcgccgcatgttcgggcgactcggccgtgccatcagcggcaccgccagcagacacccacggctcggccagcgggtcgagacccaaggtgtcgagcatggcacgcacggcgagcagcgcctcacgcacctcggccttggcggtttcggaatcggcgcggtcagccagctgtgaaagcaacgtattgccggaacggatggcggtgaagatcgcggcggttgcaccagacacattgacgtcgtcattcatggcggccacgaaatcggcgggcaggtcgtcggcggagacggcagcaacctcctcgcgagaaggctgaccgcctagtgccacaccggcgcgctcgatgaagttcgagatacggtcgtatgcggcctgcgcctcgaccagcgcctgatcggaccattcgagcatcgaccggtactgcacggagcccaaagcgtaacgcaccacccaagcggaatgctcggccagcacgctcggcacggacaggccggtgcccagcgacttcgacatcttctcgcccttggcggtcacccatgccgaatgcatccagcgcgcagcagaggggtagccggccgcgcaggtctgcgccatctcgttttcgtggtgggggaagcgcagatccaaaccgccgccgtgaatgtcgaagccatcgcccaggtaacggtgggacatggcggagcattcgatgtgccagccagggcgacccacgccgaacggcgtcgaccaacgggcgtcctcgggatcggtgtccttgggggccttccacagggcgaaatcacgcgggtcgtgcttgtcgggggaggcgtcggccgggtcgaccggattgtacttgtcggcaccggtggcgtccacggacgggcccatgcggtcggccacggcagcggcctcatcgacttcggaagtctgcttctggtgggtgagttcgccgtaatgcggccaggatgccacatcgaagtacacgttgccggtgggcttgccgtccgcatccgtgaccacatagccgtggccgttgtcgagaatgcgctgaatcaggtcgatcatgtccgacatgtggccggtggcgcgaggttccacggtgggcggcagcacgccgagcgtgttgtacgcctcggtgaattcgcgctcgtaataataggcgcgggcccaccaacgctggccggcggccgcggccttatcgaggatcttgtcgtcgatatcggtcacattacgcacaaaagtgactttgtagccgagcttcaaaaaccagcggcgcacgatgtcgaacgccacggcggcacggatatggccgatatgcggtgacgactgcacggtggcgccacacacataaatgccgacttcgcccggcttgagcggcacgaaatggctgacctggtgcgaggcggtgtcatacagattcaggccttctgcggccttggcaacatgcaccggcgtcaggcttgaaggcatgacggaaatgttgaaatcctgcggttcttggctgtttcccataacgctcaagcgtagggtccgaaccagacatgctgaatcgttactcgaagagtttgatgaacgcttcacaggcggggcccgaacgaggtgacagacggatgtgaagcgggacaacagtctcgcgagaatacgtctttgaccgctgcggaaactgcgagattcatggatttgccctgctcgttacgcaaacggggaacgctcgtgccacaatagaagtcatggccacaccacaagtgctcattttgcaacatgtcccatgggaacgcccgggacgcatattgtcgaacctcgaagacatcggtcttgagacggtgacgatgaatatcgtcgacaaaaagaaaccggacttgcctgatttcggcgaactggctggcgtggtaatcatgggtgggcctatgggcgcgcttgattacgacaagtatccggggctgaaggcggaagccaagttggcgcgtgccgccgtggcttcaggcaagccgattctcggtgtatgcctggggcatcagattatcgccactgcgcttggtgcgcagctgcgcaagggcgatgcgccggagattgggttcgcgccgatcaagcgtgtggacaagcatgacttcttctccatgtgggataagcagctgacggtgctgcactggcataacgacgtggtgggcttgcccgagggaggccagctgctggcacgttcgtcttccaccaaggtgcaggcattccgactgggatccgcgctgggcatgcagttccatcttgaggtgtgcggctcgctgctggacgaatggctggatgagccgagcatggtcaaggatctcaaggccgcgggtgggtccaagtcccaattgcgcgagcagttcgcccaatacgatcagctactgcatccgctcgccgagcaagtgttctccggttttgcggcccgctgcaactcctacgctcagacgctgggcaaataacctataaccagaaaaagtaatgcaccgcgttcatgacgcggtgcattacttttatcgacagtccttacaccatgactggttacggatagtatcattccccatatttcggtaaccgaaatcacttagtggtttttcttttccgcaatgagggcacatgcgcgtaggctcactgccgttgtatccttgagtctgaattacagggcgtttatcattaaccatgatcaagcctccttttgatgctgatactatgacttagtatatatcgtacaatgaattattcaaattcctcagtagtatcgggaagcgtgactatccatcgtagccagccagagacgctggaagctctacgatatagagtagttgcatctttacaaacattatagcgcctcatcctatcaattatagcttcgcgagaggggaactccccagtgtcgatgatttgcgaaagaagatcgtgaaaaatgttatgtctgacgattaacttaatgagctctaatctgcgttcgcgaagtttcaagcgcattaatttgatgcctgtcaaggaaagttgtgaatgacctcgcaacggtctctcgattactccgagatattctcctgccgatgaataatatgatgcttgacgaatgtcaaattccatagatgatgcaatttcagcagaagtcatattgggtactttatctaattgttctattagggaaatcaaccgtgtgaataaatctgcttgaataaatggtatcgatgtatcgtcgtaattgtcgtctatttctggtgaattcgaatcgataattctttgtatgtcgtcccatgaaattgcagaagactgaaaagaataatttctctgttgaattagatgaattgacgaataatcatcctctttagcaaattcatattcatataagtgatatattgaatcgatatactgcgaaaagaccaaacggattggtttccttacgcgttcacaccacaatcgatatggaaaatacaattgccttatgtgaaaatctggatgaggtacattctttgcctccataataattatggaatcatcgttttcaaatcctccgtcgatctccagttgagcgctctggacatccacctgccgcttgccgccgttggtgagattgacagtaaatgagaaatcattagttcccattcgaccattgaaagtttccactgtattatttgtgcctaagaagtcatcaagtataccagtgatgagcattgcattgatcgcattggattcagtggacagattgttgaaatcaatagattccagtggtaagggagggacgtactttactgtatttatatcattttccgggaatggctgatacagcttgaaattggaaagcacgtaagcagaacgggagactggtaatatattgatatcagatttctttaatatcgtaggaagactttcgctcgagtcccattttgccataagtcgtggctctcgatatttcttaatatccttagcctgtatgatgaattccccatgttgttttattgcattatctatttgatattcctgtatcagctcggtccaagctttattggctttatcttccatcgattagtacttccttaattgctcctcgtcggtcggctctagaattaatcgaacgattcgctgatacagagatgattttgtaatctttatatagctctctgatttcttcacaatccgaatttgattcgaggaatttgattccctgcgacgcaagcttgtcgcagttattttttagacgcaattgctcgttgtaatcgaatcctccctctgtataaccggtaaaggatgcagaggatgatatgggcatatatggagggtctaaatatacaaacgaatccttatcaagattttgcagggctaattcgtaatcgccacataatatctttatatttccggacagatattttgctaatgctcgtatggctggtctattttctattgctgggttattgtagcgaccatatggagaattgaattgtccagcagaattgaccctgtataagccgttaaaacatgttttattcaaatagataattcttgcggcgcgttgcactgggcttctttctttaaaatttggttcgcgatcttgtgctcttatagaataaaaataatctgaactatttttttcagcatggctatgaaggagatcaagcaattcatcagtgtgatctcgtacgcattcgtacacatttattaattcactgttgtaatcgttgatgatagcattctctggttgttttgccaggagaacagctccaccgcctacgaagggctctacatatgttgaggattctggtattagaggcaaaatctgatctaaaagttgtcttttacctccaacccatttgagaacgggttttaggagtatttttttagccatgatattctcctcttttgccgatctttctattatagtaggttgttgggacatattcttgggagtcctatggcctgtggtggcgctacattggtgagtcatgccgacttatgacattggactggaacacgtttcgctcgctttcgccaccaaaaccatcttcactgatgtgacgcagggtgttttcgagggcgaccgcatcggcatcgtcggcaagaacggcgacggcaaatccacgttgctgcacctgttccgcggcacccaggagccggattccggccgcgtgacgaagcgcggcggactcacgttcggcatgcttgaccagcgcgatccgctcgacgacaacgccaccattcgcgaagccgcacttgaggggcgcgccgactacgaatgggcgtccgacaacacctcccgtgaaatcgtcgaggcattgctcggcggcatgagtctggatgccaaggtcggctccttgtccggcggccagcgtcgccgcgccgatttggcccgacttctgctcaaggattgggatattctcgcgcttgacgagcccaccaaccatctcgacgtggtcactatccactggcttgccgagcatctgaagaaccgctggtccaaaggccagggcgctctgttgctcgtgacccacgatcgctggttcttggacgaggtctgcgaatcgatgtgggaagtccacgatggcgtgatcgagccgttcgagggcgggtattccgcatatatgctgcagcgcgtcgaacgcgaccgccaggctgatgtgcgtgaaacgaagcgccgcaatctggcccgcaaggagctcgcatggctttcgcgcggtgcccgtgcccgttccaccaagcagaagttccacgtcaaggccgcacgcgaattgattgccgatgtgccgccgatgcgtaacacacttgaactgaagcaaatggccacctcacgcctcggcaaacaggtggtcgatttggtcgatgtgacgcagattttcgaaaaaccgcagggtatggccgatatcgacccggatgtggcggcgctctccgcgtccgcttcccgcgtggatgtggtcaacgccatgtacgccgagccgcagctgcacggttccgttgaggtggcggtcaccgacatgactgacctgcgcctggtggacgccggcgtgccggaagccgtcgaggccgctgaggaagcgcgtaagaaggccgaggctgagagcggcaatccgcagcttgctgacgatcgcgaggttcgtcgcatgaacacgggtggtgaaaccatcggcggtgacactgctgcaacgaattcggatgatggcactgctgcagccggtgtcacctcggctgcacgcaaggtgacggtttccggccgcgagattcttgacgatgtgacttggctgattggccccggcgatcgtttcggcatcgtcggtgcgaacggtgccggcaagtccacattgctgaagttgattgacggttcgatcactccgaccgtgggccatgtgaacatcggcaaaaccgtgaagttcgccgtactctcgcagcgtcttgatgagctggagaaactgggccagtacaagatcaaggaagtgctttcccgctataagccgagctacattgtggatggcaaggaagtaacgccgggacagttgatggagcgtctcggctttgaatccgcccagttgatgacgccgatccgcgacctctccggcggacagaagcgccgcatgcagttgctgctcatcctgctcgacgagccgaacgtgctcatcatggacgagcccggcaacgatctggacactgatatgctcgccgtcatggaggatttgctcgatacttggccgggtacgttgatcgtcgtatcccacgaccggtacctgctggagcgcgtcaccgatcagcagttcgcgctgattggcggcaaggtacgccatctgcccggtggcgtgcaggattacctcgatatggttgaggctgttaagaacggcaagggattaccggctgacacgcctggcttcgcgggcaccggtagcagctcggcgaagtctggtaggggtaaggcggccgccgtcaatgttgctgcatctctccctcagtccacttcgcggacagctccctcgtcagagggagccaataacggtgaggactccacctcgaagctcaccggcaaggccttccacgaggcatccaagcgcgtgaatgccatcgagcgcaagcttgccaaactggaagagcggaagaccgaacttgaggcacagatggccgcccatgacccgagcgactacgagggtctcaacaagctcaatgaacaactcaccgccgtcaatactgaaagcgataatctcgaagccgaatggctcgaactctccgaacaattggagtagcgggagaaaccgtaacgttcacaaggcctcggtagtttgccggggcctaccgctatgcaaactcccacggattaatcaattccacgtcggtaccttcgaagtccttgatattgcgcgtggctatggccgcatcccaggaacaggcaattgccgcaatcatggcgtcttgaatactggtaggtgtgcccctgcgttcgcgttcgacaaggatatgggcataatccgcagctgcctgggtgtcaaatgcgaacgtcctgtcctctaatgtcataagcgccagcttgacggtcgtatctgtgtactttcgtcgtttgccttcaggcatgcgacatattccgaccaacaactcggcgacggtgatggcggtggttgccagattgcttgtatcttggttcctcagccaattggcaacgtgttcgtctggctgtttcttgatgatttcgctgatgacgttggtgtccagaataatcatggccgattcctattcaaaagatactggcggtcgggaatcggcggaatttcgctcggatagtgggagttcccccttgtcgagtccctcaaaatccatgttcttcatgaattcgcggatctcgtcgtagaaattggtctttcgtgtgatttcatgcgccaccgtgccggccagccattcttcaagaatggatcgcacctgagattccatggagcggttgtttttctcagccacttctttgagctgttgaatctgctcatcgggtatttttcggatggtcaatgttgccatgatgcacctccttgttgctgtcataatgctagcataaggtgctgtcattttgcttgcagcacgggtgatgaggtatgcacacatgaaaaaggcggatatgcatcatgcacatccgccctttgagcttggactgggtctccccgcagtcgccgaatcagcgcccggtaacctcggaaccgacgaccttttcgctcagggcgcgcgggccgcgggtcacggctacggcaccggagcgcaccagctcaatcacaccgtaatgctccaaaagccccagcagcgcatcgatcttaccttcggcaccggtggcctcaatggtcagcgattccggattcacgtccaccacacgcacgcggaagaggcgcacgatctccagcacgtcggaacggttggattcgtcggcggccaccttgatgagcaccagttcgcgttccacggtggagttcgggtcgagctccacgatcttcagcacgtgcagcagcttgttgagctgcttgatgatctgctccagtggcacggcctccacgtcggcggtcaccgtgacgcgtgagatgtccggacgctcggtgggggagacggacagtgagttgatgttgaacgcacgacgggcgaacaggccggcgatacgcgccagcacgcctgggcggttctccaccagcacggacagcgtatgacgctgggaaccaggctgggatgcaggatagttagccatgagtgttctcctctcctcagtgctcgctcgccgcggcagcggcggtctcgtgctcgaacacgccggtcgcatgctcgtccggaccggttcccggagccggggtgccgccggtcagcggcttgatgccgggcttgtacgtcacctcgtcgttggaagcgccggcggctaccatcggccacaccatcgcatccttccacacgcggaaatcaatcagtaccgggcggtcgttgatctggttcgccttttcgatggcggcaatcgcctcttcctcggtgaacgcgcggataccctcgcagccgtatgcctcggccaacttgatgaaatcaggcacttcgagcggcgcatcgccgtcgaccagtgccgccgcaccatcggcaccgtgcgcctcgccatcgagcaggttggtctgcgagtagtggtgctcgtagaacagcgtctgccactgacggaccatgccgtacacggagttgttcagaatcgcgatcttcaccggagcgtggtccaggaacgcggcggccagctcctcagaggtcatctggaaggaaccgtcaccgtcgatcagccacaccggcttcttgccctcgaactcgcgggccgagcccacggatgcgccgatggcggctggcagaccgtagcccatcgtgccgaggcctccggaggagatccaagcgtgctggttctcgaaatcgatgaactgcgaagcccacatctggtgctgtcccacaccggtcacccagatggtggacggatcggccatctcagagagctttttgatgacccactgcggggccattgatccgtcggtcggctcatcccacgtcatcgggtattcctcgcgccagccgtcgatcgccttccaccagggggccagattcggcttgccctgaatggcctgcgtgcgctggatttcgggaatcaagtcgtcgagcacggtagccgcatcgcccacgatcggcacgtcgggctgacggttcttgccgatttcagccgggtcgatgtcaatatgaatcacgcgggcggtcggtgcgaaggcgtcgagcttgccggtcacgcggtcgtcgaaacgtgcaccgatggccacaagcaggtcagcgcgctgcacggcaccggttgcggcaatcgtaccgtgcatgcccagcatgccgaggttcttcgggtcggagtcgggaatgatgccgcgtgcgggcagggtcgtgaccacgggggcgccggtcaggtcggccagagccttgacctgtgcgccggcgttggagcgggcggcgccgccacccacatacagcaccgggcggtacgactgagagaacagcttcgccgcgtcggacagcacacggccgtgcgccttggtggtggggttgtagccgggcagaatcatgcgctgcggccatgagtagtacatgtcgccggtctgtgcggtcttggtcagatccacgaccaccgggccggggcggccggtgttggcgatgtagtacgcctcggaaagcacgcgaggaatgtcctgcgcgcgggtcacgaggaaggagtgcttggacaccgggtaggtgatgcccacgatatccgcctcctggaaggcgtcagtgccgatggcctgcacgcccacctgaccggtaatcacgaccatgggcacggagtccatattcgcgtccgcaatggccgtgaccacgttcgtggcacccgggccggaagtcacgatgcacacgcccaccttgccagtggccagtgcgtagccttcggcggcgtggccggcggcctgctcgtggcgcataagcacgaagcggaacttcgtgttgtctttgatctcgtggtagacgggcagaatcgcgccgccaggaatgccgaagacgtcctcgacgccgagatcctccagcgaacgcaccagcgcttgggcgccagtcatcttctcgccatcgacgatggtctgcttatcgggggccgcgttgattttcggcacgccgctgaatgcctgcaaaggcgtgggtaaagccatgattcctctcacctcatagattttgccgcgaacctgcccgaccttgggatggggccgggtgcccgcgtgtctgattccagtcgcttctccgagacttgtggccccggcacgactcgtcgctcatgttggtatcagtctattcgcaaatctgacagcgggcttacttagtccgcgtcttgagcgagtccagtgacttccagcccgcttcggcggccgccagctgcgccttacgcttgctggagcccttaccgatgccgatgatgtcgccgttctcgcccaatgagacgcgcgcggtgaagatctgcgcgtactccgggccggagacctccatatggtagaccggctcatccttgccgaggccgtgcgccttgacggtcagcgaggtcttccagtcaagtgccgggccctcggtggccacttcggcgagcgtgtcgtcaataagccggtgaatcaccttgcgtgcctcgtcgatgccgtgttccaggaaggtcgcgccgatgagcgattccacgatgtcgcacagaatggagttcttctccgcgccgccctgctcggtttccccgtgacccagcagaatgtaggggcccaccttgagcttggttttggcgatggcgctcagcgcgtcttcggagacggccttggcgcgcatcttggccagttgcccctcggtcatatccgggtgaatggtgaacagcgtttcagtggagaccagttcgagcaccgcgtctcccaggaattcgaggcgttcgtaattggccacgccggggtgctcatgcgagaaggagcggtgggtgagtgcctgcacgagcagatccgggctgagagtggtgcccaacgcttcaagaagctcgttggccggcgtcggctgctgtggggtttcattgctcatgattgttgtatggtccttcacgcgatggtgatgtgttgtgtgttgtgttgtgttgtttgcgatgcgatggtgtacgtaatggtgcacttatgcgaagaccccgccacccgtcgatggcagggccttcattcaagccgttatcgcaggactcacttggtgtgagccggctggatggcggagcggtaggtgcggccgcggtagttaccgcagctcgggcaagccatgtgcggcagggccggagcgccacagttcgggcagttcacggtcgcagcagcggtggccttccagttcgcgcgacgcgagtgcgtgttggcgcgcgaggtcttgtacttaggcagtgccatttgagtatcctctatttcgttcgaacaattgagcttaagcgtccgttatcttaacgca

SEQ ID NO: 369 - DNA, 51960 bp, Unknown
  R42_10m  MAG No. k141_33575
cagcgacgattgggacgacggccacctgaccgtcaccgacatcgaccccgccaccggcctgctcaccacctccaccgaaggcaatccgccgctggacgaaggtacgtccatctacgacctgtatgcggaccgcgccgaacgcatgggcgatgagccgctgtacacctacaagtccggcaacgattgggtgaccgtcaccgccaacgagttcctggctgatgtgcgtgccgtggccaagggcctgattcattacggcctgaagaagggcgatgccgtggcattcatgtgccgcacttcctacgactgggacctgaccgacgcggcgatcatggcctgcggcggcgtgctcgccaccatctacgacaccgattcggccgaacagattcgcaacatcgtcaataattccgatgcccgcctgctgatcgtgcaggatacggacatgcgcgagaaggcggatggatccgtcgaggaatgcccgtctttggagcacatcatcaccatcgagaccggtggcttggacgagatcaaggcctatggcgccggcatctcggacgaagagctggacgagcgcatcgactcggtcaagaagaccgacctgtgctccatcgtgtacacctccggttccacggccgcgccgaagggcgtggaaatgacccatgagcactactgccagaccgcgctgaatctgccggcctacatgcccgatctgctgcacgacaagaggaacaccatcctgctgttcctgccgcaggcccattccttcgcccgcgccatcaactacatcgtcgtctcctcgaacgtccgcatctacatcgccaccggcatcaagacgctgatcagcgatctgcaggtggccaagcccactctcatgatcgtggtgccgcgcgtgctggagaaggtgtacaacgccgcgtcccagaaggccggccacggccccaagggcgtggtgttcgcctccgccgtggtggctgcgcagaactatatgaaggaagtctccgccaacggcaaggcaggtgcactgacccgcactcgccgcgctgccttcgatccgattgtctactcttcgctgcgcgaagtgctcggcggtcgcgccaagtggattgtggccggcggtgccccgcttgacccggaactgctggctttcttccgtggcgcgggtgtgcctgtatacgagggctatggtctaaccgagaccaccgcaccgtgcgcgttcaacccgctgggtacgccgttccacgctggttccgtgggcatcgcattccccggattctccctgcgcatcgccgaggacggcgaaattcaggtcaagggtcgtgctgtgttcccgcgctatcacaagaacgacgaggccactgagctgtcgttcaccgaagatggctggtatgccaccggcgatctgggccgcatcgacaacgacgggttcctgtacatcaccgggcgcaagaaggacctgatcatcaccgccggcggcaagaacgtctcccccggcccgatcgaggaggtcatccagcgttgcgagatcgtctcccaggcgttggtgctgggcgacaaacgcccgtttatctccgccctggtgacgttggacgagaagtcgttgcgcccgtggctcgccgccaaggggcttgacgagaacatgtccctcgaggacgcggcaaggaacgccgccgtgcgcgccgaagtgcagcagtgggtcgatcgggccaacgagggcgtctcccgcgccgaatccgtacgcaagttcatcatcctgcccgaggagttcacccaggagaacggtctgatgaccgcctccatgaaggtgattcgccccaaggtcatcaagcgctactccaccctcctcaacacccagatgtacaccaagaagaagtaaggaggactcgagtacagcaaaagggagattccattggaatctccctttgttataaccggccgaaggccgattcctagaagccgaggcgttctagttgcttggggtcggactgccagcctttggctaccttgacgtggaggtcgagcttggctttttggccgacgatgcggttgaccggggtgcgtagcttcttcttgacgtaggtgaggttcgaggcgcccttgccgatgatgatcggcttctgtgagtcacgctccacgtaaatggacacgttgacctgcgccttgccgtcatagccctgaccggtctcgttgtcttccggatagtcgatggaatcgaccaccacggccagcgaatgcggcaactcgtcgtccagggtctcaaggaacgcaccgcgcacgagttcggcgatggtgtcttccggacgctcctcgctgatctgatcgtccgggtacatctgcgggccctcgggcgtgtgctcaatgagcacgttcttcacttcagccagattgtcgtgcttcagggcgctcaccggcacgatgtccgagaaatcggcgaaatcgttgatttcgatgagcttgttgatgagttgctgacggccaagctcgtcgatcttggtgacgatggcaatcagcgggatgcgccacttgaacgtaccgtcctcacgcttggtggcgaagtcggtacgcagtcgggaaagaatacgcttgtcgccggggccgatttcctggtcggcgggcagcaggaaggccaccacgtccacatcggccaaggattcgtcgaccacgtcgttcagacgctggccaagcaacgtacgcgggcggtggataccgggcgtgtccacgagcacgagctgcgcgtggtcggcggtcaggatgccgcgaatcgccttacgggtggtttccgggcgagaggatgcgatggcgatctgcttgccgatcaacgcgttgatcaacgtggatttgccgacgttcgggcggcccaccacggccacgaatccggagcgatacggcacgtcctgcttggtcacattctccgtttcaccggtcgcgtcgacttcggcaacgccggcaacatcggaagcatcggtgacgtcaatgtcatcgacgtcgttcgtgctgttgttctggtcggtcatatcactccttgctggcggtatcatcgccttcgacgggctcgccgtcagtttcctcatgggtcctgctattttcctcgccgccctcgacgtgcgccggttcgacgacgatggtggacaccttcttgcggcgtccggcggagtccacggcggtcagtcgcagaccgcgcgtcacggccgaagcaccgacaatcggcacgcggcccagaatcttggtcagcaggccgtacacggtatcgacatcgtcctcatcaatgtcgatctcgaagatctcctccagatcggcaatcggcgtacgggcgggcatcttccacttgttgtcgccgattttctccggctcggtacgctgggtgcggtcgtgctcgtcttccagctcgccgacgatctgttcgatggcatcctcgatagtcaccatgccggcgatgccgccatactcatcgaccaccacggccacatgttggcgggaacgctgcatctcatggaacaggtcgtccaccggcttggattcgggaacaagcagcggctgccggacgatggattcgaccgtgcgctccatggccgccgggttgaaggcggtggcgcgcacggcgtccttcaaataggccacgccgatcaggtcatccacatcctcaccgatcaccggcacgcgggagaaaccggagcgggagaacagtttcagcgcggaagacagtgtggagtcgcgctccatgcagatcatatcggtgcgcggcaccatgatctcgcgagtcaacgtatcagacagggtgagcacgttgcgcaacatttcggagacttccggatcgaagtcgttggactccaccagtcggtcgatggcggccttgccctgctcgagctgaatcttctcaagctcctcgtcgtcggacagatcggagtccttggagcggcggcccgaccccttggaaccggacttgtcgccaccgatgcgtgcgaacggcgtgagcttggtggccaacgacacgatgcgcgagttggaaatcatgatgtcgaccggcttggtcatgccggcggtgcgcgggcggaccagtacggagaccacggctacgataatcgcgaacaggaatccggcgagcagttcaacccacagttccgcaccccacagggatgcgatggaagacaccagtacgccgtcgagcacattgcaggcgatgcggaagaacgcacagctgccggcggtggcgtaacggtcggcgatgagccgttgcacgcgatgaatcttgtcgatcttcttcatcttgaggaactggcttgcttcggagtcggtctgcacctcgaggatgagattgttgaggctggctcgcgttacgcgggccacggcaccttcagcggcggccatggtcagcgaaagccagacgaacagggccgccacaagtacgagaatgacggtgacggcgatcagcgtggtactggaatactccataatgatttttcggtgtccttgaatgtccttgaacggtagagaataatccgaatttggtgtgattgatttggaagtttatttggaatcgaggtcgcggccagcaccgtgcgcggcgtcgtacagggccagcgcgtcgggtgtgccggcgggcagcgtggcctgcacgttggcatcgtggcgcagggcgaagaaggtgagcagcagctgtcgctgcaggccgaacatctggcgctcctgctcgggggtcacgtggtcgtagccgagcaggtgcaggatgccgtggatggtgagcaatagcatctcctgcatggtgctgtgcccggctgcggcagcctgttgggcagcgacccacgggcagatgacgatgtcgccgagcactccttccatcacggttttgccgtcgcctgggcgcagctcgtccatcgggaagctcatcacgtcggtcggaccttcgaggttcatccaacgcatgtgcagttcggcgatgggatcgggatccacgaacatgatggtcaggtcggactgggtgctcacgcgcatctggtcgagtacccaaatacccaaatcggagaagaccttggggtcgatgacccactgggtttcattggtgacgtcaacgctcatcgtctgtctcactttggttggttgaatccgcttgctggcgggcatcgaagtcggtatggttgcggcggcccttgcgttcgatgtcgcggtggtcgccggcgatggcggagtgacggtcgtaggcggccacgatctggccgaccagctggtgacgtaccacgtcctcggttttgagatgcacgaatgcgatgtcgttgatgccgcccaggatgcgttcgatggtggccagtcccgagcgcggcacggtaaggtccacctgcgagatatcgccggtgatgaccatcgtggtgttgaagcccagacgggtcaggaacatcttcatctgctgttcggtggtgttctgagcctcgtcgaggatcacgaacgcgtcgttcagcgtacgaccgcgcatgtaggcgagcggcgccacttcgatggagccgtcgtccatgtaccgcttgagctggtcggcgccgagcatgtcgccaagcgcgtcgtacagcgggcgcagatacgggtcaaccttgtcgttcagcgtgccgggcagaaagccgaggctttcgccggcctccacggccgggcgcgtgaggatgatgcggcgaatctgcttgtcctggaaggcacgcacagccttggccacggccagatacgtcttgccggtgcctgcgggaccaatgccgaaggtgatggtgtgcgattcgatggcgttcacgtaggccacttgtccggcggttttcgcacggaccggcacgccggcggcaaaggtgatgacgccgggaaccgtgggctttcggtacgtcgggtcgtgggagccggcagaacgtgcatgggcgcgttcgtttgaggtcgattgcgccagtttgtcatgcaccgggccgtgacctggatgttcgaggcgcacgtggttcttgagcacgttctggtcgagcatgcgacgcacggtgtcggcgtccataggcgcggtgtaggcggcttggatgatggtgttgaccaaatcctcggcctgtgcggcctgggcttcggtctgcttggagcgggagacgatcgccacgcggttgccgcgcacgataatcgtcaggtccggaaaggcgcgctccacctcgcgaatgacctcgtcaaccgggccgagcacggcgacggggtcaagttggggcgggatggtgatggtacgtgtagtcgttgccacgaagcggatattcccctactactcgtcgagcttttcgccggtcatcacgtgcgcgtgcacgtggaagacggtctggccggcgtcgagaccggtgttgaacaccagtcggtaggcgccgtgaaattccttgtcggcgatgttctgcgcgatggagacgatgtgggccagctcggtcgggtcgtcggcggcaagttcggcgacgttggcgtagtgcttcttgggcaccacgagcacgtggaccttggccttggggttgatgtcgttgaatgcgtaggtcgtctcgtcctcgtagaccttgctgctgggaatctgccctgcgatgatcttgcagaacaggcaatcgtcggattcgctcatcatgctccttggtttgatgttgctacgcaccagcttagcgcgtgggcgttactcgtaacgtcccaacacccgagacaacagcgacaacgctacaggaccggccgtcgcggctctcagaatattgtgccccagtacgcagctcaccgctccggccttgacgaaatcagctacctcctgctcactgatgccgccctcaggcccgaccaccacactgacagtccgcggccggccgtcctggagcgtgcgttccaccaactgcgtaaccttctcctccacgccggaccacgtatcggtagcatcctgatgcagcacaatcaccacatcgccatgcacgcaggccctgcggcagatggccacgacctccttgctggacgcgcacgcctccagttgcggcttaaaagcgcgccgcgactgctcggtggcggcatccagtaccgaattccacttcttgtccgtacggccgaccttccacttggcaatggatcggtccgcctgccatggcaccacttggtcgacgccaatctgcgtagccatatcgatggcctgctcatcatggccggttttcgccaatgcctgaatcagcgccaaacgggtgagcggctcgggttcgcgccccacttccacaacttcagcaagtccggcttcaggatcggccatcactgcctggattctcaagccgttgccgtcggaaagttgcaggccgtcccccgccttgagtcgcatagcctgcacagcatggcgcttgatgtgcgcgggcagggttagcttccagccggcgtgaagttcgtcgctgttcaccgggacatcgtcgacctgcgggtcgaaaagaaaaagggcatcagtcatgacttcaaggctacacgcgacacgccgggcacacgcgcgaattgcatccctgtaatttcatgctaagctatttactcgttgtccaaacgacacctgcccgggtggcggaatggtagacgcgctagcttgaggtgctagtgcctattttatacgggcgtacgggttcaagtcccgtctcgggcacagataaaccccttgcattgcaaggggtttttcgttatctgcacacacgaaaggccaccaatgcagttcatcacgctggacaccgttgacgacccgcgcgtcgaagcgtatgtgagcctcaccgaaatgcagttgcgcaatcgcttggaaccagccaagggcgtgttcatcgccgagtcccccaaggttatcgaccgcgcgctggccgctgaccgcgaaccgctgtcactgctggtcgaggaaccttggctggagggcatgaaagacaccttcgacttcatcgacgggcgctggggcacggacattcccgtctacgtggcctcacctgagcagctcaagcgactgaccggctatcgtctgcatcgcggcgccctatgcgcgatgcgacgctggccgctgccctccgtagccgaggtctgcaggagcgcccgccgcgtggcagtaatggaaaacatcgtggaccacaccaatgtgggcgcactgatgcgttcggcggccgcgctcgatgtggatgccgtgctggccacaccctcctgcggtgatccgctgtaccgacgagccgctcgtgtgtcgatgggcaccgtattccagattccgtggacccgtatcaccgggttcaacgacgacggtaccgaaaacaagcattactggccgttccagggcatcgacgagttgaagtcgctgggcttcaccaccgtggccatggcattggaggatcgttcgatttcgttggacgagctgacacgccgtctgcacgcgcctgccgaagatccgacgcatatcgacaagctcgcgctgatcttcggcaccgagggcgacggcctgtcccaccatacgattgcccgcgccgatttgaccgtgaagattccgatgagccacggcgtggatagtctgaacgtggcggcatccagcgcagtggcgttctacgcgacacgctaaggaatcgcacgcgctccgaaaaggccggatccttaaacaaatctacgaaactgttcatcgcaagttcacggcacgcgggggggggaaagccttgcatgttcgaatttttctgcaattattaactatgtaaaccgaatgcaaggaagcatccggcccagcagtgcggtgtcgaaagacgctcagtaacagagaggacagttacgatggccaagaatcccaagattctgtcgattgtgcttgcaggtggtgaggggacccgcctgatgccgttaacccgcgatcgcgcgaagcccgccgttcccttcggtggtgtgtatcgtctgatcgatttcccgttgagcaatctggtgaactccgggtaccgtcaggtcgtggtgctcacccagtacaagtctcactcgcttgaccgccacatctcccaggtctggcgtttctccccgctgcttggctcgtacgtctcccctgtgcccgcgcagcagcgtctcggcaagcactggtacctcggctccgccgacgccatctaccagaccatcaacatcatcgaggacgtccagccggacatcgtggtgatcgtgggcgccgatcacgtctaccgcatggacttcgagcagatggtacagcagcacatcgagtccggcgccgagttcaccgtggccggtatccgccagcccatcgaggaatcgaaccagttcggtgtaattgaggtcgatcccgatcacccgaacatgatcaggaacttccaggagaagccggccaccaccaccggtctgccggacaatccgaaccagattctggcttccatgggtaactacgttgccaacaccaaggccctgttcgaggctctggctctcgatgagaaggctgccgacaccaagcatgacatgggcggcgacatcgccccgtacttcgcttcccgcaacgaggccggcgtctacgacttcaactcgaacgagattccgggttccacggtcactgatcacgcttactggcgcgacgtcggtacgattaagcagttctacgatgcgcacatggatctgatcgcctatgtgcccgagttcaacctgtacaaccaggattggccgatttacacgatgtccggcaacctgccgccggccaagttcgtgcacgccggccgcgaccgtctgggccacgccaccgattcgatcgtctcccccggtgtgatcgtctccggcggtgaagtgcaccactccgtgctctcccccaatgtgcgtatccactcgtgggcacagatcgtcgattccgtgctgttcgacggtgtaatcatcaaccgccgcgcccgcgtgtacaaggcgattctcgacaagaacgtggtcctgaccgaaaactccactgtcggcatcgataccgagcacgatctggcccgtggcttcaccgtcacgccggacggcattacggttgtcccgaagaacaccatcgtcgatgactgattgaccagtccagacttggaaaagccccgcatcatgcggggcttttctcgtatagagctccctcatcagagggagcttactaagcgctatcagtactttggcatgttgtcgaagttgaagccaagggcggcgagctggtcgcggccttcgggcgtgatgcgctccatggtccagcgcgggtcccacgtccagtcgatgcggaactcctcgaccagaccggccagcgtggatgcgcattcgtcctcgataaggtcggtcagcgggcaggccggcgtggtcagcgtcatcgtaataatggcgcggcctagctcatcgatctcaatgccgtagaccagacccaaatcgatcacgtcgatgccaagctccggatcaatcacctgatgcagtgcctcgcgcacgtcttcggcagtggcgcggccgatatcgtcaatcgccttgatcggaatctcgctgccatcggactgttcgtcatcccggcaaccgcatctgccgtggtgaccgccacacgcacaggtgtcatcgccggacgcagcagagtgctcgatcgggcgtccgttcgggaagcccttggccaaggccgggttggccatcacgcggcgagcggcctcctcgtcctgcaggacgccgttgacggcatcgaaaacggacggctgtggttcgggaaccaaattatcgttggacatatttcctcagttctttgcagcgagggctttggcgatggagtccttcagcccttcccagcctagcagagcgcatttgatgcgcatagggtatttcgacacgccttggaataccacggcgtcgccgagcttttcttccaggttctcgtcgtccagacctgcaccgcgcgattccatcagcttgtggaatgtctgttccagacccatggcctcgtccacggttttgccgtccaccagatcgaccatcaccgacaggctggcctgcgaaatggagcagccgtggccgtcccacaccaatcgcttgatggtgtgcggttcgtcatcggagacttcgacatggatggtcgcctcgtcgccacaggtcgggttgaactggtgcgattcaccgggcgtgcagtattcgtggctggcttgcacggtgacattggccgccgcgtccgcggactgttcgaccgccgcgttgggcgcaaaggattccttgccatgcggatgttttgacgcctcgaggatgacctcttggtacatctgttcgaggtcatccccgctcataccgaattcgttcatggtgttctgttttactccactccaaagaacttacggatgcctttggccgcttcgaccaatgcttgggcatcttcgaccgaattgtagacaccggaggaggcacggttggatgcgtataggccgaagtggcggtgcaccggctgggcgcagtggtgtcccacgcgaatcgcgatgccctgggcgtcgatgaactggcccacatcgtgcgggtgcacgccggccacgtcgaacgccacggtaccgatgcggtccacgttttcgcgcggtccgaggatgcgaatgccatcaatgtcgccgagcttcagcagttcggcggcgatggtcttctcatgggcctcgatgttctcgagcccgatgttcatcatccattcggcggcgacgcctgcggccaccacttgggcgaccggctgggtgccggcctcgaagcgggccggaggggccatgtattgggcttcgtggtccatgtaggcgagttcgaccatggagccgccgaagttggccggcggcagggcttcgagcagttcgcgcttaccgtacaggaaaccgacgccggtaggaccgtacatcttgtgcgcgctccaggcagcgaagtccacatcaagcgcatggaaatcgactttgaggtgcggtacggactggcaagcgtccaagatgaagatcgaacctacttcatgcgcacgcttgatgataggggcgatgttggtgatggcacccgtggtgttgcccacgtgggtgacggccacgaccttggtacgctcggtgatgacttcgtcgaggttgtccgtacgcacacggccgtcctcggtcaggtcgatccacttgaaggtggcaccggtacggtaggccagctcctggaacggcagcagcaccgaatgatgttccgcgcgcgagacgacgatctcatcgcccggcttcagggcaaaacgcttggcggcttctcccccccggcccagcgacgcattgccgaacgcggtggcgagcaggttcagtccggccgtggcaccaccggtgacgacgacctcctcttcaccttcggccgtattcgcgccaacgagcttggcgaccttggcacgggcctcttcgaaggccatggtactacgggccgccagctcgtgggcaccgcggtgcacaccggcgttaatcgtacgataaaaatccgcctcggcgtcgatcaccgcattcggcttctgcgaggtggccgcggaatccaggtacacgagcgggtgcccgtgaatctcctgattcagaatcgggaactcgccccgaatctccttaaaatcaaccattatgttcccctacttacgtaacaattgtacgaaacgagtgggagtctgacatggcctgttcgtgaccgtaaagacttggcctagcggcccggagcgtgtcgagaatagggcatgtcagactcccacggtcacggactcaggccagcgcggactcggaatcagcaccctcgggcaggtactggtcgtagccgttctcttcgagttcatcggccagctcagggccgccggtcttgacgaagtggccgtcggcgaacacgtgcacgatgtccggcttgatgtacttcaagatacgggtgtagtgcgtgaccatgaggatgccgaactggttggcttccttggcgcggttcacgccttcggacacgatgcgcagggcgtccacgtccaagccggagtcggtttcgtcaaggatggcgaacttcggcttcagcagttcgagctgcagcacttcggcgcgcttcttttcaccgccggagaagccttcgttcacggaacgggaggcgaacttcgggtccatcttgaggcgcttcatggctgcggacaggtccttggcccactggcgaataccgggagcctcgccgtcgatttcggtcttggcggtgcgcaagaagttggtcatggacacgcccggtacttcgaccgggtattgcatggccaggaacaggccggccttggcgcgctcgtccggagtcatcttgaggatgtccttgccgtcgaggagggcctcgccggagtcgaccacgtacttggggtggccggccaacgtgtaggcgagagtggacttgccggaaccgttggggcccatgatggcgtgggtttcgccggagtggacggtcagggtggcacccttcaggatcggcttgatgccttccttggtttcgacgtggacgtgcaggtccttgatttcgagtgttgacattgttgtgctcctaaaaatgctgttcttacttgtcttcgaggacctgtgccatggcgtcgttttcgccacgggccagtcggcggtcaatcacggtcatcagatgttcggagatggcgggaatgccgatctcctcgacgagttcgccgaagaagccgcgcaccacgagcttgcgggcgtcggtttcggggatgccgcgggattcgaggtagaacagttcctcgtcgtcgaagcggcccaccgaagaggcgtgaccggcaccgatgatgttgccgttttcgatttcgaggttcggctcggaatcggcgatggcacccggggtcaggaccaggttgcggttgagctcgtaggagtcggtgccgggggcggtgggctggatgagcgcgttgcccacccaagtggagtgcgcgcccttgccgtcaagcgcgcccttgtagaccacgcgggacttgcagtcggggtggttgtgtaccaccattgtgcggtgctcgatgtgctcgccggggtccacgaagtagatgccgagcatgttgaggtcgccttgttcgccgccgaagtcctgatccatgcggatgcggacgatgtcgccgcccaaggtcacgacggagtggcgcagggatgcgccttcgccgacgtggatgcggtggttggccacatgcttggcggttttggcccattcctgaacgaacgtggtggagacgtgcgagtccttgccggtggtgatttccacgccttcggccagtcgtgcgtcaccgtcgtgttccacgacgacgtccgcatgagccttgtcggcggcggcgatcaccagatggaaggcgtcgaggtcctcccccgcgccgtgcaccttgacgagcacgggctgggcgatctcaccggacagttccagaatggttgcggtgtggccggattcccattcgactgcggagacgcggtcgttgggcttggacacagtgccggacaggccctcaccgagcttgatctggctgagcttcacgccttcggccaacggcgagccgtcaatcatggagacttcgatctgcgtttcgccggaaggcttgaacacggtgaagaactcgttgatgcgctcgataggcgtgtagcgccattcgtcctgcttgcggctgggctccgggtagtcgcctgcgttgaacgagcgcacggcatggtccacggaggacggcatggcggccggaatcgcgtacgggtcgttggggtcggcgaccggaatcttgatttccttgacgggtgttgtgttgtcggtcatcggaatcagcccaccgatccttccatctgaagttccacaagtctgttgagttcaagcgcgtattccatcggcagctcgcggctgatcggttcgacgaagccgcgcacgatcatgcctcgcgcctcttcctccgtgagtcctcggctcatcaggtagaagagctggtcttcggagatcttggaaacggtggcttcgtgggccatcgagacgtcgtcttcgcgaacgtcgacgtgcgggtaggtatcggagcgggagaagtcgtcgaccagcagggcatcgcacacggtcgagttggacgaaccgtacgcgcccttgacgattttgaccagaccgcggtaggcggagcggccgccgccgcgcgagatggacttggcgacgatggtggagctggtgtgcggtgccaagtgaatcatcttcgcgcccgtgtcctggtactggcccttgccggcgaagccgagggacatggtggatgccttggcgtacggttcggcgaggatgcaggccgggtacttcatggtggccttggaaccgatgttgccatccacccactccatcgtgccgccctcacgcacgtaggcacgctgggtgacgaggttgtagacgttgttcgaccagttctgcacggtggtgtagcgcacgcgggcgtgcttttcgacgatgatctcgacgatggcggcgtgcagcgagtcctcggaccagatcggggcggtgcagccttccacgtagtgcacgtaggagccttcgtccgcgatgatcagcgtacgttcgaactgacccatggccggggtgttgatgcggaagtatgcctgcaacgggatgtccacgtgcacgcccttcggcacgtatacgaacgagccgccggaccatgccgcggtgttgagggcgccgaacttgttgtcttccggaggcacgacggtgccgaagtacttcttgacgagttcagggtattcgcgcacagcggtgtccgtgtcgacgaagatcacaccctgcttcttcaggtcctcacgaatggagttgtagatcacctcggactcgtactgggcagccacgccggagacgaggcggttcttctccgcctccgggatgccaaggcgatcgtaggtgttgcgaatgtcgtccggcagctcctcccacgacttcgcctgcttctcgatcggcttgacgtagtacttgaagtcgtcggcgttgaagccggagagatccacaccccaatcgggcatgggcttttcgaggaacgccttgaatccacgcagacgcatgtcgagcatccactgcggctcgcctttgtcggcgctgatcgcgcgtacgacgttctcatcaatgcctcgttttgcggcttcgccggcggcatcagaatcatgccaaccatagttgtagtcgccgaactggctgatgatctcgtcatccttcttgatcttgtcctcgttgacgcgggtacgatcagccacatactggctcatctccacgtcagcggcggcgtttggtgctgtgttttcggtcaccatcctgccttccttgtatcacacttaatcctatgaaaacctagcagaacccaagtgcaaacactagctgccctgacgcatattggctgtgggcttgattacatgcgggcgccatcgggccatgcggcatcacggatggcgccaaacggcgaaggcgtggcggcgaagcatcctgagatgccgtgccgtcacgccttcatcgtgcgcggaccgaccgcgcgggatccacggtcagcgggccgcctgatggccgagcgcggccttgaccagaccggcgaacagcgggtgcggcttggtcgggcgagacttgaactccgggtgagcctgggtggccacatagaacgggtgcacgtcctgcggcagttccacgaactcggtgagctcgccgtccgggctctggccggagatgcgcaggccgccttcacgcagacgatccttgtaggccacgttgacttcgtaacggtggcggtggcgctcggtgacatgcgtggtgccgtacagttcggcgaccagcgagccttcctccagctcggccgggtaggagccaagacgcatggtgtggcccatgtcgcccttgccggccacgatgtccttctgctcttccatggtggcgatcaccgggttggcgcaatcgggctcgaactcggaagagttcgcgtcttcaatgcccagcacgtggcgggagtattcgatgaccatggactgcagaccaaggcacaggccaagggcgggcagcttggtttcacgggcgaacttcagggcgccgatcttgccatcgatgccgcggatgccaaagccgccggggatcacgatgccgtcgacgttgtcgagagcggcggccgcaccttcggtggtttcgcaacggtcggccgcaacccacttgacgttgaccttggcccagttggcaaagccgccggccttgatggcctcggtgacagacaggtaggcgtccggcagatcgatgtacttgccgacgatggcgatgttgacctcgtgcttggggtggtggacgcgctcaagcaggtctgcccattcatcccaatcgacatcgtggaacggcaggccgagctcacgcaccacgtaagcatcaaggccctcttcgaacaggatcttcggtacatcgtagatgctcggcgcatccacgcagttgaccacaccttcggcatcgacgtcgcacatcagggagatcttgtctttgatggactggttgagcgggcggtcagaacgcaacacgagggcgtccggggagatgccgagttgacgcagcatcatcacggagtgctgggtgggcttggtcttgagctcgtgggcggcggaaatgtacggcaccagggaaacgtgcacgaacatgcagttgtccgggccgagatcgcgacgcacttcgcgggcggcctcaaggaagggctgggactcgatgtcgccgacggtaccaccgatttcggtgatgatcacatccacgtcatcggaagcctgggcgcgcatacgagacttgatttcgttggtgatgtgcgggatgacctgcacgcactggccgaggtattcgccggcgcgctccttgcgcagcacttcctgatagatctgaccggtggtgacgttggccttctggctcaggaagacgtcgaggaaacgctcgtagtggccgatgtcgagatcggtttcggcaccgtcttcggtcacgtagacctcaccatgctggaacgggttcatggtgcccgggtcgacgttgatgtacggatcgagcttttgctgcagaacatggataccgcggctgcgcagcaaacgaccgagcgaagatgcggtcaggcccttgccgagagaggagacaacgccgccagtgacgaaaatatgcttggtgacgtgttcttgagaattaccatgtgttcttctaaccatggaattccactctatcatccgtgtatgacccggcgtgttcatgacgtggccggtgtagtcgtgcgtaggcagcccatctcgttctgccttggccagcatatggtcgaatacacggcgcacttcaggtccatagggcgcaccaggacgaggattctggtccgattcgtcggaacaggaatcccgggcgcaacgtcgactgctacccgtgattggctggagggcttggttctattcgctcagcaagtgcgccacagcatcgagcgcgagcttgtagccgtagaaacccatgccggtgatggtgccggtggccacagggctgattacggaacgcttgcggaactcgtcgcgggcggacgggttggaaatatggacttccataagcggcaggttctcatcaatgaccatgtgcgcggcgtcggcgagagcatacgaatagtgcgtgaaggcggcgggattcatgaccaccggggttttctcgtcggcggcttggtgcatccagtgcaccatttcggcttcgtcgtcggtctggcgcacctcgacttcgaggccgaggtccttgccccattcggcgcagagcttgcgcagggtgtcgaggtcttgacgaccgtagacgtcgggctggcggacgccgagacgtccgaggttagggccattgacaacaatgactttggtcattgggactccttttgtttgtgcttctctccctccgccccttcggggcacctccctcatcagagggaggtagaaggtaaatccgactccgggacacctccgttagaggggagccaagtacttttctgaggggatggcgaacggcacggcctacggccgttcaattactgctggatacgacggaatgcttcttctacggcttcggcgggcgggttgtcgaggtgtacgacgtgaccaatctcgtcgaggaccacgaaacgcagttcgttgccacgggctttcttgtcgcgatgcatcaatgcgagcacgtcgtcgaacgagctgccattccacgacgtcggcagacccagcgaagcgagcaacgaacggtgatagtcaaccagatcctgatcgatgtaaccgatcagatgggccagctcggcggcatacaccataccgacggccaccgcattgccatgcctccagcggaagtgctcgagcttttcgatggcatggcccatcgtgtgcccgtagttgaggaattcacgcagacccttctccttcaaatcggaggagacgtggtaggccttgacctttaccgtgcgctcaatgagctcggcaaccacgtcttcgagcggcgagccgaggaatgtagagccgtcgaaagcgcgcagttcagctgcgtggtcttcgaggatatgcaggatttcggggtcgcggatgaaaccggatttggcgacttcaccgagaccctcaatgaagatgtcattgggcagcgtagccagcgtcttggtgtcggccagcacaccggcaggcgtgtagaacgagccgacgaggttcttgccctgcggggtgttgatgccggttttgccaccggtggaggcatcgaccatggccagcagcgaggtcgggcagtttacatagcgcacgccgcgcatccacgtggcagccacaaaaccggccaaatcggttgcggcaccgccgccaagccccaccacggcatcggatcgggtgaaaccttcgttgccaaggcgttcccaaatgccgttggccacggtaatggtcttgccgggttcggcatccggaatcacgatgtcggaaacctcatagccgccctgacgcaacagggcgcgggcacgatcggagtgtcgctgcaccggctgggtatggataagcgcgattttggcgggcttgggtcccagcacgtcgaccagatgattcatggcaccttcgccaatgaccacatcatacggctcaattgccgatccggtaacatgcactgctcgctcagataccatatcaatcactttcttcgctgcgccctgaggcgtaagcccccgggtatggacatgaacgttggcgacctcgcggaataccgggtcacgctgcttgaacagtttcttccaacgggagttggcattgccattgagcatgggccggcctcccccgcggttcgcgcgttccatggcctccgccggatcggcgtcaaggtagaccacacgaccgccatggtcgatgtatgaggcgagggcatgctgggtggatggcgtcatgggagcgccaccgcccagcgaaaagataccgtcgaaatcctcaagcatatcggcgatgagatcggcctcgacctcgcggaatgccggctcaccgtattcatcgaagtaggcgggaatcttcatgcccacttcacgttcgatctccacatcggcatcggcgaacggcagacgcaacatatgcgccacttccttaccgacacgtgttttgccggctcccatcatgccgatgatgacggcgcgggggcgtgcggtcataatctacgaatcctctcgacgattggtgggtacagttgctgatggttccgcggcagtcgtctcggaaccatactccacttcgttcagcgcatgtgctccggccacgaggcgagatacgactcaaggttgcgccgtgtttcggcaacactgtctccaccgaacttatccagcgcgtacttcgccaaagtcagacgcaccatggcctcggccaccacggatgccgcaggcacggcggtgctgtcggaacgctggttgatggcttgtgcggattcgccggtcagcacgtcgaccgtacgcagggccttggggatggacggaatcggcttcatggcaccgcgtacgcgaatcacctggccattggacataccgccttcaatgccgcctgcgcggttggacagacggtcgatgcggccgtcggcgttgaccacgatctcatcgtgcgcctgcgaaccggggcgggaggcttccaggaagccgtcgccgatctccacacccttgaacgcctgaatgcccataatcgcggaggccagagccgcgtccagacgacggtcggattccacatacgtgccgatgccggcaggcacgccgtaagccagcacttcaatcacgccgcccaacgtgtcggcggccttcttggcctcgttgatgcgttcgatgatgcgggcctcggcctctttatccaacgtacgcacgggagaggcatccaacgcttccagatcgtcaggtgtgggcaacggcaaatcagggttggtctgcacgccaccgagcgccaccacgtgggctacggtgcgaatgccgaacgcctgatccaggaactgcttggccacctcgcccaaggccacacgggaggcggtctcacgggcgctggagcgctccagtaccgggcgggcgtcgtcaaaaccatacttgcgcatgccggtcagatcggcgtggcccgggcgcgggcggctcagcggcgcattgcggccttcgcgcggcaggtcatggtcgagtgcatcggcgctcatgacctcggtccacttcggccattcggtgttggcgatttcgatggccaccggcgagccgagggtcaggccgtggcgtacaccggtcagcagacggaccttgtcttgctcgaacttcatgcgggcaccacggccatatccaagtcgacggcgtgccagtgcggaaacgatatcgtccgtgctaatgcgcacgccggccggcaacccttcaatcatggccaccaatgcttctccgtgagactcccctgccgtctgccaacgcagcataacttccctcgtttcatgtgtgtacgtctatgtgtacgtctaactaggggttaatgttaagccatgccatacctgttcacgctacccggtctgctatgtgggcttgcactgtccattgaggatgttcgtcatcggcgggtgccgatcgcatgggtggccgtgggcgcgttaatccagttggccgccgatttcgcgcatggagtggtggcgaacgacctgttcgtgctgttgcaggcgctgttgttcaccgtgctatgttgcctgatccagttcgcgttggcgttgctggtgccgcggtcattgggattcggcgatgtgaccgccttgatacctatgggattgtctgtcggactgtttggcctgttgcctgtggtggtctggtggctggcgatgggcgttgccggcatcacatggattgccctgtggacgcgattcgacccacaacgcacatcaccggcacatgcgggcaaggtgccgtatgtgccggtgatattggcgggcgcgattgtggcggtggttgttggggcttaatcccgttactcccctcagtccgctttgcggacagctcccctcggcgaggggagccaatgaggcgactactggttttcggcttgccacttgcgtagttcggccacattctggtcatgttcatcggcggttacggcgaacttggtttcgccggtgtccagattgaccgtgcagaagtacagccaattgccgctttcggggtgcagtgccgcttgaatggcgctatcgccgggattgctgatcggcgtaggcggcaggccggagatcttgtacgtgttgtacgggttggactcgtcttgggtcatctcggtggtcacctgcgcgggcttgacgttattgccataggccacggtggaatccatgcccaacgacatgccctgctccaaacggttctcgatgactcgcgtcactttgccgtagtaatcggctttgttgacctcggcctcggcgatagaggcgatgatcatcacccgttcgcggtcactgccggtcggcacgcccaattcatccaacttggcgatacgcttatcgaccatggccttgaggatttccgaagcgctcttcatgctcttgacgttgtaggttcccggctccagccatccctcaaagctaccgcccgcttcattgggcagaatatccttacccttgttcttgataatcgtgtcgaattcgctttgggaaatgccggaaagcttcgcggcgtcggcgaacacatcggtggcacgttcaccgggatgaacctcaaggaagcccgccgcctggttggtgtcggagagaacggcgatcacatcggatgcggccatatgcttcttcaatgtgaacgttcccggatagagtgtcgcgctattggcgttgaccacgctggtgaacgcggcagtggacttgatgacttcggccttgagcagattatcggcgatctccgccgcgccttggccctcgctcacggtgaattcgacctcgccatagcccggtccccgatagtccgcgatggccgtcgactggttgctccggctgtcgcgccatgcgatgagcttggttacgccgaaatagccgccgccgataagcagggcgacgatggcgatagcgatgataatgccactgacgcgcttgcgcttgcgctgtgcacgtcgcttgcgcatctccttgcgggatttcggcggttctggcggctcggtcccgcgcattggttctgacccctgttcgacccaatgcgtgttgtcatcaaagaactcgttaaaatcatcggtcataaccgatacctcactgctcccgggtacggtcgagtgccgtctgcaaaatcaccactgccgactgctggtcaaccaccggcctgtgcttgttcgaagctttatgggcctcgaacagttgacgatgcgcactgactgttgtcaatctctcatctatcaatgacacctgcggaatctgatactccgtagaatcactgtcttcactctctgcttgcagcctcttctccagattggccgcccacctgcgcgcttttttggcgcttttgccttctgtaccgtccatctgcaggggcagtccgacgattacatggtccacatgttcgtcttcgatgacgttcaggacctcgtcaatagcaaagaaatagtcgccggcaacatgaatgttgccagcagggtgtgcaaaggtaagctccgggtcggacagtgccagtccgacccgggcattacccaaatcaacgcctaaccacaccactggcggaatcaggctttctgcgcctcgtgctcgagcgcttcgagggcctcgtcgatcttggaggcatcgacaccgccaccctgggcgaagtccggcttgccgccgccaccgccgccgaggaccttggctgcgccacgcaccagatcaccggccttgatgccgaccttgcgggcggcctcgttggtggccacggcgaccatcggcttgtcatcctcgttcacgccggcgagggccaccaccacgggggcgtcttcaccgagctgggcgcgcacgtcgagtacggtcttgcgcagggcgtcgaccgcgccgaagtggcccacgttcttgacggccaccttgaccggggccgcggagttcttggtgtcagcaaccaacgccggaaccgaggcagccagctgggactcgtacatggaggccaagcgacgatcggattccttgagcttggcgagcagggcgttcacacgctcggcgagctcgtccgggcgagcgttgagcttgtcggacagctgggagaccaacgcgtgctcacgagcgttgaagtcataggcaccctggcccacgacggcgtcgacacgacgcacgccggagccgatggaggcttcggacaggatgttgaccatgccgatcttgccgacgtggtccacgtgggtaccaccacacagctcgcggctccagccgtcttcgccgatggagaccacgcgtacgatgtcgccgtacttctcgccgaacaggtgcatggcaccgagggcgatggcgtcgtcgaacttcatttccttggtggtcacggcgaggttgtcgcgcagcttgtcgttgacgcgctcctcgactgcggagatcacggacttggccggggccttggaccactggaagtcgaagcgcagacggttcggggcgtcctcggagccgcgctgggtggcctgcgggccgagctcctcacgcagcgccttgtgcaccatgtgcgtggcggtgtgcgagcgagcgatggcgccacggcgggccaggtcgatgttggcgttgacttcggcgccgacgaccagcgtgccttcggtcagacggcactggtggacgatgaggtccttgatgggcttctgcacgtcgtcgacttcgagcactgcaccgtcgtcggacaggatctcgccctgatcggcaagctggccgccggcctccgcatagaacggggtacggtcgagaatgacttcgacgttggccgggccggtgacggcgggcacggagcccttgccttcctgcatgatgccgatgaccttggcgcgggcggacatatccgtgtagccgaggaagtcgatcgggctgacgagcgtcttcttgaagtcgtcgtaaacggaaagatccacgttgtgacgcttcttgagggcgtcggcgcgggcgcgggacttctgctcggccatgagttcgcggaacttggcctcgtccaccttcacgccctgatcggcggccatttcgagggtcagctcaatcgggaagccgtaagtgtcgtgcagagtgaacgcatcagagccagagaccaccgggtcggcggtcttcttggccttcttgacagccacgtcgagaatctcgatgccgttctccagcgtacgacggaacgcatcttcctcgccgtaggccgcttcggagacatcgtggaaggtgtcgttaagctccgggtagctggcgaccatggcctccttggagacaggcagcagctcgggaatcaccggatcggtcacaccgagtacacgcatggcctgcacggtgcgacgcagcaggcgacgcagcacgtagccgcggccgacgttggacgggcgcacgccatcggacataatcatcagcgcggaacgcacgtgatcggccacgacacggaacttgacatccgcggcctcgtcctcgccgtacttgcggccggacaagcgctcggcggcctcgatgaccgggaagacctcatcggtctcgtagatgttctgcttgccctgcatcaggtaggccaagcgttccagaccggcaccggtatcgatgttcttctgggcaagctcgccgacgatgtgcaggtcggtcttggacttgacgttgtcgacctcgtagttctcgaacacgaggtcccagatctcgatgaagcgcgtctcatcggccgcgggaccgccatcacgaccgtattcggggccgcggtccacgtagatctcggagcaggggccaccagggccagggccaccggtggtccagaagttgtcttccatgccgaaaatctgcatgtgctcgggatcgaagccctcgttcttccagatggaacgggcctcttcatcgtcggtaaaggtggtgacccacagcttttccgggtcaaagccgtaaccgccctcgctctgcggggtggtcagcagctcccaggcgtagtggatggcctcttccttgaagtagtcgccgatggagaagttgccaagcatctggaagaaggtgccatggcgggtggtcttgccgacctcatcgatatccagcgtacgaacgcacttctggttcgatgtcatgcggcgcttcggcggggtctgctcaccaagaaggtagggaatgaacggcaccatgccggcgatggtgaacagcgtggtggggttcggggaaatcagggatgccgaaggcatgacgagatgatcatgtttggcaaagtaatcgaggtatcgctttgcgatgtccgcagtgcgcatgagcggatgaactccttgtttgggtaatgggcgcagttgcgcctggtattggtggaaaaagactggattatgaggactagtttgttctagctggttcagtgactagatggcaaggcggcatgcgcgtgtcagttggcgcgctcgatgtactgacggttgagctcagcctcgcgggctcgacgggtggcattgaactcgttgaccaacccttcgagtgttttcatcggcacattgtcctgatcggggccaagcaggaactggcgtgccgcatcaggcgtattggccttgacataggcctgtgccttggtgacggcaacgattccgatggccacgccgacgccgacccagaagatgcgtttgaacatcactcccccttctcggcggtgtcgttgacggtggttttcgcggcgttcttcgcaaggaaggactgacccgtggttttcagcgcgtagaaggtggaagcgatcttgatgatgggcttaccgaggaaagagccatacagatcagtcaacgcaccaacgttgttggcggtggtggaagccgcggcggaaatcttgttcacgtcttcaagcgacttgttgacctgcttgacggtggtcacgccttcgtccagcgcggggatggcgtgttcgccggactcccggaccgtctgcgatatctgatcaaacatcttgcccagcctgatcagcggatagatcatgaaaccggccaatactgcgaacgcgatggccgcgatcaggccagcgatctctccgactcccattgtttcctccttgcggtcacacttactcgcctaagggtagcactccttccctatttcttggcataccattgcacgcgcagggcgaaaaccgtgcgcgtggatgcatgcgactataggcgaaaggtgtcctgctgacgctttcgtttgcggcgtgccgccgtggaccgtacgtgctattcgatatgtattgcttgctatttgctacttgccgtacgaaacgatggtcacggcctcgccgaacggcttgtcggtgtcgaagtcgagcacggttaccgaaccattggccgggcgttcgttcagatcgaggtcagggccgccgaaccggtggccgaggctaagcagtgtgttgccatgcgaaatctgcagcacatcgtcgccatccttgagattcgggttgtcggcgataagacggaacgcgccttcgacgcgcgtccaatattcctcatcggattccgcatcgtggaagggatcggcttccttgagaaaatcacgcgaggcccccaacccgaacttctcgacgatttggttgtaggttttggcgccgtgaggcgctcccgcggcgtaccaggccatggccatgtcaagtccctcgtagtagccgtagaactgctcgcggaagtgcatgtccgtcacgagtgcggggcgcgggttacccgcggcttcgttgatgtcgagaattttctcggccgtctgccgggcacgcgtggtgtccgaacagtaggcggcggtgaacgtcaatcctttcagtcgctcaccggccttgacggcatcagcgacgcccgactcggtcagcggcgaattcgaccatccctgcagacggttgtatcggttgaaataggtctgtccgtgacggaccaaatgcagatgaagaatcatggttccgattatgtcaccattccggcggtttcggtgcgggctgccggaagtcataagtcataacggcataggtcactacctgagatatgcgtaatccgggtagtatacctgacgattcctgagagtacacttagggtactatgagcataacctcgaaacctgcaccatctcaatcgtctgagcctgcccatttcaggggtatcgatggactgcgcgctctggcgattcttggagtcatagcattccacacccgcccgtcgctattgcagggcggattcattggcgtgacgatgtttttcgttatcaccggttttcttgccacacgttcagtactgaacatggtggaccgcaccgggtcctttggatatggccgatatctgatccgccgcattactcgtttatggccggtgatgctggcgaccattgccgtggtgccttggctcacttggatgttcgctcccagcctgttgcagaaagtggtttccgattcgctgccgagcgccttgttcgccagcaattgggtgtacatcttccgcaaggtgccgtatttcgaggcggccggattgccttctcctctgacccatctgtggttcttgggcgtgacgatgcagttctatctgatttggccgttgctgatggtggtgctcggcaaaatcaccaagtccaaatgggtgcgctccatggcgattcttgtcatcatggctgcttccaccgccgccatggtgctgctgtttgacccggccaatacctcccgcgtgtattacggtaccgatactcgtctcgccgagctggccgccggcgcgctgttggctatctggattgcgccttcctcgcgaggtacggaagttgcggaagctggagcggcttcgcaaacagtgcagatcggacgtcaggccggcgacaagacgggcgcccgtctcactatcgtctgcaatgttcttggcaccgcggctttggcggcactgctggccggattctggttcgccaacgggtatctgtcgtacatgtaccaaggcgggtacctgattaccgcgttcatatcgttgtgcgccttggcctgtgccgtgaacaatgactcaatctggtcgcgcgtgctgggttgcgctcccctacgctatatcgggtcgcgatcgttctcgctgtacgtcatgcattatccgctgctgcagttcatgaacccggcgacacgaacgcaggcgttgccgtggtggggttgggttcttgaggccatcgtggtgttggcggcgtcggaagccttctaccagctggtcgaggcggcccgtaaatcggtgcagatgcctcgcagccaacatgccaagccgctgccgaaagccggctaccagctgcgcccgggcgcgtgggtcatgtcggttatcggattggtgaccgttgtggtgctgacgtgggcaccggtggattggaatggcatcgctcaagcgcgagccattcagctgcgccccgaactcgcggcacccgccaagccggtcaagaaaccggcgaagcccgagcccgagtcttctgccacgaatgccgcgaacggcgaaaccaataccgctgacgcgaataagaacggttcggattctcagccgcccaccatcaaaccgattgcggaaaaggtgccaaacaatcttgacatttcgaagtacgcctatgatccggcaacggaaagctgcaacgcggatatgatgatggtcggcgattcagtgacgtcgggtacttcggacgccatccaggccgcattcccgaacgcttttatcgatggcctgccgaaccgtcagatgccgcaggcggtggatgtgtatcagcaggacaccgctgccggccacagtggcagtgtggtggtgtttggcctcggcacgaacggcgtgatttcgaatgagcaggaagtgcaacagctcattgacctgaccggcggcaagccgacatacttcatcaccatccgtatgccatacccgtggcaggagaacaacaacaatacgatgctgcgtgaggccgccaagaagaacaagaacgtgggcatcatcgattggcatgggtatagcgaaggtcatagcgaatacctcaacgatgacggcattcatccgaatatgaccggtgcctatgcgtacgcgacgatgattcgtcaggcggtgtgcggccagtaatcgccctacaacgcaggaaccccgcggcttctcgaaagaagcgcggggttcgagcggtatgtcctggatttgttgaccagagggcccggatcagcgggcgtagaattcgaccacgtactggatgttgacctgcaccgggatctcttcgacctccggcttacgggtcacagtggccttcagggacggcaggttcacgtcgaggtagccggggaccgcaggcagcacgtcacggtgcacgccttcggcggcgatctggaacggaaccatggtctggctcttggccttcacctgaatggtctggccgggcttgacgcggtaggacgggcggtccacgatgttgccgtcaacgaggatgtgacggtgcaccacgaactgacgggcctgggcggtggtgcgggcgaagccggcacgcagcaccaggttgtcgagacgggtctcgaggtcggtcagcatggcgttaccggtctggccggcagtacgggtggccttctcgtaagcggcgcgaagctgcttctcggagatgccgtactgagcgcgcagacgctgcttttcgcgcatacgcaccgcgtaatcggactcggtgcggcggcggtcacggccgtgctcgccaggagcgtacggacgcttttcgaagatgcgctgagccttgggggtcagtgcgatgccgagggcgcgagacagacgcacctgacggcgagaacgctgaacgttcgtcattggattaatccttctgtcgttatctgaacggaacgcttgccttgcatatgcctggcaagcgctgagccgggcctccccagcgcttcgtcgtgaacgaacacgaacgggttggttttcttgcgatcacctaccgccgacccgctgatgggctatgactccagacggtatctacctgttggcagacaccagcagactatattacaccgaggctatggacagcactccggcgtccatgcgatacacccggtctgcgtattcgagtgcatcgggatcatgggtgaccatgagaatcgccgtgccgttgttggcttggtctctgagcagacgcattacgatgtcggtgctctcctggtcgaggtcgccggtcggctcgtcggcgatgagcaggctcggctggttcatcagcgcgcgggcgatggagacgcgccgcatttcaccgccggacagctcgcgcgggtagctgtctgccagatcggcgacaccaagctgggtgagcagcatgcgagctcgggtggcgaacaggtccggacggctcgcagccgtgtttgacggcgtgttttcccggtctgtgattggcgcaatgacatccggcatgaacaggtcggcggctgcttcatcattggtggcagcggcttgtgccacggcatcggtcgacgcaacagcgtccacctgagcaacggcatccgttgcttctgcgttttgggcgaacggcagcggctccggaaacatcgttgcgggcagaatcacgttgtcgagcacggtcaggttgccgagcagggtctggctttgggtcacgaatccgatggtgcgattcctcagcacggacagtgctttatcgcccaagtcggccacattgcgtccagccacgctcacggttcccgaggtcgggcgaatcagcccggcgaccatgttgatcagcgtgcttttgccgttgcccgaccggccgacgatggcgatgaattcgccggcatcgacggtgaggttcacgtggctgacggcgtcgaacggcgtgccgcggcggacgaactggcgggtcaggtccgtcaaggtcagcagatggtccggggagggcgtctcggttacgtgcggcgaatccggcgcagtcggcgcgttcggctgagctggcgtggtcggctggagcttggtcggctcaaccgtggtcggctgaagcggcgtagttgtctcagtcatatcactccccctctcgcagggtcaggtaggcttcgggccggccgagacgccacatggtggccagcgaaccgatgatgccgatgaccgtagagcacacaatggtcacggcaacgaatccgatcaccgcaaccgggctggcttgcagatacggcaattgaagttgtttgccgatcagcgaactgaatgggaaaatcaccaggctggccgcgccgacgccgattacgccaccgatcagaccgatgatggcggattccttcagaatgatggcattcaacatgccgcgcgtggcgcccatgatgcgcagggacgcgaattcgcgtttgcgttcgttcaccgacgaggcgaatacggcgagcagcacaatcacgcccattacccagatcaccgccacgaaaatcttgaggtaggtgacaagcgcggtcagcgaagttctggtgttggcggtgatgccgccggggtatacgtaccccaaatcggcgaaccgggagtcaagacgcttgatgttttcagccacggtctgcgcttcgtaaccccgctgcgtcttgatcatcacggtggagacggcttcgcctgcatattcggcgggcatgacctgcttggagaccttggccgaggcggcaaccatatcaggcacggtgttttggttgatgaacaccgaattgtcgaggctggtgccggtgttggcgagctgggcgacgaccggccacttatggccgtagagttcgatggtgccgtcggtggacacgttgacgtttgcgccggcaatcatctgaccgtcttcaagggggccttcgaactgggatgcgacccatggttcgatgacgaagtcagtgtccgggtcgtaaccgatgatctgcagcttttcggcacagcaggcggcggccagcgatgatatataggtctgttcggtggcctgtgcgatgccgtcggcctgcatgacctcgtcggcgatgtctttggtgaaatagaaagtgctgggattgccgctggtgagcagcgcttcagccttctgcgcggtgttttgcggcacgaccataaggtcggcgcccaggcgcttctccatactggtcatgccggtgttgaggttcatggtcagcatggtgccgccgaagaacgtcagcgcgaggatggtgacgacggcgagcagtgcgccggtgcggaacggcttgcgtttgaggttttcaatcggaaggccgcgcaatgcgatatgggatggcacgatgagtccttatgttgcttatagtgcggttgcaataagcgagaccggagtccagcgttcggaatggctgggctccggccgtctgctcgatcagttgcgcttggcggcgtgagagtcgagccagatggcgatggccgcgaacacgatggtgagcacgccgagcacgatgagcgtgggcagcataaccatgcggcagtgcatcatcgcgcccttgcagatgccgatcaggaaggtgggtacggcgagtagtagcagggcgttggctgcggcggcgatattgaggccgatgcgaatctgcggggcgacgaacaaagccacgacgcccaacacgaggatgacgacgccgatgccggtggccgcctgctgcgagtagtggcaggcacccggcatgtcatggccggtgcaggcgtgcgcaaaggtctggggcgcgatggtgatcagcgcgccgaacagaatattgggcacggatgcaaacagcttgttcttcataactactttttcctctcccctgttcccagggctcgtaggcgcaacctccgcattatgcccagatagtgatgaagaacacaagtcttgttttttgtgaatttatttggtatataactcagcccctcgtcagaggggccaatctatctacaacttctcaataggtgctacgcggagcatgaggcgtttgacgccggcggagccgaagtccacggtgattaccgaattgcggcccttgtcttgcgcgtcggtgaccttgccgagaccgtactggtcgtggctgatcatgtcgcccacggcgaagtcggcgatattcaggccattgtccttggtgagcttcgagctgggcacggcagagccggtcgaaccggatttcggtgtggtgcggcgcgtggtgaccttgccgccacgggtgccgccatatgaaccggatgaagaaccggaacgggaacgcgacccgtaagacgaccccgaacgggagcgagacccgtaggaggacgagccggagcgggaatcatatgatgatgaacgggaaccgtacgaagaacctgaacgggaaccatacgacgaggagccggaacccgagccatacgacgacccataccgcgaccgcgacccataggacgaacccgaaccggacgaaccacgcgagccgaacgtcgacgacccaccaaacgtggcaccgccgaaatcgtcatcatcccagccgcccaaatcgtcggcgaatccatcggtctcccagttggcgcgcatacgctccacgccggcttcacggcgtttccaatcaatcagcgaatccggaatttcgtcgaggaattgactgggcatcatatcggcggcctggccccactgggagcggacggcggcgcgcgtgacatacagtctctgcttggcacgcgtgatgcccacataggcgagtcggcgttcctcctgcagttcagtggtgtcttccatcgaacgcgaatgcgggaaggtgccctgttccatgccggtcaggaacaccaccgggtattcgaggcccttggcggtgtgcaaggtcatgagcgtcaccttgccggagtcctccgcctcaccgggcagctggtcggagtcggccacgagcgcagtggtctccaggaatgcggacaacgtggcgtcaggcgtgttctgttcgaattcggctgcggtggactgcagctgggagaggttctccagacgggaggcgtcctgcggatccacggatttctcaagttcggcccttaagcccgacttctccaatacttcggccacgatctcgctgggcttggagtcgtgcgcgtgcgtgaactgcgagagcgcgcccatcagatcgcggaatgctcgtagcgaggtggcggtgcgggtcggcacctcgatctcatccaagtgcatgagtgcgtagaagaagctggtgccatgctcgcgcgcgtaggcgagcagcacgccttcggcgcggtcgccaagcccgcgcttgggaacgttgagaatacgacgtagattcacatcgtcgtccggattgacgagcgcctgcaaataggccagcgcatccttgatttcgcgacgttcgtagaacttggtgccgccgacgagctgatacggctgattcgtgttgatcagcgcctcttcgagcgagcgggattgggcgttggcgcggtacatgatcgccatgtcggagtaggagatgccctcttcggcgtgcaggcgcgcgatttcggtggccacccactgggcctcctgctgggcgttgtccgccgcgtagccgacgatcggctcgcccttgccgagcgcggtccacagtttcttgggcttgcggccctcgttgttgctgatcaccgcgttggccgcgtccagaatggtctgcgtcgaacgatagttctgttcgagcatgatggtcttggcgttcgggaagtcctgctcgaagtcctggatgttgcggatgtcggcgccacggaacgcgtagatggactggtcggaatcgcccaccacggtgatccaggcggggccggacttgccggcgttcggcgcgcccgggatggccttctcccccgtgtccacgccggccagctcgcgcacaagcacgtactgggcgtggttggtgtcctgatactcgtcgacgagaatgtaacggaagcggtgatggtagtactcggcgacggccgggtcggtgcgcagcaactcgaccgtgcggccgatcagatcgtcgaagtcgacggcgttggccagggccaagcgatgctcgtattcggcgtagatcaccgcatagatggcttcaaggtcgcccaccgtgccgaactggtagccgcgctggccaggcgtgaagtcgggcgcgtgaacggcgaggttttccttccaaccggtcagattgttcttgaggtcggagatatggccgaggatcgagcgtggagtgtagcgcttgatgtcgaggttgaattcggtggcgatgattttgacgagtcgctcggagtcggcggaatcataaatggagaagccggacttgagcccgatggacttgccgtcgcgcctcagaatgcgcacgcaggcggaatggaaggtggagacccacatgcgctgggccaccgggccgatcagcgagccgagtcgttcgcgcatttcggcggcggccttgttggtgaaggtgatggccagaatctggctcggccatgcgccgaactggctcaagatccaggcgatgcggcgggtcagcacacgggttttgccggagccggcaccagcgccgatcagtagcgcctgaccgcggtattgcacggcttccgcctgctgcgggttcagatcgcctacgagttcctgcgcgctgcgtgcgatgacttccggctcgtcgtacactgttgcctccctttgaatcgcgacattcatgtttaccacatgcacgggtcagcgcaggacaacgtacacttacaagtatccatatcattcactgacatacagcaatgggaggtctaatgcaggaacttgaggagcgaatccagagcgagggaacggtgaaggcgggtgatgtgctcaaggtggacgcgtttctgaaccaccagtgcgacgtgcgtctgttcgaccgcatgggttcggcatgggccgctcatttcgccggcaagcacatcaccaagattctgaccatcgaggcgtccggcatcggcattgcgtgtgtggcggcccagcatttcggcaatgtgccggtggtgttcgccaagaaggcgcagtccatcaaccttgacggcgaccagtacaccaccacggtctattccttcaccaagcagaaggagttcccggtgatcgtggccaagaagtatctgaacgccggcgaccatgtgctgcttattgacgattttctggccaacggcaaggcgttgcgcggtctgattgacctgtgcgaggcggccggtgtcacggtcgagggcattggcatcgccgtggagaagggcttccagggcggcggtgacgcgctgcgtgccgaaggctacgatgtggattcgctggccatcgtcgagtccatgaatcccgagaccggcgaaatcacatttaggcactgagcacattgactgctcccgccagcgggagcaacagagagaagaaaagaatcatgtcagagaagaaaaccaagaattccatatcctttgaggcgctgtcttcgctgaacgcgccagtatccttctggaagggcattccgttcggcctgcagcatgtgatggccatgttcgtggcgaacctcgccccgatcttcatcgtcgcctcggccgcgaaaatgaccccggcccaatcggccaccatcatccaggccggccttctggtggcgggcctgggcacctgcctgcaactgtacggcgcgtggctcatcggctcgcgtctgccgatggtcaccggcatctccttcacctacgtggcggccgccgtggcgatctgcgcagacaagggctatggcgcagtggccggcgcggtaatggtcggtggcctgctggaactcgtgctgggtttgacggccaagtattggcgtcggttcgtgccgcccatcgtctccgccatcgtggtcacgtcgatcggcttctcgctgcttaacgtgggtgccacgagcttcggcggcggcagcggagccaaggacttcggaagctggcagaacctgacgctcgggcttatatctttggtcgcctgcctggcgttccagctgttgatgaagggcacggccaagcagctgtccgtgctgttcggcctggtggtcggctatgtggcggccatctgcatgggcaaggtcgatttctccggtttccagaacctcgctattgtgtccgtgccgcagttcatgccgttcaagcctgagttcgactggggttcgatcatctccatcggcctgctctacgtcgtctcctcggtcgaggtgctgggtgacaccgccgcgctgaccaaggtgggcctgaaccgtacgcccaccgaacgcgagaccgcgggcgccatcgccggcgacggcctgatctccaccgtatccggcctgttcggatgcctgccgctgacctcgttcgcgcagaacatcggattggtggccatgaccaaggtcgtcaaccgcaaggtgattctctccggcggactgattctggtgctggcgagcttcgtgccggccatcgccgaggtgttcaactcgctgccgcaggcggtgctcggcggctgcacgatcatgatgttcggcaacatcattctttcgggcttccagatgatcgccgaagcgggcttcacgcagcgcaacatcacgattgcggcgctttcgctgaccatcggcatcggcttcacccaggtgagcgacatcttcgcgcagttcccggcactgttccaacaaatcttcgcctcgaactgcatcgccgtgtcgttcgtggtggccgtaattctgaacgccgtgctgcccagcgaggagcacttcctctccgcgcccaaggaggcaccggccgcggacgccgagtgataacaacgcgacatatcagctgcgcataatcacatgctgatgccctatcgtcttgcaggatgatagggcatcattgattttgagagagactacaagttgaaccatgagttcgagccggtggcgtgtcgatcaatcgacatcttcccattcgaggatgtctccgggttggcagtcgagtgccttgcagatggcgtccaatgtggtgaagcggacggctttggcacgtccgttcttcagaatggacacgttggcgggcgtgatgccaatttgttcggcgagctcgccgacgccaatcttgcgtttggccatcatgacgtcgagattgatgcgaatcgtcatctcaaatcacctgctcgagttcgcgcccgatccggacaaggagaacagtttccatacggccacgaacgccgcttcgatgcagagcaggaacagcacgcccataatgagacatgaccagtgcatcgacgtctggctcgggcagaggccggccagcgcgccgctcaatcccggtacggcgaatagttggccccataggcaggccagccagaccagaatcacgatggctttcaacgcgagcaacacccatcggttcatgtagtttttcatagcccggtcctttcaggtgccgacgtttttggcgacaccgcgaacatcgatatgactatatcgaaaaacgatataccttgcaaggcgtattgcgtcaaccggcattggtcgctcatatgcatataggcttcggcagactgtcagcagaccgtcagctcaacggaacgaacgccatatgagccacccattcgcgcacgagcgtgatgacggcttcgggttggtcgatgtgcgcgttgtgaccggcattatccagagtcacgaaggtggcgttgggatagtgcggcaacagggcttgctggtcttcgtatccgacgatctggtcttgcttgccggtgacgatgagcaccggacccgcatatgtgccgagcatttcctcgggattatcggccagccaataacgctgatccagccgttcgcatgccgcacggtcgcacaacgccacgccgggcaggatgaaccgttggtagcgccgccacgcgtcgaatgactggttgacgcccatggtaatgaaatcgaacacctgttcctgtggcaaggagtgcgtcagcttgggattgggctgtgcaaccacatgttcggccacatgccggccggcatgctgcgggtccacgaccggcgcgatcaatgccataccggccactcggcgaggttcgcgcgccaatacttcgcggacaagcgcaccgcccatcgagttgccgaccatggcgaatggagccgctttaccgacaaggccgtcaatggccgtttgcagccaatccgccatttccggcagcccgcaggcatgctcgggcaatgccggcgtacggccgaaaccgggcagatccagatatatacggcgaattgaatcattgccgtcaaacgccttgtcgagcatcatcagcgaacgatggtccacacccatgccatgcacgaacacgacgggcaatccatcatcattgccctcaatcgcgcagtacggctgcaattgtgccatgtgttcctctccttcaacccggtacaaatcgcctttcacacaatagcggcagcagctcccctggtgtcggagcaatcccgaccgccattctcggtttcgaggggctgatttcgtggtttggggacatccacttccgtttcaaggggctggtcattggccaaaacccaagtacgaatggcttcatgccaacgtcatttcgccgttttggagctgtcgctactcggccatcagcccctcgaaacggaagtggatgtctcggaacgagcaaatcagccccttgaaacgcaaatagacgattgcgaatcgacttatcagctgcgtcgaacttgcaatagagatgtcggtgtatcattccccggtctgattgcgcggatgtcaggaagcgtgaagaattgtcacaaagtcgcgtgatggcgcagccgccgttcaggtggatatgccacgctgtcatgatgacggccgagccggaacacgacaaatctcgcatgctgcataggccagccggtcacggtcagccatgacaccgaaatattggaggcgcaatgggacaacaggtgcggtgcggcagacgccgctcccatggcgcgggcgcgctgattgcagccgtcatacttgttgttgcggcgctgatcgcggcatggacgctgctgccacggctattcacgcctcacgagaccgcgcgcacggccgaggaagcatattgcgcggcggtgtcgcccgacggagcccgccgcaccttgacgcctgatcaggcgcagaacgcggcgctgattgcgaacatcgccgtcacgcgcggactgccggatcacgcggcgacggtggccatcgccacggccatgcaggagtcgaggctgacgaatctggactacggcgacttggattcgctcggcctgttccaacagcggcccagccaaggctggggcacggcggagcaggtgtccgacatgacctatgcgacaaacatcttctacgaccatctgctgcaggtgccggattgggagacgattccggtggaggacgccgcgcaggaggtgcagcgctcaggctacccggaactatatgccacatgggatgcgatggcacgcgcttgggcctcggggctgaccggcgaacggtcggcgggcgtcacgtgcgcgttggagccagcaacctcctcggacgcggacgggttggttgccgccataagcgctacactgccgaatgtcaaggtctcggttatgcccctaaatggcaaaaccggcacgaacaacggcgctgcgaccaatacggccagcacaacgttgacgatcacgctgccggacggcctgtccgccgacaaccgcactcgactttgctggcagacggcagggtggctggtcacacaggcgcatcaatacggcattgatgcactgcacgcggacggcatggattggaaccgcagagccggcacatggaccggcaccgaaaccgccgagcagaccgtcaccgtcacgcttgcgtgatgtgacctataacgccgtcgcgaccacaaatccgactgactggagcctacgccgtcgatgctgcctgaggcacgacacggatatgttttttactcgttcgaatgagcccaatccacgacggcttcgatgttattgccatccgggtccagcacgaatgcggagtaatagccgggatggtacgggcgcggaccgggagcgccgttgtctcggccgccggcggcgagcgcggctgcatggaacgcctgcacggcttgctgactgtcagccaggaacgcgatgtgtgtgaccggcgtgaccggcgaagcctccgcctccggcccgtcaatcggcgacacgtagaaatcggagtgcagggttccgtcatccacgccgaatccgagcgtgggctcatgatgcgccttgacgatatagccgagcggtgcgagcgcctgtttgtagaatgtgatgctacggtcgatgtctttcacgtgcaacgtcagatggtccagcatggtcttggtcaccctcccctggttcttgtattcgattgctgcttgcagtgtaagcccgaacgtttcccacagggccgcgcatggctatgatgagagcaatcgcacgtcgagttcgagacaatattcaaaacgaatccaaggcaatagggggaatgatgatgaccaaggcactgattgtggtggatatgcagccgacgttctgtgaaggcggcgaactgggagtcgaaggcggcaacgcggtcgccgagcggatcgccgattatgtgaacgcgcatcgcagcgagtacgcgtatatcgcaaccacgcaggactggcatatcgagccgggcgcgcactggtcggcggaaccggatttcgtggacacgtggccgaagcatggtgcggccggcacgccgaacgccgaattgcatccggcgatcaaggcgctgattatccatcatcatttcaagaagggccagtattcggcggcatattccggttttgagggcatcgaggacaataccgaccgtatccagacccgtgaggaggttgcggccgagcaatccgccggcaagacgctggccaatgcgctgaaggccgccggcgtgagtcgcgtggatgtggtgggcatcgccgaatcgcattgcgtcaaggacaccgcgctcgatgccgggaagttcggtttcgaggtcaccgtgttcgaggacctgaccgtaccggtcagcgaggagctcggtgtcgcggcccgcaaacagatgacggcggccggcatcacattggccgagtcccgctgatcaggccggatatacccagagcgaacgcacgaacacttccgtatattcaaggccgacactgccgcatagtcgcctagtcgatatgtgaagaaggcttttatggttacgatgctgctgacttcgatattccgcaacgcctcgtccgccgtgcatgaagtcgaaccgcatccgcaaggcaagcgggtcgcgttcatcccgacggcgagcgccgtggaaccgtgggggccggttcactcggcgttgagcaaacacgcgctgcaacgcctcggtttcgaggtggagcaactggatgtggaagatgtgccgagcgggtccgccgaacgcgtcacgcgtagcatcgccgaggccgactgcatctatgtgggcggcggcaacacgttctttctcctgcaggagttgcgccgcaccggtgccgaccgggccatcatcgagcaggtgcgcgccggcacgccgtacatcggcgagtccgcgggctcggtcatcacggcacctgacatcggctatatcaagctcatggaccgcacggacaaagcccccgatctcaccgattacgcaggattgggcttggctgatttccgcgtggtcccccaccatcatgcaacggccatgggccacgccgcacaacgcattctcgaccggtatggtgccgatctcagtctcaagcccctcaccaaccggcaggccctgcttgtcaaggatggcaaaacccggctgctgcgatgatgcgggtcgtcggcccgtcgcccattcggcatcgccgtggtgtgtccggcctgacatgcctatcgagcggcatcaatcacacagcaatgtggctgggaacctcgccgaacgtcaacacctgcatacatcagcacggcaaaatctgccgaaatcgcccggcgcacgagatgccagccggccccatccgtcacctcagtgccgtaccgggccaggcatggccttgagcaacgggatgaatccggcgcacagtaccagggccacgacggcgagtatctgccagtgggcggagccgagccagccgccccacgtgccgacggcaccgccgatcgcatacgcgaacctggcacggccgctgaatttggccaggtcaccaccgctcagcagcagttgtcgcgatacgatcacgccatgcgccagcaggccatagccgaggttgttgatgagccatccgacgcacaccgcggcaaactcgggaaccagtacggcggcaagggaaatcgccgtggcgattgccccgatggcggacacggcgcgcatgccgagttttgcggagagccgcatgtagacaaacgatccgacgatgctgcccacgccgccgaatgcgtagaccacggtcagcatatcgctgccgtaccgggagccgatgcccagcaacgcatagcttgcccacagcgacggaatcagcgcaagcagcagcgatgcgatcagcagtctgacccgggtcaagcgggtgaccggagtgcgctgcggcgcgtgtgacgtgtcggccgccgtggattcgtcggcggagccgtcgccgtcatcgccgcccgcaccatcgttgccgaatcccggcatgaactcgcgggtgcggaatcgcgtcagcgcgcaggcaaatgacagtgccgacgaggtgagcagcatggccatgatggaggcgttggccaaggccgatccggcaacctggcccagcaacgtaccggccacgctggcaatcacggcgacgtagccgctgtacttgacgagcatgtcatcgtcgtcgccggccgcatccacctcgaacacttcggaggccacgtcgatgacctgcccggtcatcagcagcaggcatgacagggccagcagcagccacttccaatacgtccaaccgttgggcaccagcgcgaccgccaggcacagtacgccttccacgccctccgtggtcgcaagtgaacggaacgagccgaaccgctgcacgatccatgcggataccggagaagcgaagtcgatgaccagattgaacgtcttgcggaacgcgatcacccatgccggcagtccgacgatcagaatcgaaggaatcaccgacccctcgaaaatcgcgttggacagcatcgaaaacgtcatacccaccaacgcccatcgcaacgccctgctcaataccgataatcctcgcataccttagttccttgtccttgccagtgtaacggaattatgacttctcaatcgtccccccgctgtctaaatgaaagtgcaacaccctttcactggttatctggacaatctccaatctaaagggtgttgcactttcatttagacagcggccccccatatccgcatgtcactgctgccatcataatgagccagtagacgcctttaagcgttctgacaaccatggaatcgaaaatcgctatgcacatcatagaacagcactgccaaggcaagaggtctgaccagtcgctcaatgaggacaggctgatcatcaccgatggtttcgcggcagtggtggatggagtgaccagcaaaagtgtgcaccaccctgccggccttgttcttggccgcgtccagcaccggcgcgaggccggcggcccattcgcgcaccgaacggccggcgagtatgtcgttgccgcccacgcacacgatcagcacatccggccggtcgttgatatcgccgatcatccggtagcgcacgcgccgggcggtcgcgccgagcttgccgaccgtacgccaggccaccggccgaccggtacgcttgcgacgcgcgcggcaagcagcggcataatgcctttcgactggtcgtccacgccacatccggccaccaatgaatcgccgaccatgacggcaagaatcggcttcacgccgttcgcgcctttccaatcggggccgatcggcgccttgatatccaccacgcgacccttggcatcgaacaaaccgaaccgtttgcccttcggctcggacgccaacttcacccggcccttggcccacataccctcaatcggagcaacggcagcatcaaatcacacgcaagattcccacgccacccaacataatccgccctcctcgacctcgttagcggccagtagcaacccatattcgaaaactcgataaccatcgtcaattcgcatagtttgaacgttttaggcgttttggtcgctttggacgttttatactgtgatagataaaaaggaggtcaccatggcagaatccgacaaactcaccattccaagaacaatccttccatccatcaacattgacgacatgacgacattggaggcattcaccgcacgatttcttgatgagcggatcttcatcaaagatgccagcggcgtggagactcccctaccttcgcagctttgcgacgccgtcaggcagacggccatccttctcgccgaaggcaaaagtgtaacgatcagtgccaccgaacaagatctgactaccgaacaggcggcggcaatgctcggcatttcgcggcaaacactgataagactgcttgataaaggacttattcctttttcacgtccgtccaatcaccgtcgcatccggctggaagacctgcttgaatacaagcgagcctcgaaacacaccaaggattgcgccctgagccaaatgatcggcgtcggggaagacgccgaattgtacgacctgcccgagccgaccccgcaggaagccatgcatgcggtatcggaggtaaggagagtacgggccgatgctttcggtgtttcttgatgccaatgtcatctattccatcaccttgaccgatgttctgctcaccttggccgagcatgacctttttcttcccctgtggtcgcctaacgtattacaagaagcacaggaagccgcctcccgaacactgcctgacgccgcacaacaagccttccgaaaaagactgataatgatggaccaggcattccccgaatcctccatacatgttgaggaatcggaatggagccaattcgatctgcctgacccggatgatcgtcacgtacttgcggctgcggcacagggacaagcagacgcactggccacgcgcaatatcaaggattttccccagaaactgcttgactctttctccattcaggtcatcacgccagatgatttgctctgtgtattacttagacgaaatccggaagccacagctagcgccatacgtgagcttatcgattctcgacatcggccaccgataaacattcccgactttgctaaaagacttgaacgctctggcgcaacacagtttgcagccgctattgcgcatatacgacagcctctcggcaatcattcgtactttgaccagtaacccatgaattctggatgaattggggtgaaccggcggggctggaggcgagcgggcggcggattatggggcacaatggtgtcaaggaggccgccatggtcgatgactatactgccaaaatgactgagctgatcgaactcatgcgtctgatcggcaacgatacgcagcagtgcgaggtcaaggaatgcaagcgcaagatctcctcgaccatcaccgatacgctgtccgcgttctccaacggctccggcggctggatcatccttggcctgtccgaaaagaacgggttcacgccggtcgagggattcgacgcgcgcgccatgcaggaggcgctgagccaggcgtgcgagaagatgacgccggtggtgcggcccgtgatcgtcacctgcccgttcgaaggcgcgaatctggtgttcgcgcgcatcgacgaaatgctgccgcgcgacaagccctgcttcaccaccgcgctcggaccgcacggcggctcgttcatccgcaccggcgacggcgaccggcgcatgacctcctatgaggtcgaccggctcatcgaggagcatctgcagcccacgtacgatttggatatcgtgcccggcgccacgaccgatgacctcgacccgcagcttgttgccggattgttggcgcgcgtgcgcgagcagcatccgcgcgtgttcgccgaccgggacggcatcgatgtgctgctggatctgcaggtgttgcgccatgatgattccgacgagtcggaggtcggcggaatactgcgtcccaccttggccggactgctggcgttgggccgctatccgcagaagttctatccgcggctcggcatttcgatagccgtgtttccgggaacgagccgggacgatgtgttccggggcgacgaacgattggtcgcctcgaagtcggtggtcggttcgattccggtgatgatcgacgatgcggtcgactcgttgatgcgttggattggcgcgaagaagcccgattatccgccactcgtgttgcgcgaggcgattgcgaacgcgctcacccaccgtgattattcgcccgatgcgcgcggcacgcaggtgcatatcagcgtgttcaccgatcgcattgagatcaccaatccgggtggcctgtacggcatggtgacacatgatgtgctggcgagtccgcatccggtgacgggtgcaccgttcgtctccacccgaaaccagttcctgttcacgctgctggagtccacgccgtatccgggcggcgggtttgtgaacccagaaggcggcgacggctaccagcgcatcgccgccgcgttgcgcgaggccggcatcgaaccggcgaccacgcgcaacgacatcaacacgttcacgatgaccatcaccaagcagcgcacgatggcgaacagttcaccgggtgacgtggtcaaggcgattatgaccgtactggaacggcattcggcgatgagcgtcaaggagatcatgcgcgaactgcagttgactccgctggccgccacgtccggcatgcgcgagctgatgaaggaagggcgggtcgcccgagtcaagttcgccgatgacccggtgcagcggtatcggttgaaaggctgattttctcactcggccagctgcgtggtggcgggcgcggccagggtgggacgggatcggcggaagcggccggcggccaggccaatgcagatgaacatcacaccgaacagtgcgaccaatcccagcgagccggcccagccggcgacgcttatgccggtttcctccgccgtgccggagccgagcgcgttgtcgatcgcggtgcaataccaccagccgggcaggaacttggctatggtcaccatcacggcgggcatcatgtcaatcggcaatgcaactcccgacgtgaacatgatgagcaggccgaagatattggcgaatccgttggcagccgcctccgaaaacccgaattcgctgagcatgaatccacaggcgacggtcatcagcgcgtacacgcaggtcgcgccgaacgtcatcagcactcccccgacgctcaggtgcaacggatcaagtcctgccgcgaccatcagaccgaccgccagcaccagataaccgacgcatacgacgagcgcgaatccgcccaacgtcagcaaccgctggagtcccatcgacgacatgcgttgtggggatgcggtgagacgacggcgaacttccccggtggtgaatatgcccagaatcattgacccgcagacggtcatcgccaaaaacagcggatacagcgcggttttcatggtgctgccaaatctgctggccgtcatgtccgaagcactttccgcgtccgcgcttgccgtgtcgatcacagcgaccttatggttcgcgtccatgtcactcgccgatgcggcagccgctttcgatgcctcgaacagatcgccgacgctgggtttctcaatctgaccggccggcagcatatcaagcatgtcctgattcgagaattcaccaaacccgcccatgccatcttcagacgaatcacccgcagtgtctccaatgtcgataccgaccatagctgcgagcgccgcactatcgaccgtcgtatgcgagccaatcagtgccgtacgtgtgagtgaaaggaacccgatgacgttcatccgggccatcgagcctgcgccggacgtatagctggtgaccgtgtccacgcttggtggattctcgcctgtcgccgcggcatcaatgaaatcgtcggcgaaaccatcggggatgatgacgatcagatccacccagttcgaggcgacggcttgttgcagagtttcactagcatcgtcaacgttcaccagttcgctggaatccgacaggtatgtgcgcatcgatgacgcgatgccgcccctgtccgagtctcgatcgatgacggcgacacgcattttggccggctcgaatgccgcggctgcggaatcggatgtgccagacagcatcgaccagctgatagacagcatcatgatgcccacgaacacgaggtaaatcaacaggtaggccctgtgcgagaacagtacacgcaatgtggctttacaggtgttcatagcgttgcctcctcagcattgcgatgccggccaagaggaataccgcgctcatcgccagcaaaatggcacaagtggtgatgaacggctggtagctgtcgtagtacaaaatgtcgtaaaacaggttcgtcacctgttgcgcggggttgatggtgccgaggatgggcgcgttgcgtgctatccagtcactgatctgcatggcgaagctgccgtacagtccggtgaacagcgacaatgtgcaggcgattccgctcgacaaaccgtatttcgtgtcgtaggaaagcttcggtaccgcgccgagcaaagtaccggctgaactggtcatgaatgcggcgatgattaccgcgaccaccgtcaccggttctcgccctccaaacgaaatgtcgcaaatgaagcgaatataggccaatgcgataagcaatgcgaccgatgcgcacaaccagcaggcaaggaaaccggcaataagctgtctggcatggctcaatggcgccacggtgcggcgaatgcccaatgcggacaggttggcttgtgctgtggagaccgtgctgattgagtaccccatggcaatcatgcaggacatggccagcaacgcgtaatagtatctggcgatggcattgggctggaaatgcgtgagcgttgtttcgtgagtcacatcgacgctttgcccgatgctattccagaagttgcggctgagcgcagcctgtggattgtcggcgatggtttgtcgggtgacggcgtcggtgcggttgtacaggtcgatggcgctgcgcaatgccgataggctgatatccagtccgacgcttcctgtggtgtcattggccgcggtcaccgtttcccgactgatggttatcgccaaacgcccgttgccgtcagcagccaggtagccgcggactgtgccatcggcgagcagctgttcggctttccgcacggtgtcggctgcggtgatggtcagcaattgctgattgatatcggcgtatgccgtgccgtccaaagactccgacgatgaggccgtctctccagacaaggcatccacaaacgtacgcgctccgtccgcctgctgccagcggctatcttcgacgacggccattggtatcggtttgagctcgtatccctcggacagtccgccgaagaacccgttgaacatggttgccagcacgatcggaaacacaatcatccagaacagtgcctgacgattgcgcaggttcgctttcaatgcgaccagaaatgtggtccacatgatgtctccttac

SEQ ID NO: 370 - DNA, 12959 bp, Unknown
  R42_10m  MAG No. k141_33678
tatatcgtatggtggcggcgtggttggtctggtcgcggccatcggcatcgcgttgacccgtcatgtgagcggtttcgcgttggtggcggccccgctggttgcgttgttcgttgggttcctgtggttcccgttggatttggcggctgcctgtttttgtgtggataatcgtcgtgagtcgtgtggcgagtggccggccgcgttctggctcaccgccgaggcgttgttcgtcattggcgtgtgtacggcgctgcccatgacgtgacgtctggttgtgtgctgggatggtagtgcaaaggagggtgagtggggatgtccattcggttggatgagcgacggtatgtcgaggagttgaagcggctggttgcggatttccggatgtggaagaatccgctggttccgttgccggatggcttcgaggacgatctggcgtggagcaatgttgccttccttatactcttcaaaaccaaaatcggtttccttggccgtagtaagatcctgaatcttttccaactgcctggccacaaccgaattggtcagagtcgcctgaggatgcagcatattgtcaactgacctatatccaaataccgcagcaattgcgcaaacgacgactaaaacaccaataagaatggcttgtgccttcactggcaatttcttccaccttttttcattgtaaatccttcttctctttgagggaatatgacattaactgtccgcccccgaactattttcaagaccaaacggcataatatggggcttatgagcgaacatgtggagcatgggtttgggccggtgtgggatggtgagtcccgggctttgattttgggatcgatgccgagtccgaaatcccgagcggcggcgttttactatatgcatccacagaaccggttttggccggtgatgcaggcgctgtttgccaactccgctgatcctactgacgctatcggcgatttacctgagtcccgtcgtgcgtttgctctgcgccaccacattgcgttatgggatgtcattgcttcttgcgatatcaccggagccagcgatgccagcatccgcaatgccgtgcccaacgacttgacaccaatcttgcgcggcgctccaatcgcccacatcttcgcaaccggcgcgaaatcagcgcaactttaccgcaaacttatcgagccgcgcctgaccgaagccggcatcgccatcggtatgacccaactgccctccaccagcccggccaacgcctcaatgcgtttgccggaccttatcaccgcctatcgcgaagcttttcgagaatacaatatagttgttcgccaaactactaatatatgagtaatttcgcctgtatacgcccaaaatcactcatatattagtagttattgcacggcggtgacgcacagctgaaaccgccattcggcacagcggcagcaggtagaggaaggttgcggcggccaagctcaacgtgggggcgttgatggtggcgagcggcactgcaccggcgatcgaccaaggaatcaacggagcgatcaccacggcactgtcttccaaatcgatagcttgcgcggcgcgttcggattcgtcgtcgccgtatagcccgccgcacaactggtgagtgagcatgatggtgagggtttggttgcaggcgagcgccgccgcgcaagtcgcggtaatcatggtggcgccacatgcgccgatgcgatgaccgagcatctcgatgacctgctgcagccgagcaagcatccgcgtctcggcaaaaatgccagcgtaggcggaggagatgcagacagtgaccatcacagtgagcatggagaggatgccgccgccgtccaggagtgcggccacctgcggattttgcgcatggtaaccgaaaataagcagccgcaacagttccgcccattccatgtgctgcacgcccacgcatatcgcgaccgaggcggcaatgctggcgagcataagcaggcgaacgtccacacgcagcaacgccaacacgatgaccagtaatgctggaactagggtaagccaatgcaaatcaaaggccgatgagaacaatccgccgatatcggttatgctgcttgtgttggttgaaacagccgctctagccgcaccgaatccggaaccaccgcttgcacacagccactccgccaccgcagccgcaacgtataccacacaactcagcacaaacggcaccgcaccagtgcgcagcatgcaggcaatagtactgaacaggttcgtatgcgtaagctgtttgaccagcaaggcactggtggaaaccggcgaacaacgatcgcccacatagacgcccgcaagaatcgcgccaccgagcatcaccgggttcgcctgcatcgacaatcccagcgacatgcagatggtacccatagtcgccgcactggcgaacgacgacccgaccagcaccgacatcgccgagcacagtagaaacgacagcggaatcaccgtggcggcgtgaattaccgcagtcgaatgggccacgatgaaggcgatggtcccgctggcccgccacagcgaggtcagtacgccgatgagcacgaaggtcaccaccacggtccccgcggaccgtacgctgccggccgcacggctcgccatcgcgcgcagcgagcaccggcgaaccagcccataccccatgaacagcagcacaccaacgaacagcgcgggaataatcgaccagccgagggcgacgctggcaaacagcaccgcacagaacagcaacatcgcgcccgcttccagcatgtgatcctctcctcttccggctacgacctcatctcagatttcatctcatgacccgcagttgcaaacatcaatgctattcgcacgagccatgactcaagataaccccagattctacgacgaacgtatagtactggttattgcgcaatcattatgactggatttagtcaccaccggaaccgcgaacagccaaactaatattgccaacgattccaccatccccaacacgattccagatgaacgcgccattgctccaggcgatctatcttcgttggcgcactgcccgtttttgctgggcaatccgcaggacatcgatggccgcatcggcgagattctgttccgtcgtgccggattcgagccgaaagtcgccgcccgttcggacaacatattgacgctgctggaactatgccattacggcatgggtgcctgcttatgcccggagcggttcctgccagcgctgcttgacggcgaacggctgcgcaccttgcatgtgctggattgcgggccggagaccgaatacgccatccgattcgacgtttcggccacaccataccgctggagcgtcattgatgatttcattcgttgcgcccgcgaagtcaccaccggcgaaggcgtgaacgaccgcggcctgtcccgcaagcatatcttcgagagcattgatcagacactgaagaacatgcagaccgactatctggacatgtacttctgccaccgattcgacgagaccaccgatctgaccgagacgctgcgcgttgtggccaacgagctcggcacgaacctgccggtgctttccatggcgtggatcctgcagcacccggagatcagctgtgtgatcgccggcgcctccaagcccagccagctggagaacaacatgaaggccgcgggctttgtgattccggctgacgcgatggccgaaatcgacaagatcactggcttccaccactttgagcgtcacgtgggctgacggatctgcggcttcctccaacgggagcgattgttaagcgccgaaatcggtatcgccttgggcctcggcctgggcgatagcggtttcggcgttttttgctgtttgctcaatgacctggttgtatccggtcaaggccgcgaacggcatgaactgggcggcccgctggtgacgagacatgtgcggatgcttgcgcgaccggtggtgtggcaggttgatgatgtcgtcgtatgcatgggtttcttgcagggtcatgcgcgatggcctccgatctgacggttgcgagcctgaccggtggcaccgtcttccatatccatggctttgacgacggcgttgcggccgaatttacgtttcacatccagcaacgcacgctggatatcatgctctcgacccaacgtctgtgcggcggcatcgtccccacaagccggcatacgcccgcttccgtcgccaccggattccgtgctatcacagtcatatcgcatatcgccatcatcaccgaacaaatcaagctgctcatagcgtttgcccgccgccagttctttgggcgtggccacatcatcggcaacaactgtgagtcgacgcaccagcaaccgcgcatccacaatacgctcgtacagcatggtcatcgcctcgcgaatacgtgcggcagacgacgtaaaatcgcccaatccaatcgaccccacggccgacttaggcacccgacgaccgaaacggtcaacggtcaccggcccttgataggtctttgccgcgcgttcggcggcacgcctcatcgcccggtctgcgcatgaatcaagcttcgaagcatcgagactgccaatgtcatagccgaccgccagtgtcagccgattcgtcatcacccccttatcgaccaaatcgagggcgagcgcatcggccatctccttggcgatcagccgagccgtatgccaatcggcgggcccggtgagcacctgcccgctgctgatactgtgcgcacctggctcataggatcggatatccgcgatttcgcacggctcccagccccacgcatggtcgatgagcagttcggcattgacaccgaacatgcgatacagcaggtcttcgttgtagtaatccgaagcacgacccaccgagcatcgggcgatatcgcccatggtcatcagaccggcgtgctcaagtttcctggcatagccgcgcccaacccgccaaaaatcggtgagcggacgatggctccagagcagccgacgatatgacatttcattcagttcggccacgcgcacgccgcccttgtcggcgggcatgtgcttggcgacgatatccatggcgactttggccagatacatgttggagccgatgccggcagtggcggtgatgccggtttcatcgagaatttcgcgcacgatggttcgcgccatggcatgcggccccatacccagcgagcgcagatatggcgtgacgtcgatgaacacctcgtcaatcgagtagacatggatgtgctcgggtgcggcgtatttgaggtagatgccatatacctgcccgctgacctccaaatagtgcgccatgcgcggcttggcgatgaccatcgaggctttgagtctcggcgagcgttccaggtcgcgcgcatcgcaggactccccgattaatcggccgccgggagcatggaccgcgcgctcgatgttgactccattcaggcgctgttttacctcgaatagccgcgcacgaccgggaatgccatagttcttcagcgagggtgagaccgccaaacatattgtcttatcggtgcggatttcatcggccaccaccagatgcgtggtcaacgggtcgagtccgcgcgccgcgcactccaccgaggcatagaaggacttgagatcaatggcaatataggtatgctcgcgttgcgtcgataccgttccgctgcccatcgccatcacctccttaccaccgccggcccgaccagcatatcaatacggtcgaacatttgttcgatgcaacatgcctgttcgaagctgccgaaatcgacgcacgcaacgcgcccaagcatgctcttcacccacaccacacgcgcagcggcagagcagcggcagagcagcggcagagcagcggcatgcatgcgtaccatgggaatatgaagaaaagcattacggcagacagcgattttgcggcgtgggcggcagcccgatcccagaaaacgaatcgatcactggcaggagcccgcctcgcgattccggagccgcagaagcatgccgaaatcaagtctcaggcccagcaatggggcatgaccgtcgaagatgccacgatgaccgacgggcacagcgaggaattcctctgtgacggcacacaaagcattgattccattgccgacatgcgcacggcaagtgggctggaggcaatggagtacgcggaacagcacatgccggtattacgcgacaccatggatgacctcaccacccgcgtcgatttttcaggcattcgtattgccgtctgcctgatactggagccaaaaaccgcgattctgctgcgcaagcttaaggccgccggcgcaatcgtcggcgtatattgcggcccggattccacggatccccgagtggcggaacagctgcgccgggaaggaatcacggtcgaatccagccgagcctggaccgcggaacaggcgcacgaggcagccctgcgcctgctggacaagatacagccgaacatcatcatcgacgatggtgccagcttcgcccgtctcgcctcgctcgaacgccccgagctcacggcgaatctcattggagtggccgaggaaacgaccagtggcgtacgcgcgttccagcagatgcaggaagcgggagccctcacctacccggtcgtagccgttaacgacagtgtgctgaaaactggattcgacaacgcccacggcactggggagacatgcgtgaccaccatgcagcgcattctcggcgagcatgcattcgacggcaagaacgtcaccgtcatcggctacggcccggtcggccaaggcttcgcacggcgtattcgcgcgcttggagccgaagtcaccatctgcgatatcgatccagtggcttcactcaaagcggtgttcgacggcttcgccgcacaagacattgacgaggcactcccttgcgcggatatggtggtgtccgccactggcgtgagacatacggtcacacttgagcacatgcgcgcaatgcacgagggcgcggcgctcgcagtgatcggcggcatcgccaacgaaatcgccttggacgaggtaagcgacttcaccccacaggtcaacagggacaccgcgcaactcaatgttcccgacggaccaacgctcacgctaatcgccgacggcgatggcgtgaactacacggtgggaggcggcaatccaatcgagatcatggatctgagcttcgccgtacaggccagcgccgtcgcatatcttctggaacatcgaggcacactggatcacacgcttatcagacttgacgcagcgaccgaccagcgcatcgccgccagcgcgctcaaggcgcgcggataccgagccagccatgccgtggaggacaacggctacgattggcgactgaccagattcgcggaaaacgaccgagagaacgccgaccgatagccataggcacggcaccgaacacaacgcagcgaggagaatatgaccgacaacacctggccgaccgtcgataccgagcttatcgatgaggtgacactgtattccgccaaactcatcatccccgtgacgggccccgtcatcatcgatggcgcagtcgccatacatggcgaccgcgtggttcatgtaggtaaacgccgctgggtgctggaggcgctgaagcaggaaatgacgtctcacggcaccatccgtgaacggcattgggatggggtgctcacccccggattggtcaacgcgcacactcatctgcagtacagcggcatggtgcaggtcgggcaaggcacctacgatcggttccgcgcctgggaactggcattcaacgaggtgtacgccgaggcgcagaagacccagccatggaagcagtgggccgaggacggtgctcgccagatggtcgaatcgggaacgacggccgccgcagacatcgtcaccgatttggacgccgccggcgcgctggcttcgcagggcatgcacggcatcgcttattgggaggtaatgggctggcacaacgacgaatggatggaaaagggccgcaccgagctcatccggcagttgcgccggatgaacgaggagcagctgccgaacctcggcatcagcccgcatgctccgtatacgctggagtccgaaccgttcgttgatcttccagacattgctcgtcagctgaacatgcgactgcatatccatctggcggagaccccgctcgaggccggcacttatccgccggtgctcaccacttattcggcgtccgactggcgtgaccacgattgggaaagctaccggcagctcaaggacgtgggcaaaggtgcctccgccatccagttcgtcgatcagcttggctcgcttggcccggatgtgcacattgcacacggcgtgtgggccaatggcgaggatcggcgtattctacgtcagcgcggcgtgggcgtggccttgtgcccccgatcgaatcgcattaccaacaccggcaaagatgcaccggtgcgcgaatacctcgaggaaggcaatctggtaagcgtgggcaccgattcgctctccagcacgccgaccctcgatctgcttgatgacgtgtcgatgctttacgacctggcccgcgaacaaggctatgccagcgacgatctgacacatcgcctgattcgtatgatgacgctgggcggtgccgcctccatgggcatgcacgtgggccgcaaccgcattggacagatcaacgcgggcgcattggctgatttcgcgttcttcgacatccccgtcgacacatcatctccggccggcatcgaagaaacgctggaaacactggtgaagcacggcgcaggcacgaaccgagccacggtgatatccgggcgcgaagcctacaacaacgcctggtgacaccgctgacccgacctgatatcaagaagccaaaaaccagcaaacccgccaagaacaggagatctcattatgagcgtcgctttgcgagacatgagtccatacgcccggtccatagtggaacgccttggactggaagcccaccccgaaggcggctggtacacgcgtgactggcaatccccgcacacggatgaggcctcaagccgaccgctatcgtcactgatttacttcctgctgcccgagggagatgccagcgcctggcataaggtcgatgcggatgaggtctggctgtggcatggcccggcatcggtcaagctggaactcggcggcagcggcgagactccggaatccgacgaatccaagcgaaccgtaatcaccctgggttccggcatcaccaccgatcaggccgacgtaaccgtatcgggacatgcggtcgtaccggctggcgtctggcagcgcacagtgcctggccagggcgatgcgctggtctcctgtgtggtcagtccgggattcgtattcgacggcttcacactcgaacagtgaacgccatttcgctctgcgccaatatgagatatccgttcgcttacgcgccagattgcgcggctctagccggccataagcaatggagataaccagcatccgagaatatcgctgttttgtagtaacccaatagccatacaattggcgcgcatgcatcaagcacgactttgaaccgtgtgcatgacgaacacttgaggagaggaagcccatgttcaataagcaacacatcgtccgtaccattgcgtccaccgccagcatcctggctctgtcgttcaccgcagcctgcggttccggccagtccaccgcatccaattccgccgattcgaacgacatcacccagcagacgtacaagccgggcaagctgaccatcgccaccggacagccggcctacgagccgtgggttatgaacgacaagccggaaagcggtgagggctacgaggcggccgtcgcctacgcagtggccgacaagctcggtttcaagaagagcgacgtggtgtggacccgcaccgcattcgacaccgccatcgctcccggcgccaaggactgggatctcaacatccagcagttcggcatcaccgacgagcgcaagaaggccgttgacttctcgtccagctactacaacgacagccagtccgtcgtggtcaagaaagacagcaagttcgccaacgccaccaaggtatccgatctgaagaatgcgaccgtgggcgtcatggtcggcacccttgcctacgactacgccaaggcgaacatcaaggacgacatccagacgttcaatgatgatgccgcactggctcaggcacttgacgccggtcaaatcgacgcactggtcaccagcaccgtggaatgcgtgtacatggtgcagtccgagcaggtcaaggacgccaaggtgctcggccgtctgcctgactccgaagacaagagcggcatgggcatcgtgctgccgaaggattccaagctgactgcagccgtgaccaaggcagtggatgacctgaacgccgacggcaccatcaagaagcttcaggacaagtggctggccgagtacaccaccgacctgaccgaactgaagaagtaagtggagtaggctcacatcataaggtcacaacaccttggccgggcgttgcggaaattttcctgtgacacccggccattccggcattcaggaagcgagcgacattcatcacatgaccgcagcaccaaccgaaaccaggcagcacaatgcccctgacggacacgaggtaagtcaggtcgagctcaaacgacgccaatatcgtgttcatcagcaaattcaatcgacgattaccagtctgatcagcaccattgtgttcattgtggtcatcgtcatcggcctgaagctctcccccggctggccacgagtcaaggagaccttcttctccggcgaatacttcgtcaaatcgtttccccatgtgcttgacggcctatggctcaacatccgcgttctgctcgtcgcagtggtcggcgtggcgattctaagcacgctgatcgcattggtgcgcaccagccgctcccctattctgttcccgctgcgtatcctggcattgatctacacgactgtgatgcgcggcgtgcctattatcgtcgtgctgtatctaatcggtttcggcattcccggcctaggcttgttcggccgtatcgatccctcggtactcggcaccattgcagtggtaatgggatacagcgcctacgtctccgaggtgctgcgtgccggttttaacgacgtacatccttctcagcgagcctcggcccgctcgttgggcctgacctccggccagacgacccgactgatcgtcattcctcaggcattgcgcaaagtcgcgcccgcactgatgaatgacttcatctccatgcaaaaggacgtcggcctgatttccgtgctgggtgcggtggatgccgtgcgcgccgcacagatcgacgtggccagcacctacaacttcacgccgtatgtggtcgccagcctgctgttcatcctgatgagcgtgccgttcatcctgctgaacgactggtacacggaacgtctgcgtaaacgcgaactcagcggaggaacggtatgagcgaaatgaccaatatcaacaccgaggcgagtgactcccccgtgagcaacaagacggtgctgcgtcttgatgacgtgcgcaaatcctttggaaacacgcaggtgctgcgtggcatttcctttgacattcaccaacatgaggtggtggctttgctggggccttccggttcgggcaaatccacattgatgaaatgcgtcaacctgcttgagcaggtcgatgacggccagatttggctgggcaataccgatatcaccgacccgcgtgccgatcaggacaagattcgcgcacgtatcggcgtggtgttccagcagttcaacctcttcccccacatgtcggtgctcaagaacgtgacccttgccgcaatcaaggttcaccactggagcaaggatcgcgccgaaacccgcgctatggaactgcttgaacgcatcggcatgcgcgataaagccagcgcctaccctgatcagctctctggcggccagcagcagcgcgtggcgattgcgcgcgcactgatgaccgacccggaactgctgctgcttgacgagatcacatccgctcttgatccgatgctggtcggcgaagtgctcaacatggttgccgagttaaaggcccaaggcaccacaatcctcatggccacgcacgaaatgagcttcgcccacgacgcggccgaccgcatcgtactgctccgtcacggcgtcatcgccgagaacggcacacccgccgaggtgatggacgagtcgcaggatcccgagaccatcgagttcttcagccatttcaggcactgagacgaagccgaaaaacaaacaccggattcatacgacgaaaggccaaaatcctaagccactattcatactcaactgatctggtgcttaaaccgcgtccgcgaaccccaacaagttccaccaccccacaacacgcgatgtagccgccgattggtagggttggcagatagttaatcccctgtttgaaaaaggagctttggcttgtcggctgaactcgaagacattcatgaggaatgtggcatcttcggcgtatggggccaccccgacgcctcacgactcacctattttggcctgcacgcgctgcagcatcgcggtcaggaaggtgccggcatcgtctccaacgataacggtcatctcatcggtcatcgcggactcggcctgctcacccaggtgttcggcgatgagcgcgaaatcgaacgactgaagggcaattgcgccatcggccacgtgcgttacgcaacggccggctcgggcaccacggacaacatccagccgttcatcttccgcttccatgacggcgacgtggctctgtgccataacggcaacctgacgaactgcccgtcactgcgccgcaagcttgaagacgaaggcgccatcttccattcgaactccgacaccgaagtgctgatgcacttgattcgccgttcgatgcagcgcacctttatggacaagctcaaggaagcgctcaacacggtgcatggcggtttcgcctacctgctgatgaccgaagacgccatgatcggcgcactcgacccgaacggcttccgcccgctctccctcggcaagatgaagaacggcgcctacgtgctcgcctccgaaacctgcgcactggatgtcgtcggcgccgagctggtgcgcaacattcgcccgggcgaaatcgtggtggtcaacga

SEQ ID NO: 371 - DNA, 76791 bp, Unknown
  R42_10m  MAG No. k141_33911
agatttgcggcggccatggcccaggagagacgcccggtcccattccgaacccggaagctaaggcctggcacggcgatggtactgcacccgacagggtgtgggagagtagcacgccgccgcaccacacgtacaggaagcccctcggagcacacgccccaaggggctttccctatatccgaaaccgacaagacataggctctcgcacctagggtgtggccgaatcgaaagcatatagaagagggaaccctccaatgacggagagttccctctttgcgtatctggaccgataaaggtctagaaattgaaattgtcaggatcagcaccgttgcgcttgccggtgttgatggcggagatggcggtcatatcatcgactgataggttgaagtcgaagacctcgaagttctgcttgatacgctcggcatgagtggatttcggcagcacgacgataccgcgctggatgtgccagcgaatcaccacttgggcaggtgacttgccgtacttggcactgatctcggccaatactgggttgctcagcaggttgccgccggtaccgccgagcggactccaagcctcggttgcgatgcccttggcacgcagctggccaatgagctcttgattggtgaattgtggggaagactcaatctggtctacggcaggtaccatatcgctgtgggtcagcagctcatcaatatgatgcttttggaagttactgacgccaatggccttggcacggccagaggcataaatctcctgcaagtcatcccaggcctgctgccagccgtctgccggccagtgaatcagatacagatccacataatccacgcccaagcggtcgaggctttcttggaatgcatccttgccgtggcgtgcgcgaatatcgtcattccacagcttggtggtcaagaagaaatcgctgcgcggcacaccagcacggcgaataccttcacctactgaggcttcgttgcggtaaatcattgcggtatcgatatggcggtagccattctccagagccgtctgcaccgcgttcactgtagtatcaccatccggtgtctggaatacgcccaagcccacctgcgggatgacagtgccgttgttcagcataattgtcgattgaattgccataatgcctcactattcgtagtgttcattcaatttcctattttagaaacaagacgatgcaatgagccgcgtttcgcgggcaaagaattgcgtaatgatggcgtgattctcgttcattaggtcattattgcattcattaggtcaatgggtccagggtcttcggcatcagaacccagtcattacgccattcctgaagagccgtcttacggcataccgacctaatgaacgtgaaatcgacctaatgaatgcaacgagtaagcggctacgataataaccagtagaatcacaacccagattgaaggggagagcacgtggcagaggaatatgtggctgcattcgatgcagggaccacggcgttgaagggtgccttggttgataggcaaggccgtatcgtagccagtgcgagtagtgagcttaaccttattatcaacggcgactatcgggaacagagccccgatcaatggtggcaagctttctgcgcggcctccaggcacatgattgagcagacgcggcaatccgagtcagaattcaatgtgactcgcattcgtggcatcattttcagcggtcagatgcaggatgttattgctttgaacggcgagctcaatcccgtccgcaatgccattctgtattcggatggccgagccgaggaacaggccaagcaactcgccaagacatatcagggtggagtagaacgtttcctgaacaccgttggcaaccggctcgaaggctgcttgccgttgcccaagttgatgtggctgcgtgaacacgagccggaaacgtacgcgcgcattcgtcatgtattgatcagttccaaggactacttgatcgcccaattgaccggcgaatgcgtgggcgatgtggcggcttgttccacagccggtgccatgaatatccgtaatggccaatgggatgccgaattgtgcgaggccgcaggaatcgacatggccatgttgccacacctgcacaatccgcaagacaacattggcacagtgacggaatccgctgcacaacgcaccggtttctccgccggaactgcggtatacgcgggcattggcgatgcgggtgccaccacgctggccagcggtgtcagccgccctggtcaatacaacatcaatatcggcacctcaggttggatcgccaccgtttcgcccgaaccgttcaccgacaagccaggtgctgcgaatctggcatctggtgtggaagaagtcttcgtgaatgccgtgccattcctcaacgccggtgacgtgcataaatgggttaccggcgtattcgctgatggcgattacgcggaagcacatcagcttatcgaaacatccaaacccggctccaacggtgtgatgtgcctgccatatctggtgggggagcggttccccgtaatgaacccgaatattcgcggggcctatgtaggcctcgatccagacaccaccaaggcagacatgatgcgtgccgcgcttgagggcgtggccttctccattcgtcaaggtatggaaagttttgacgccaaacccagcgagatttccctgattggcggcggagccagagaaaatgcgtggtgccagattctggccgatgtgttggagcatcccatcgaagtgttcgccaatgccgatattctgccagcagtggcaatggcctcgttggtattcaatgtaccagacctgctgcaatcagtatgcgaatgcactgtataccagccgaatcctgacaccgcacgcacatatgccgacgcataccggcgattcctgagcctctacccgatgctgcgaacgatggattaggaactgagcatcatgaggcaatcagcgaatttggtccgcaaacatatagcggtcaccggactggtgcaaggcgtgggattccgttattttacggtgactcaggcacgtcgacttggtgtacagggctgggtgcgcaattgccgcgatggctcggttgagctggaagcacaaggcagtagcgacgcagtgcaagccttggttgagcaattagccattggtccgcgatggtccgaagtgagtcacgtcgccgtacatgacatgccgattatcgatgagaccgctcgggcatttggcgtgcgtcaataacctgcatcacgaatccacatcacgcacgataatctcacgatacgggtgaacatgggcgttcctcgccgcttaggccccgcacgttggtacgatggggcgttatgagtgagaacatcatgcgaatcattgacctgcgtggtcagaacctgtcccgtgccgaactgctcgccgcgatgccgcgtgctgcaatgggcacttccgaagccaccgatctggtgcgtccgattctggacgatgtcaaggaacgcggtgccgcggccctgcgcgacttcgaggagaagttcgatcacgtgcgcccgaaaaacctgcgcgtgccggtcgaggcgatcaaggacgccctgaccacgctcgactccgaagtgcgcgccgccatcgaggaatcggtgcgccgcgcccgcgccgtggccgccaaccaggtgccgaaggacttctacaccgacctcgccgaaggcgcccgcgtggccgaacgctggattccgattcagcgcgtcggcctgtatgtgcccggcggcaaggccgtctacccgagctccgtcatcatgaacgctgtgccggcccaggccgccggcgtcgaatcgttggccatcgccaccccgcccgcccgcgacaatgaggaaggcctgccgaacaagaccatcctcgccacctgcgccatcctcggtgttgacgaggtatacgcggtcggcggcgcccaggccatcgccatgttcgcatacggcgccaagggcagcgagccgcaggacggcgacatcctgtgcgatccggttgacaagatcaccggcccgggcaacatcttcgtggccaccgccaagtcactggtctccgcattcgtgggcatcgacgcggtcgccggccccactgaaatcggcatcatcgccgatgaaaccgccaacccgagcctgttggccgccgacctcatcggccaggccgagcatgatgagctcgccggttctgtgctgttcaccgactccaccggcatcgcggacaaggtacaggagaacctcaactatcgcgtgccgaagaccgagcacgccgagcgcgtccacacgtcgctgtccggcacccagtctgccatcgtgctgaccgacggtcttgaccagtccatcgacgcggccaacgcctacgccgccgaacaccttgagattcagaccaaggatgccgatgctgtcgtcaagcgtatcaagaacgccggtgccatcttccgcggcccgtactccccggtgccgctgggcgactacatgtccggttccaaccacgtgctgcccaccggcggcaccgcccgcttcgccgcaggcctcggcgtgcacacgttcatgaagccggtcgaagtcatcgaatacgacgaggaaggcctcaaggctctcgccgcccgcatcaacgccttcgcggtgtccgaggacctgcccgcccacggcgagtgcgtgctctcccgcttcgtcaaggatccgtatgacaaggccaccctgcgcgagcaggagaggggagccggtctgcgatgagctcgattcccgaaaacctgccgctgcgcaacgacctgatcggtgaggagccgtacggcgctccccagctggacgtgccggtgtgcctgaacgtcaacgagaacccgtatgcgccggacccggccgtatgcgacaccatcgccaagcgtgtgcgtgaaatcgcccccacactcaaccgatacccggaccgtgagcacattgaattgcgtcaggcattctccgattacctggcccgtgaatccggtacccgtctggacgtggacgagctgtggggcgcgaacggctccaacgagatcatgctccagctgttccaggctttcggcggcccgggccgcaccgcactcggtgccgacccgacgtactccatgtacccggagtacgctcgcgacaccttcaccggttggaagctcgcccaccgcaacgccgacttcacgctgaacgtcgacaaggtgcttgaggccatcgccgaggtcaagccctcgatggtgctgctcaccagtccgaacaacccgaccggcaccccgttgccgatggaggatatcgagcgtattctcgccgcctgcgaaaccgccgaagtggccggcgcgggtgagggcgtgcacccgattctcgtcatcgatgaagcgtacgtggaattccgcaagcccggcaccccgagcgccgtgagcctgatcaaggaccacccgaacctggccgtaagccgcaccatgagcaaggcctttgccttcgccggcgcgcgagtcggctacctagccgcatccaagggcatcatcgactgcgtgcgcatcgtacgtatgccgtaccacctgtccgccgtgacccaggccgccgcactggccgccttcgaacacaccgatgaacagctgagccgtgtcgagcatctgcgcgaaacccgcgaggccaccgccgcatggctcaaggaacagacctacaaggaccagccgcttgaagtggccgaatccggctcgaacttcctgctgttcggcgggcacttcgacaagcgcgaagccatcttcgacgagctcctgaagcgcggcgtactcatccgcgtggtcggaccggacggttggctgcgcgtgtgcatgggcaccgacgaggagatggagaccttccgtaacgcccttgttgaagtgcttcgtatagtggaagcagcataagggacgtttctttccgattgcggcgagacccgaagcgattcgagtcccgccgcaatccaatatgacgaatcacacaggagacatgatggcaagaaccgcgcacatcgtccgcgaaaccagcgaatcacacatcgatctcgaactgaacctcgacggcaccggcaaaaccgatatcgatacatccgtgccgttctacaaccatatgatgaccgcgctcggcaagcattcgctgatcgacctgaccatccacgcccacggcgacaccgacatcgacgtgcaccacaccgtggaagatacggccatcgtgttcggcgaagctctgaagcgggccctcggcgacaagaaaggcatccgccgcttcgccgacgccaccgtgccgctcgacgaggcgctggccaaggccgtggtcgacatttccggccgcccgtactgcgtgtgcagcggcgagcccgaaggctacgaattctgcatgatcggcggccacttcaccggctctctggtccgccacgtcatggaatccatcgccttccacgccggcatctgcctgcacatgcaggtgctcgccggccgtgatccgcatcacatcgccgaagccgaattcaaggcgctggcccgtgcgctgcgcttcgccgtggaaatcgacccgcgtgtagacggcgtgcccagcaccaagggagccctgtgatggccgacgacaagttcgatccggacgaatcgcacttctccgacgaggagcttgaggccgcgctcgccggattcgagaaagaattcgcggacgattcggcatccggcgatgccagtgataccagtgacgccgataaaacggcggacgctgcttcagcgaagtccgattccgacgcgaatgatgatacggctgataaggcttccgctgattccggccagcctatgaccgacgacgtcaccgggtcggtcgctgatgcggtgaacgaggccatggccgacgtggtcgacccctcgctcggcttcgacaacgaactcgctggactgttgggtaacaaggcgaaggtggcgttgatcgtcacccgtcttgcctccgccgaactgttggccgcgttctgccagctgtcagacatctccgccgcatgcatcggtgccaatcagggggccgtcgcggtgctgaagaatctggacggcgacggcccggaagccgcagccaaggacctgaccaccgtggtatccggcatggccgtgattcttgcagtcaatcgtgccgacaagctcgaagtggccatgtacgtgcagggagaggccggacagagtttcgcgccgcccgtgctgttcacctccacgccgcgcttcgtcgaggacctgatgctcggcatcgtaaccctgaaccaactcaagacccaagggttcgaagtggtggattccgctggactcgaccatgaccaggcgatgcagattctcgccaaccataccaagcgtgggcgtggcggacgcggctcccgcatcgaatagacgccaaccaaccagtaggggataggagagaatatgaccacagcggttgttttcgattacggtttcggcaatgtacgttccatggtgcgtgcgctcgccaatcttggcgtcgacaccaccctcacctccgactaccggcagtcgttggaggccgacggtctggtagtgccgggcgtgggcgcgttcgccgcatgcatggaaggactgaagaaggtcgacggcgaccgtgtgatctatgatcgcatccgcgccggccgcccggtgcttggcgtgtgcgtgggcgagcagatcatgttcgaacacggtctggagcacggggtccatgccgcgggcatcgggctgatcggcggttcggtgaacctgctggacgccgacgtggtgcctcacatgggatgggacacgatcgaggccgcccccgattcggtgctgctcaacggcgtggagaatgaacggttttacttcgtgcactcctacgccgcgatggaagtgaagccggcggatacgtcccgcttcgacattgatctgagcggtgcgcccgaacgcgtgagctggtgctcgtacggccggtcgcgtttcgtggccgcctacgaacacggcccgctgtccgccacgcaattccacccggaaaagtccggggacgctggctcccagctcctcaagaactggattgccacgctgtaaaaagcatgaagctcccctctgacgagagagctcaaattatgtataagtaactgaagaaaggctcttcttatgtcgttgactctgctgcccgccgtcgatgtacgcgatggcaaggccgtgcgcctgcgccaaggcgaatccggttccgaaaccgattacggttcgccgtttgaggccgcccgtacctgggttgaggccggtgccgaatggattcacctggtcgaccttgatgccgctttcggtacgggcaacaatcgcgatcagctgcgtgagatcgttcatgagcttggcgaccgggtgaacatcgaactgtccggcggcgtgcgcgatgacgcttcgttggacgcggcccttgaggccggtgccgcccgagtgaacatcggcaccgccgctttggagaacccggattggaccgcttcggtcatcaagaagtacggcgaccgtgtggctgttggtctggatgtgcgcggtcacacactggcggcgcgcggctggacgcgcgaaggcggcgacctgtttgagaccatgaagttccttgactccgtgggctgctcgcgttacgtggtcaccgacgtggccaaggacggcatgatgtccggcccgaacatccaactgctgcgtgaagtcgccgaacgcaccgacgccaaggtcacggcctccggtggtatctccaagctggacgatttgcgcgccatcaaggaactggccgagatcggcgtcgattccgccatcctcggcaagtcgttatacgcacgtgcgttcacgctccaggaggcgctcgcagtcgcgaagtaggcaaaggactcgccttagcgagactgttaagctacctttgctcagctatcgcttcactcaggcctcgcctacggacagcccattgggctgtccgcttaacggctcagcaaggaaggtcgccggatttgaggagctttttgaagacggtgtagtcttcatcattctgttcggcatagctgacggcgaacgaggcaatggcctgatcgaattcgtcggtgccacccatgtaattggcgatcgcgatcgaatcgccggttcgctcatagtcactaccatagtgccgtgccggcatgggcccgaaccatgcctgacatgcggaccggggcatgttgatgaaatctcgcgactcgcaggtgacaaacagtgagatgttaacgcccctcgtaacacggttatggaatgataggcgactatggataaacagcaggagtttgcgctgcgcacggtcgaagaacgcgacgtgcgctttattcgtctgtggttcacggatgtgttgggaacactgaagtccgtggcgattgctccggccgaactggaagccgcgtttgaggagggtctcggcttcgacggttccgccatcgagggcatgacccgcgtgtccgaagacgacatgatcgttcaacccgatcccgcgacgttccagatcctgccgtggcgcggtggcccgcaaggtaccgcccgcatgttctgcgacattctgaccccagacggcgagccttcgctcggcgatccacgtcacgtgttgaagcgtacgctcgccaaggccaaggacaagggcttcacgttctacgtgcatccggaaatcgagttctacctgttcgaaagccaggacgactggtccaaggccccgaccccgatcgacgagggcggctacttcgaccatgtgccgcgcagcccaggcatggacttccgccgcgccaccgtgaacatgctcgagcaaatgggcatctcggtggaatactcgcaccatgaggcggggccaggccagaacgagatcgatctgcgatacgcggacgcgctcaccatggccgacaacatcatgacattccgtacggtggtcaaggagatttccttggagcgtggcattcacgccagcttcatgcccaagcccctggccgacgcgcctggttccggcatgcacacgcacctgagcctgttcgaaggcgattccaacgccttctacgaggccggtcaggagttcaacatgtccctgaccgcccgccagttcgccgccggcatcctgtaccatgcggccgaaatctgcgcggtcaccgaccagtacgtcaactcgtacaagcgcctgtggggcggcaatgaggcaccaagctacatctgctggggccacaacaaccgttccgcgctgctgcgcatcccgcagtacaagccgggcaagggcaactccgcgcgcatggagttccgtgcgctcgacccggtggccaacccataccttgcctactcggtgctgctggccgccggtctcgatggcatcgataagcagatgcagctgggcgaacccaccagtgatgacgtgtgggagctcaccgacggcgaacgtcaggctatgggcattcagccgctgccgcgctcgctggacgaggcgctgaagatcatggagaaatccgacttcgtggccgacgtgctcggcgaacacgccttcggctacttcctggacaacaagcaccaggaatgggaggagtacaaccagcaggtcacgccttacgagctgaagaagtatctgccgaagctgtaatcgcaagcgttgcacatgtgccgaaccccgtcgatgattggtcatcggcggggttttctatagcgtgtcgtggtggtgggtagcgggcagaggtgggaatagtgttgtcgctgagttgatacgaaaaacgattgacgtaaccgacgaatcagcttgtagtacgagcgagagcactcaagagagcacccatgacgaacacacctgcgaacaccgcgcgcaccgaccgcttcttcaatctgccggtcaccatcctgatcttcgccagcttcatgctgggcatgagcgaattcgtggtagtgggcatcctgccggacatcgcatccggacttaaggtctccgaagtgaccgtgggtaatctggtggccatcttcgcattcgtgtacgcgccctgcacgccgctcggatccgcattatccgcccgattcccgcgctttctcacctatctgacgttgatgggcgtgttcctcgtcggcaatatcctgtgcgccttcgcgccgaactatccggtgctgctcatcgcccgactgctcatcgcctcggtgtccggcacgctggtggccatctccatgaccttcgcgcccgacgtgaccaccgacaaataccgcaccaagttcattgcctgggtattctcgggtttctccatcgcctctgtggtcggcgtaccggccggcacttgggtggccaatactttcggctggcgtgtcacctttgccttggtttcggtgctcaccgccgtgctgatggcatcgatggcggtgtctctgccacgcaactcgcatccggcgaagatcggtttcctgaggcaattccgtctgttcttcgaccgccgcatccagctcggcgtggcggatgtggtctttggcgcagccgcctcctacgtcttctacacgtatctctcgccgatcatgcgcgacgaaatcggtgtgcccgaacgctatatcagcgtcggcttggtggtctacggctgtgcctgcctgtggagcaacctgtacggaggcaagctggccgatcggggcaggggggtcgagccgctgacccacattcgaccgatctactgcgtgcaggccgtctgcctgtgcctgctggctttcgcctcgctggtgccggccggcggcgcactgctgctggtggcgcttggcatgctcatgtacctgcagaattccgcttcccaggtgctgtatatggatgtggcctaccaatcccatcccggttcggtgaatctggccgcctccctgaattccatgtcgttcaacatcggcatcgccatcggctccgcggtcggcggcctggtcaacgacctccttggcctgacctggctcggcccggtcggcgcgattttcgcgctgctggcagccggcaccacgacactgctgcgtccgtacgtcagcccggtcggggaatgacgggtggcgtgacgcgcgggaacgaagggtttttcccgcgtgtccccgcggcatgccttatccgccgattgccgtccattgataacctgctatccaaataaccgataaggccacagcatgtcatcctgctgcgaaaccttaatgttaggacaccggctgcagggggacccggctcacgggcgcccacctgcgcggattgatgattatcggcatgttcagcgtgaaaatggggatgacaatatgacggatgcgactgcgaaagccgcgccgaaggcggaaagacggcggcgcgttctccgttccggcgctcgctcatcgatagtggtcggcggcgccatcgtgctgttcttcgtgctgctggcgccgctggccgggccgttgtcggccatcaccggcaacgacccgtacgccgagcatcccgaggccttgggtgccgggtcggtgccggccggattcggcggcggcatcagtgcccggcactggttcggcgtcaccccgctgcgcggcgtcgacctgttctccatcgtggcgtacggctcacggatctcgctgggcatcggcgtcgtctcgtcggtcatctcgctggtcatcggcgtggcgctcgggctgctggccggctatttccccgggttggtcgatgcgctgatctcgcgcacgatggacgtcttcttcggcttcccgttcctgatcttcgcgatcgcgctgtcggcggtggtgccgcagggcttcccgaggccggtgctgctgacgctagtgctcggattcttcggatggcccggcatcgcgcgtcttgtccgggggcagacgctgacgctgagcaagcgcaatttcgccgtcgcgtccaaggtgatgggcgcctcgcctgcccatgtgctgtggcatcagatcctgccgaacctcatgccgctgctcatcgtcaacatcacgctgtcgattcccgggcgcatcggcgccgaggcgggcctgtcgttcctcggcgtcggcatgaacccaccgacgccctcatggggccggtccatctccgacgccgtgcagtgggcactggtcgacccgatgtatctgatcttcccgggcgccgccctgttcctgctgaccttcggcttcaacctgcttggcgatggcctgagcgacgccatcgacccgcgcaagggggtgcgtgcatgagaatcctgcaatacatcggcgagcgcgtggcgagctcgatcgtcgtcatcctgctcatcacgctggcgctgttcctgatcttcttcctgctgccgaccaatccggcgcagctgtcgtgcggcaagccgtgcacgcccgagcagctgcagcgggtctccgccttcatgggcaccgataagccgtggtacgagcagatgggcaattacgtggcgggcatcttcgtcgggcgcaccttcggcagcggcggcggcgccgtggtctgctcggcaccatgcctcgggtattcgttccgtctcaacgaatcggtgagccagctgatcctcgaccgcttcccgatcaccgcgtcgatcgcggtcggcgcggccgtgctgtggctggtcatcggcgtggcgaccggcgtgtgggcggccctcaagcgcgatacgctgatcgaccgcacgctgctcgggctgtcgatcgtgggcgtttcggcaccgtcatacctgatcggcctgctgacggtgatcgccttttcgctggtgctgcagatattccccagcggcgggtacgtgaacttccacgacgaccctgtcggctggttcacgcatctgctgctgccgtggctggtgctggccgtgctcagcgccgccggctacaccagggtcacccgcacgcagatgatcggcgagctgagccaggactacatccgcaccgcccgctccaagggcgtgcccgaatcggtgatcatcttcaagcacgcgctgcgcaacgcgctgctgcccgtgatgaccatgttcggcctcgatctgggcgggctgctcggcggcgcggtgctcaccgagaaggtgttctcgatgcaggggctcggctcgctgctgctcgattccgtgtcgaacctcgacctgcaggtgctggtcggcgcgacgatgttcgccgccgtgctggtcatcgtcgccaacctgatcgtggacatctgctacagcctgctcgaccccagggtcgcgctcggcacgaagtagtgcggctgcggccgcaacacgcgatacttgccggtctgctccacggaccggcaccgatagagaggaaaaccatcatgaagaacaacgcatggcgcgtattcgcggcgggggcttgtgccgcggtactggcgctgtccggctgcggcgcgtccaacgacaacgccgccaccggctcggcgagcggcaccaccgtcaagggcggcacgctgaacgtgctgctgtccagcacggagatggatctggacccggccaagagccagggtctgccgaccaccacgaacggcaacatcttccgccgcctgaccgcgtggaagatcaccgacaagggcgagacgaaggtcgtgcccgatctggccaccgacaccggcaagtcgagcgacgacggcaagacgtggacgtacacgctcaagaacgggctcaagttctccgacggcacgcccatcacctccaaggacgtcaagtacgggctggagcgttccttcgccgactcgctgaccggcggcctgagctaccacaagacgctgctcgagggcgcgcaggactaccacggcccgttcgacggccaggagctcagctccatcgagacgccgaacgacaagaccatcatcttccacctcaacgcgccgttcggcgactggccgtgggtcgtctcgctcgccgcgttcacccccgtgcccgacggcaagggcccggcgtccggctacggcaagctgccggtggcctccggcccgtacaaggtcgagtcgaacgaggctggcaagcaggccgtcttcgtgcgcaacacctactgggacaagaagaccgatccggtgcgcaccgcgggccccgacaagatcgtgttcaagatgggacaggacacctcggtggccgcccagtcgatcatgcagggcaccggtgaaggcaagaactcgttcctgtccggattcgtgccggccgcgcagctcgcgcaggcgcaggccaacccgaactacaagaagctgctgaccaccagcggcgacggcgcgctggaatacctcgccatcaacacccaacacgtgaagaacgcgaagattcgccaagcgctgcagtacgcggtcgacaagaaggcctaccagacggcttccggcggcgagatcgccggcaacttcgccaccacgctcatcacgcccggcatcgagggccgcgaggactacgacctgtacaaggccgatccgaccggcgacgtggacaaggccaagcagctgatcaaggagtcgggcgagcaggccccgaccctcaagctcatcgccacctccgctcaggccgaaaccgcctcctcgatccagacgagcctcaagcgggccggcgtcaaggtggacatccagacactcaacgacgatgtgtattccgatacgctgaccaacgacaagggcgactacgatctggccatcagctcgtggcagcccgacttcccgtcgccctacgccaacatctccccgctgttcgactcctcgcagatcggccacggcaactacaacctggcccgttacgcgaacccgaaggtcgacgagctgatcaagaaggccaccgagaccatcgatcagaccgaggccggcaagatctgggccgaggccgacaagacgatcatggccgacgcgccggtcgtgccgctgatctattcgaagaacacgttcatccacggatcgaacgtgaccaacttcgtcatcggcaacttcccggcgtacccggactacacgcaggtctcgctcgccagcgcgaactgagccggcatccgcatccggcgcgcgccggcggcatggtccgctggcgcgcgcgccggacgcattccaacgcttgtgcatccaaggagcttccaatgagtgaaccacgcgcgatcgtgaccgtggacggtctggccgtaagcttcgacgagcgggaggtgacccacggcgtcagcctcaggctgttcccggggcgcatcaccgctctggtcggcgaatccggctccggcaagtcggtgacggcgatggcgctgccccgtctcgatccgtcggtggccagcgtgaagggccacgcgtacctcgacgacgcccttgtggatgacgggccggactccggtccgggcggcgacggcaaggacgccgccggccgcggcatcgatctgctggccgccgacgcgccgctgcaacgcatccgcggcgaatacatcggcacggtgttccaggaaccgtccaccgcgttcaatccggtgttcacgctcggcgtacaggtcgcggaatcgctcaaataccaccagaagcagctcagcgccgccgagcgcaaggccaaggtgctcgaacagctgcgcgaggtcgggctcgacgacgccgaacgcgtgtggtcgtcgtacccgcatgagctgtcgggcggccagctgcagcgcgtgatgatcgccatggcgatcatcaaccgacccaaggtactcatcgccgacgagccgaccaccgcgctcgacgtgaccacgcagaaggcgattctcgccctgatctcctcgctggcggtcgacctcgatctggccgtgctgctcatcacccacgacatgggcgtggtgtggcaggccgcgcaggacgtgtacgtgatgcacaacggcgtgatcgtcgagcaggggagcgtcgcgcaggtcttccgccacccgtccgacgactacacgcggatgctgctcgacgccgtgccgcgcctgcgcatcgacgagcatgcggcagacggcgaacatgcggccggcggcgaacgcatcacggaaagtgacgcgcccggcggcggcaggcgcatcacgcaggtgaacgacgtggccgtgtcgtacaaggccggcagcttcgccgtcaaggacatctcgttcgatctggtggccggcaggacccgcgcgctggtgggcgaatcgggagccggcaagaccacgatcgccaaggtgatctccggccagctcgcgccaacctcgggcacggtgctcatcgagggggaggatctcgccaaggcgcatggcaggcgcaagcgcgagatcctgaagcatatgggctatgtgttccaggacagcggatcggcgctcaacccgcgcaagtccgtggcatggagcatcggcgagccgatgctcgtgcagggcgggctcagcgagacggaccggcgcaagcgcgtccttgaattgcttgatcaggtggagctgcccgccgatgtggccggccggttcccgcaccagctgtcgggcggccagcgccagcgcgtcggcatcgcgcgcgccttggcgctcaacccgtcgctgctcatcgccgacgagccgacgtcgtcgctggacgtgaccgtgcagcgcaaggtgctcgacctgctgcgccggctgcagcgcgagcacggtttcgcatgcctgttcatcacccatgacctgggcatcgtgcaggagatgtccgacgtgatcacagtgctgcgccacgggcgcgtcgtggagagcggggagaccggccgcgtgctcaaccatcccaaggccgagtacacgcgtaccctgctcgacgcctccccgaagatcgacctgtgagccgtgccgctcgtcatccggccggttctccggccgtgcggcggggcggcgacggcgcggatgacacctagccttaccgtggtttcggttttttgccgtcccgcccctatcggcgcgcggcaccgaaccagttggtgtatatgagggcgaagttgcggttgccgtagctggagcatgagtcgccctcgccgaacccggccgccagcgaggcgtcgttcggctggtagggcgtgtagatgtagagcagcgcggtcgccttgttctcgatgtacacgttggtgccgccgcacccggcatccgggtggtactggatgtagttcagcgcgttggcgtgatagccgtaggcgctttcatgcgccacatagtattggtagcggtgcgccgccccgtacacctgtctgaagaagccggcataggccggatcgcagttcgcgttgtccgggcagctcagccccatggcggccttgtactggaagtccgtcggatcgacggccgtgaccaggtgctgctccttctgcatcacggtgagcagcaccttctggctgatgccgcacgcgcgcgccgacttgtcgacgatcgcggccgcggtctcctttctcgcgccctcgtacgccgcgcaatactcgttcgccgcctggtcctcggtgtcgaaggtcatggttttcaggcaccgggaaccgctgcacgccgcgccctgcttgtcgaggaacgactggacctcggcctcgctcatcgcattggcgttgaagaactggccgtccgagatgatgtcgccgggattgaagtcgtattgctgcgtcagctgcagctggcgggcctcggcctcctgcacgtcgcgacgccactggacgacccgcacagtgcccacgaccagcgcgaccacgcatgcggccgccaccacggtgaccagcacagccgcgatgcgctgcgccaacccggcccgcttccaccagcgcgccgggctgagcggatacctgcgattgcgcgggcgtttgcccgggcgacgtttgcgattgcctcctgacacgccccgccccgcgacaatcacgttcgccctgccgcgcggattggccggcttgcgccgttgcgtcgtcgccatcgctacgccagtgccttcttgatgcgctgcaggctcaccggcttggcggtgccgagttcctgcgcccacagggacacgtagaattcctcgagcatccagcgggcggcggtcgcctgcttcatcagcgtctcgtggcgggggccggccggctccgccttggccttggccatcgccttgtcgaccagcgtgcgggcctcgtcggcctgccacgcccatcgcacgtcgcggttcttgtcggtcttcgccttggccaggcgcatgagatcggcctgcaggtatcgggagatgttcgccagcgcgtccgggggagcggcgccgacgaatccggggaacaccagcgtggcgatgtgctcgcgcaccgactgcagcaccgacagcatcggcaagtcggccttgccgccagtggccttgtcgacttcggcataagccttgagcacggcgatcacgtcatgcgccacctgatagacggtgtcctcgtacacttcgcgcacatcgagcaccgcattggccaacgcctcatcgtccgagagcctgtcgacattcggcatcagccgtttgaccgtagccagctgcaggtcttcgaccagatccttggtgaacttgtacggagcggaagccagcatcaacgcctcggtacccagccagcgcgacgaaatgcgttcggccggcaaccgcagcgcatccaatgcgccacgccagagcatcgtggcccgggactcggtggtggcacccgccttatgcaacaggttcgcctgactgaccagcttgccctgttctccagcctgatcggcctgcttcttgaccatttgacgggccgacgcctccgcctgcgcggcgaacttgcgttgcagcgccttcagatccttggacacacccagcaccttgacggggccgcgcgcatgccggcgtccacgagggtgcttgccggccggcagttgctgctccaccgagaacgtgaccctgagatacggggaaagacgctcgaccagttccggccccaacacttcgggatgaatctgcgcacccttggtggcgatggccgccttggtgaacacatgtgccaaatcaggccagccaacggtcgtgccatcctcatccaccggcggcagattcggcttctgctgcgagcccgagcccggcagatccgggtaatgctcgtcgatccagtcacgaatcgcacgcgcggcatccggagccggcacgaactggacgcgcagctgcttgggcagcgccttgatcatcgacagaatcagctcatccaacaggcccggcacattccatgtgaactggtcgggcgtgatacgcgagagcgccttcaacggcacatgcacggtgacgccgtcggccgggtcggccggatcgtatacgtagctcaaacgcaggtcgatgggttggccgtccgatccggtcgtatgccaatggtcggggtaatcgtccagactcaccgaatcgctggatgccagacgctccaccttggccgggtcgaaatcaagcagattcggctgacggtcatgctcggacttccaccatttcgccagatcggccacgctggtcacatcgttgggaatgaccgcgttgtagaagtcgaacagatcctcgtcggacacggtgtccgccagctggcgggtgcggctcgcgtcatcggcggcatcctcgagaatgtcacggtttttgcccacaaagtcgtcgtaactgaagcgctgctgaatatcgccctcgaccagaccctggcgaatcaggaagtcgcgcgcctcaagcggattgatgcgtccccactgcacggcacggtcctgtacgatcggcagaccatacagcagcacgcgcgcggtggccacagccgagccacgcgaacccgaccagtgcggctccgcatacgtggtgcgggtcaattggccggccaacggttcggcccacgccgggtcgatggccgccgaatagcgggcccacaggcgagaggtctccaccagttcggtgctcatcacccatgacggggtcttcttggccacggcggaggcggggaacagggcgaaacgggtgccgcgcgcgccctgataatcgttcttcgactgcttctgggcgcgtttcatcgcacgggcgcgcgccgcaccggtcagccccgcgaaatcggaggccttgggctcacgcaccacctgcatgcccatcatcgacagcaatccggcgagcatcgacttgtggatgccatccgcatcccacgagcagcacagcgaatgcgcggcctgctgattcaacggcagctggcgaatctccaagcctgggcgggaggcgggcaacgggtcgccgaccttgaacttcagctccttgcacatctggcgtagctgggagacgagatctttccactggcgtatcctcagccagctgagatactcggttttgcagatacggcgcagcgcgttgttgctcgggtcgccgtccgcttggaacacgcgatcccagatgttcagggccgtcaggaaatcggaagtctcatccgcatatcggttgtggatacggtcggcatcctcacgcttgtcgtccgggcgttcacgtgggtcctgcaagctcaggaacgccacgaccacgagcacctgggccagaagattcggcgaaccggttttcgcggcctcgataaccatacgtcccagacgcacgtcgatggggatgcgcgccagctgacggccggtatgggtgagcgtcacctcgccgcgctttcggccgatggccttgagctcggtgagctcattgaaaccgtccgacacggccttcatatccggcggatcgatgaacccgaagttcgtgacgtcctcggccgtgcgggccacgcccaccgacagcatgtgaagcaccacggcacccagcgaggtacgcaggatttccggctcggtgaagcgcggtcgggtctcgtaatcctcacgcgaatacaggcggatcgcgatgccgtcggccacgcggccgcatcggccggacctctggtcggcactggcttggctgatcggctcgatcggcagacgctggacctttgcggtcttcgaataccgggagatacgggcggaaccggggtccaccacgtagcggataccgggcacggtcagcgaggtctcagccacattggtggcgatgacgatgcgctgatgcaaatgcgattcgaacaccttgtgctggtcggcggcggacaatcgcgcgaacagcggcatgatctcgatggcgtccggtcggcgcatgtcgtcggcgcgcggaccgtaatgatgccgcagtgcggcctcgaactcgtggatgtcgcgctcgccggaagcgaagaccagaatatcgcggggaccgcgctcatgggaggagtggatcaccagttcggcgcaggctcgagccacggccgtgggcatatcggtgatgccgtcatcggcataggagtcgccggaccggccgcggggccggtcggaatcggattccgcgatggcgctggccagctcgtcgtaatcggcgtcgccggggcgggcgcccaccgcgaatcccggcacttcgcgcatcaacgcgggcgcggtgccaagcggctcgtagaccacctgcacggggaaggtgcggccggaaacctcgattaccggcaccttctcatgcaaggcgtgctcgaaatgctcctggaacttgaccgaatcgatggtcgcggaggtaatgatgagcttcagatcgcggcgctgaggcagcagtgccgtcagatagccgagcagaaagtcgatgttaagactgcgctcatgcgcctcgtcgatgatgatcgtatcgtattgggtgagtttcggatcgcgctggatctgggcgagcagaataccgtcggtcacgaccctcaatcgtgtgctgggcgagctttcgtcggtgaaacgcacctgatagccgacctcgtcaccgagcttcacgcccatctccgaggcgatacgttcggccaccgtgcgtgcggcgatacggcgaggctgggtgtgcacgatctgcttgccgtgcgtgccacggccaagctcaagcaggattttcggcagctgtgtggttttgcccgaaccggtctggccggacacaataacgacttgggaacgtttgaccgcgctggctatctcatcacgcgcggcagatacgggaagttctgcgggatactcatatttcatgacgaacttcaatgatacggaagcccttggagctcgcgtatttgctcgcagtgaacccctcgccgagcgcatcgtccagccaggggatcagcgaatcggaaccgagattcttctgcactacgagataggcggcaccgcccaccttgagcttcggcagccaagccataagcaatgtatgcagcgcttccttgccgactcggatcggtgggttcgaccaaatcacatcaaacgtgaggtcgctcggcaccgtctcgcagaacgccggctggttctcggcaggcaggggagtgctggactcgtccacctgagccgtatgaatgttcgtgtggccgttcgcctgtgcgttggcatgggtcaggtccagcgcgcgctcgttgacatccaccgcccacacgttcgcttcgggcgactcaaacgccaatgtcagggcgatagggccccagccgcagcccaaatccaggaaatcgccggtaagcggcggctcgggcgcatgcttcagcaataccgacgtaccgaggtccacgcgcgagccggagaacacgccgttcgacacctgagcggtcgcctcatggccgcgcaacgttacgttcaatgtgcggcgcacatccttcgatgcgggttccgcagagaaatactgttctgccatggtcgctccatttctgcgggattcgccgctctcgtatgccgacctgtatcagccggcctatgccggtacgtgccgatctatgccagcatgtcacctcatgtgatgataataaaggaccatagaagaatcgtgaaccattccaaccaaacgaggcgcacttgaccgacaacacccagtacaccgacatcaaccgcggcaacaacgacgttacccctgaaggtgtgctggccgagcagtccgaagtgctgctcgacgacagccagcgcgcgaccggctggcatgaggacgccaaccaggaatgggaggagcgcgaggcccgcaacgagctcaagcatgtcgccggtctcggcgagctgcaggacgtcaccgaagtcgaataccgcaaggtgcgtctggaacgtgtggtgctcgtcggcgtctggtcgtccgccgtcaccacgcaagccaaggccgaggaatcattgagagagttggcggcgctcgccgaaaccgccggtgcggtggtatgcgatggtttgctgcagcatcgctccaagccggatgcagccacgtacgttggttccggcaaagccaaggagattgccgacatcgtggcgcgtgaggaagccgatacgattatcgtggacgacgacctgccgccgtcacagcgccgtgcattggaggacgccgccaaagtcaaggtggtggatcgcaccgcggtgattctggacatcttcgcccagcacgccacctcgcgtgaaggtaaggcgcaggtggagttggcgcagctcgaatacatgctgccccgactgcgtggttggggtggttcgctgtcccgtcaggccggcggtcgcgcggccggcgcggatgcgggcatcggatcgcgaggcccgggcgagaccaaaatcgaaatggaccgtcgtgtaattcgcacgcgtatcgccagactgcgccgtcagattcgtgagatggccccggcacgtgaggtcaagcgcggttcacgccgtcgcttcggcctgcccacagtggccgtggtcggctacacgaacgccggcaaatcctcgttgaccaaccgtctgaccggttcggccgaactggtggaaaacgcgctgttcgccacattggacacggccgtgcgccgcgccaaaacccgcgacggacgcgcttacgcttacgtggacacggtcggcttcgtgcgccgcctgcccacccagctggtcgaggcgttcaaatccaccctggaagaggtggccgaggccgacgtgatcctgcatgtggtcgatggctcccaccctgacccgttctctcaggtcgacgcggtcaatgacgtgttggcggacatcgaaggcacggcctcgattccgcgtattctcgtattcaacaaggccgatcaggcggacgaggcgactcgtgaacgactcgccgcgctgcagccagatgcgttcatcgtctccgcctataccggtgagggattggacgagctgcgtaccgcggtcgaaagtctgctgccggtcccgcatgtgcatgtcaacgctctgctgccgtataccgctggctccctgatctctcgtgtacgcgaatacggcaaggtagacaaggtggagtaccgcgatgatggcatacagcttgaagcggacgttgacgcccatcttgccgctcaggtggtcgaacagtccattgactaacgtgataaacatcacagtatattcgtgagcgctaacaaccgttgaaaacattaccatacggttatcaaacagggtggtgtgctggtagcaaaacgtcttagcgggtttatagagtgaagacgttagttacaaggcctgccattcatcagcagaccgcctttgaagagaggttcatccatcatggcggaaactaccgttaagcccacgaagcttgctgttattggtgccggtgccgttggctccaccctcgccttcgccgctgcccagcgtggcatcgctcgcgagatcgtgcttgaagacatcgccaaggagcgcgtggaagccgaagtgctcgacatgcagcatggctccagcttctacccgaccgtgtccatcgacggttccgacgatcctgagatctgccgcgacgccgacatggtcgtcatcaccgctggtccgcgtcagaagccgggtcagtctcgtcttgagctcgttggcgctaccgtcaacatcctcaaggccatcatgccgaacctggtcaaggtggctccgaacgccatctacatgctcatcaccaacccggtcgacatcgctacccacgtggctcagaagctcaccggtctgcccgagaaccagatcttcggttccggcaccaacctggactccgctcgtctgcgcttcctgattgcccagcagaccggcgtcaacgtcaagaacgtgcacgcttacatcgccggtgagcacggcgactccgaagtcccgctgtgggagtccgccaccatcggtggcgtccccatgtgcgactggaccccgctgcccggccacgatccgctcgacgccgacaagcgcgaggagatccaccaggaagtcaagaacgccgcttacaagatcatcaacggtaagggtgccaccaactacgccatcggcatgtccggcgtcgacatcatcgaagccgtcctgcacgacaccaaccgcatcctgcccgtgagctccatgctcaaggacttccacggcatctccgacatctgcatgtccgtgccgaccctcctcaaccgtcagggcgtcaacaacaccatcaacaccccggtctccgacaaggagctcgccgctctgaagcgctctgccgagacgctgaaggaaaccgccgcccagttcggcttctgataaaaaatcgctgtacggagcgcctttcgcaccgcacaagactcgacctacctttgtaggccttcaacttgtgcggcacgaaaatcgcacacatacagcgattttttataccctgccgaatgctcccattgggagcattttttattcgtggagttcgttggaggagggggagctatagccctcgggctcgagctggaaggtggtgtgggggaccgagaccgggaagtgctcgcgcaggcaatcctgcagttgggtgaggattgtggcggcatcttccatggtgaggtctttgtcgactaccacgtgggccataagaatcggcatgtcggtggacaccgtgctggcatggaggtcatgcacggcaagcacatgcggcacgtcttccagatgttcgcgtaccttatcgaggtcaagtccatccggtgtttcctccagcagcaccttgaccgcgttgtgcagcaacttgatggcgcgcggaatcatcatcagtgcgatgacggcaccggccacggcgtcgaagccattccatccggtggagatcattaccagggcagaggccaccacggccaccgagccaagtgcgtcattcatcacctcgaggaacgcggccttcatattcatgttgtcttcgcgctgcgaggcaaggatgaaaatcgagatgatatttgcggcaagacccagaatgcccacgaacagcagcaagccgatatcgtcgatttccgctttggaaccgccgaacagacgcatgccggcctccatcaacgcatagatgccaacgacgagcagcaccacggcacctgcggcagcggtgagcacctcaagcctggcccagccccaagtacgagtgttgctgggcttgcggcgcatcagtatggcggtgattgtggatgccgccagcacggacatgtcggtgagcatatgaccggcatccaccagcagggccaatgagccggttaagacagccgacaccacttcgatgaggaagaccgaaccggttacggtcaacgtggcaatcagcctacgctggtgcgcggcagggtttacggatgtggatggtgcgggtgcatgggtatgagccatatgtactccttcgctctatcgagttgaaaccgcttctcaataccatttgcgatatggtctgaatacgacgaaaccccggcgcgaggccggggtttcgtaagctgtgcgtgactatagcacgaccggcgcgattcggtgcacgctgatcagctggtggcgaacaggctacaatttgcgcagcacggtgaccaccttgcccataatcgtggcatgtgtgccgtcgatgggcgagtatgcggggttgtgcggcatcagccagacatggccgttttccttgcggaaggtcttcaccgtggcctcgtcgtccagcagagcggcgacgatatctccgttgacggcggaattctgttcgcgcaccaccacatagtcgccatcgcagatagcggcatccaccatggaatcgccgtggacttccagcatgaacagggtgccggagccggtcagccgttccggcagacgcatgacgtcgtccacatgctgttcggcggtaattggcacgccggcggcaatacggccaacgagcggcacatcgtgtgattcggcaatggcttcggcggggaattggtatatctccgccacattactggtgctggttgcctcttcgctggcttgggagggcttttcggcattcggggcggatcctgccaccacctcgatggctcgacccttgttcgcgttcatgcggatgaagcccttgtcttccaaaacttgtagctgatgcttgaccgaagacggacttttgagcccggcggcatttccgatttcccggaaagagggggcgaagccttgttcgtcgatatgcgtgcgaatggcgtccaacactttgcgctggcggtcggtcagggtggactcgtccggcttctgcttgggggagaagggaatggtgctcacgtcagggctcctttcgttacgtcaccagcataacgtgttgttcgtgtgaaatcaaacatctgttcgagtttcgacttgaccgtgtcgaacgtttgtgccattataagaacagttgttcgatagaacatctgttcgagagaggtggtcgtgatgactggttcaatggtgatggccccggcccgtagcgcacgtgtagctatgcagcatgctggaacgttccaccggaatgtgcgtgggaagattatcgcagtgatggtcgccttggcgctggcctggtgtggtttcggcgcgcttaccgctcagcgggcccaatcggatacgggggccacgcaggtgaccggttatatcgtgcggccgggggatacgctctggtcatatgcttcggctatcacgcctgctggtcatgatgtatcggaaacggtggatgagctgattgcgttgaacaatcttgagtccggatcattgcaggccgggcagcgcattattgttccggttgagtaaatgaaacctgagcggcatggtttttccgcccgtacacgttattctggggagcatgcattgtcctttttgccagaaccccgacaccaaagtcattgatacgcgcattagcgatgacggtcattccatccgtcggcgtcgcgtatgcccgaaatgcagcaagcgttttaccacggtggaaaccagtatgctgctggtcactaaacgttcgggtggcgtggagccattcagtagagacaaagtgatttccggcgtacgcaaagcctgccaggggcggccggtcagagaagaggatctgaagctgctgggacagaaagtcgaagaggatcttcgctcccgaggccttgccgaagtcacctcagatgaagtgggcaaagccatcctgaaaccgttgcgtgacttggatgtggtggcgtaccttcgattcgcgagtgtgtaccagaactttgcaggtctggaggatttccaaagcgccattgatggtttgcgtgaataatatgcgaatgccatgcaccgtgatatgcgagtgattcgcaaaccatggtgcgagccaatcatgaagcccagcacttatgaaagagacccgtcatgatgacgggtctctttcatatcaatcgaggatgagctgcgtcagctgatgacacgcatgcgaatggtgccttcgatgttgcgcagtgcttcaagcgtggcggcgctgggcgtctgagccacgtcggtgaccacatagccaagttcgccttcggttgccagcgactggaaggaaacgttgatgttctcctcgccgagcacatgattgacatgagccagcacaccaggaagattgtcgtgcagatgggcgatacggcacacacccttgcactcaccgaggttgatctgtggtaggttcacggacaaggaggtagaacccttgaaccagtaatcctcaagacgctgagagacgaaatggccgatggattcctgagcttccaaggtggagccgccaatatgaggagtcagaatcatattgtcttcattggccagtgaggtctcgaacggatctccgctcttcttcggttcaacggggaacacgtcgaccgccgcgccagacagatggccggaatcgaggtgctgcttcagagctcccagatcggcgacgaaaccgcgcgaaaggttaatgaaaatcgcgtcctgcttcatgtgggcgaattggtcttcgccgaagaatccggtgttcgacttgcggccatccacgtgcagggtcacggcatcggactgttccagcagttcgttgagggtgtcgcaacggtaggcgttgcccagtgccagtttctcctcaatgtcgtagaacaccacgcgcatgccgagggcctcggccagtaccgacagctgggagccgatgttgccgtagccgatgatgccaagggtcttgccgcgcacttcatgcgagccggaagcggacttgtcccacaggccatgcttgatgtgatgcgtgtgtgcgggaatgcggcgcatcaagcagatgatgtcgcagatcaccaattccaccacggaacgggtgttggagtagggagcgttgaacacggcgatgccacgcttgccggcatgtgccagatcgacctgattggttccgatgcagaagcagccgatggcgcttagcgtaggacgcgcatccagcacgcgggctgtaacgttggtcttggagcgtacgcccaccaagtccacgccatccagcgcatcgatgagttcgtcctcgctcagggctcctttcatggtctcgacttcgaaaccgtgatcacgcagcgatttggccgcatcggggtgaatgttttccaataacagtgctttgggcatgcttcataccttagatgttcagggacttttcgtccgcttttgtccgaactataaccagtttctgggtcggcctggtcattgccacgtacaggtccgaggcggcgaccaggcggctcggcgcgtcatcctcgatgagaccgggctcgaccaccacgacggcatcgaactccagacccttgaccgtttcagtgccgcagacgctgatttgctcatcccattcgggctgctcgatgagccttgcgtattcggccgggtcaagaatgacagccagtttgcggcgcacggcatcgcgcaccggggcgatgagattatccggacagatgacggcgatgcggccggtgccgtctgccgaaacgaattgttcggcaagctgcgccgcctgctcggccgtcgtttccagcaaggacgacatgtcgggcaccacattacgggacaccgaatcggggatggtgcgcaccgcattgaccgtggagatgtagaggccttcctcctcggcaaatcgtgaggcaagttcggaaacttcctgaggattacggtagttgatggtcaactcgttcagatcccagtggctttcgccgaacaggcggttcatcgatttgctccagcgtcgggtgccacccagcgccgaagtctgcgccacatcgcccacgatggtgaacgagcgggaggggcaacggcggatcaacatacgccagtccatggcggtcagttcctgcgcttcatcgaccacgatgtgcccgtaggtccattcacggtcggccgcggcccgctgcgcggtcagctcagcgtcgtccccgttcatctggtcgagcagcatctgactggagacgatgcctccacccagaccggtcgcggccagagtgtctttggcatactgctcttcggcggcacgacgtgcgtcggcggcggactggcgggccaccgccttgggatcggggcccagcatatccattgcttcgtcgagcagcggaatatcggagcgggtcaacggggagcctttggggcgggcaagtgccgcgatgtcgttgtcggtcagccaaccagccagagacttcagacgttcgggatgggcgaacagctgatcgatgagccatggggcggtcatcggcagccagcacaggttcagggtcttgcgaacctgctcgttcatacgtagcagcgacatcgcgcggttcagctccgcctgatccggcgtgtaatcaagctgttcggcataacggttctgcatgctggtcagcatcgaacggataaaggtctcgcgggccttgttatgaggttgtcgggtgcgcttcgcgtccgcctgcgcctgctcgatatcagtggccagcattggtacctgaatgccgctaatggttactgtcggcagagcagcgggaacacgcacgcgtgcggcgatggcattggccactacggaggtcatgcgtcgatcgcccttgagcttggctgcataaggggagtcgaccgccgtggcggtgatgccgggaatcagatcgctgatggtgcgtgagaccacgccggtctcgcccaaggaaggtagcacctgatcgatgtagtgcaggaacgccgagctggggccaacaaccagcacgccggaacgttccagcgtgcgccggtgcgtgtacagcaggtaggcggcgcgatggagcgccacggccgtcttgccggtgccggggccgccctgcaccaccacggcgcgattcatgtcggagcggatgatgcggtcctgctcggcctgaatggtggccacgatatcggtcatcttgccggtgcggcgtgagctcaacgaagccagcagcgcaccctcgccggtcaatgtgccggcggaagacgcctggccgacctggtctgaatgcacgtcgagcacctcatcctcaacgcccacgacttcgcggaaactcaaggtgatatgcctgcgcatcacgatgtcgccgtgattggaaggggtcgcctcatagaaaggacgtgcggcttcggcacgccagtcggtcagaatcggctcatggtccgggctcgacaggccgatgcggccgatgtaatgacggtcgccgttcttggcatcgagacggccaaacaccagccgatcctcaacgctgcgcaattgcgtgaggcggttttcgtacattgtggcaaaggagtctcgttcgctgcgttgcgtgggggatccgtgggagccggcggcgcgtacggtgtccaggcgttgccacatttcggctcgcagatcatccaatcgtccgtaggcgcgatcgacggcctgctgctcttcatgcagctgggaggcgtaactcgacatgctgttctcttcgttccatttccgtggggcagaaaaacttaaggcattcaaatttaccgcacaccccctacgtcagtgatgcggacaactcggaataggtgaattcagcgtgaattcaccatgctgctcggtcggtggggtgcgcgacgtggattggatgtgcggagcgtccattcgtgcgacagtcgtggccgacacgcgcaatccatcggtaattgccctaaaagggtgagcaaatcgtgcatgagtggggagaaatggggaatcgtggggtagagtagtgagccagttggccgaagtgtatcccacgtaacgatgaaggaggtggagccatggttgccgatcagacgattcgcgacgctgatgccaacgcacaaggctccaccactatggccgatctcatggctggtctgccgccattgcttctcggcacatatacgccgaagatcgatgccaagggccgtatagcgcttccggccaaattccgctcccagctggggcagggcctggtcatggcccgaggccaggaacggtgcgtgtacctgctgccgttcgacgaatttcgacgtatcgcctcgcagattcagcgtgtgtcggtgggaaacaaagccgcccgcgaatacctgcgtgtgttcctttccggtgccgtcgaccagcagccggacaagcagggccgcgtgctggtgccgcagatgctgcgcgattacgccaatctgggttccgacgtcgtggtgatcggcgttggcacccgtgccgaactgtggaataaggacacgtgggagtcctacctcgccgagaaggaagagggatattccgatattgctgacgatgtgttgccggaggtggaattctgatggttgatgtggcgaatattcatctgccggtattgcttgacgattgcgtgaacctgatggcacctgccctggaacatgagaacgccatcgcagtggattgcaccctgggccttgccggccattccatcgccttcctcaaggccgcgcctcaggctcggctcatcggcattgaccgtgacagcgaagcgctggggctggccgctgaacgcatggaacgggaggggctcgccgatcgattcatcccagtgcatgccgccttcgatcagcttgatcaggtgttgacggaccgaggcatagaacgtgtggacgccgtattcatggatctgggattatccagcctgcagatcgacgaaaccgatcgtggcttctcctattcgcatgatgcgccgctggatatgcgcatggacgtcagccagccgttgacggccgaacggattcttgccacctatgatgcggcggaactggtccgcatattcaaggaatacggtgaagagcgtttctcgcgtcagatcgcccgcgccatcgtggcacgtcgagacaaggagccgtttaccaccaccgcacagctcaaccgtctggtcgatgaagtggtgccgcaagcccaccgcccggcgggcaatcccgccaaacgcgtcttccaggcgttgcgcattgaagtcaatggcgaattagacaagctcgcctccacattgccgcaagccgcgaaccgactgcatgtcgggggacgactggtggtggagtcctatcattcgctcgaagacaaaaccgtcaaatcgttcatggcacaagggctgcgagtggatgttccggctggcctgcctgtcataccgccggatgcccaaccgtttttcacggatctcacgcgaggtgccatcaaggccgacgaacatgaaatcgcagccaacccgagatcggcttcggtgcggttgcgggcggtggaagtcagccgtgatattccgtcacgatggaggaaacgctttacgcaaaccgcgcagggcctgaatgacatcaagatacaaggctccgcgtctccgggcagagccaaaaacatagcacgaattcgtacaaggaggggataacagcatatggcaaccgcacgtaacattcgattgaacgcggctccggcctcgaaccggccgcacaccaagcatcagtcctcctcccgacctgagctgcgggtagtctccaacccgcgtggagacgagcggggcaatgtcgtcggacgggtcatcgaatggaccagaacaagaagcgcaccgctggtgcacgtggccatcgcagtgatcttcctcgtcggcaccttgttcggcgcgctgatgctgcgtacccagatggtgcagaactcgtttgaggcggcacagatcgaaaccaatatcaacagacttacccaagatatcgaagacgatcaggccaaacttgatcaattagtcgcgaacctgcccgacaaggccagcgacatgggcatggtcccgcagcagggatcagtgtccatcgacttaagcggataccagtccaacaaaggcggaacccagtgaacaccattcgtcgcatcgtagagttcgccaaggtcaagaccttcgcgttcaaatgcattgccatcggcgccgcattggcgttggtggcgtcggcatgcgtgatccagctggcctccacccagctcatcggcggccgtcaaaccgcacaagcggccacggctaaccgcaccctgaccgtgacgttgagcgccaagcgtgggcgtatcctcgacgccaacggctccgtgctcgctcaaagcgtggagcgttatactatcgtcgccaatccggaggctgcacaggagttcgagccgattacttgcaatgacaacacccgtgattactgccacgaaattgacggcaaacccgtgggcgctaccggagcgtcggccgtgggccgactgctggccaaagtcttggatatgaacgccatggaactgggagctgatctgtccggtaccgggcagtatgtgattctgaagaaagacgtgaccccacaggtcaagcgcagcatcgaggcgttgcacctgggcggtattgtctggggtgagctgagcagtgaacgactgtatgcggatggcgatctcatgggcgcgctgcttggcggcgtgaacgacaacggcgatggcgtcgccggcatcgagcaggtcgagaacaagacgcttaccggaaccgatggccatgaaacctaccagcgtggtaatggcggcgaagagattcccggcaccatgaccgaatcggtggcggccaaaaatggcgacgatgtcaccctgaccattgaccgtgatgtgcaatggtatgtcaaaaaggccttgaaggaggccgagtccaagtatggtgcagcgtgggcgatcgccgtggtgcaggatgtccagagcggggagattctcgcactggccgatagcgatgaagtacaggctggtaccgttgcggcgaagatgagcccgtctcgggccgtgtccgaaaccttcgagcctggttcggtgggcaaggtcatctccatgtccggctatctgcagacgggactgcataagatgagcgatcaattgtcggtcccggaccacatcacacagaagggccagacctacaaggactcattcgaccatggcactgagcgctggacgctcgccggtattctgcagaactcatcgaacgtcggcatgattatggccggggagaactatccggatgagcaacgctacgagtacctgaccaaattcggcatcggacaaccgaccggactgaacctgcccggtgaatcgagcggtctgctcaccagcagcccttcggcatgggatctgcgtacgcgcaacaccatcctgtttggtcagggctacaccgtcaacgccctgcagctcaacaacgtggtagccaccatcgcgaacaagggcgtcaagcagcagcagtcgatcatcagatcaaccaccgatgccaatggcaagaccactgagaccaagaagggcgaagccacccgcgtggtggatgaaaaggtcgcatcggacatgatgaatgcgatggaatcagtggcggagagctacaacaagttcatcaaggtcgatggttaccgcatggccgccaagtccggtaccgcagaggtgcagggttcggatggcgcgctctcgtccattctctccgattattccgtggtgattcccgcggacaacccgcgctatgcggtcaccgtggtgctgaaggatccgaatggtgtgttcggcggtctgacggccggccctgtttccgcacagatttgtgagttccttatgcagaaatacgaggtgcctgtctccagtccacgaaaaaatgctattccagtcacgtggtaaggatcaggggagaaaggcgatagcccatgagtgcagtgagcgaatccatcgcccagcgggtgaccttgggaatgctggtcgaacggtacggttttgaagtcgatccacccttcgccaccaatgtcaccattacctcactcagcgatgccgtggataccgtgattcccggctcgctgttcatctgcacgcatgagcaggaacccgatgtactgcatgccgcacaggcaggtgcctatgcggcgttgctgccacgcgcgtccaaagggcagatcgccaatgccgatataccgttgctctacggcgatttcgacgatcgcgtactcggcgatctggccagcggcctggccggcggaccatccaacgccatggcggtgttcgcggtgaccggtgcggatgagcaggccgttgacgcaggcgtgtcccagctctccgaattcctgcacatgctgggcaatccggtggcggtaatcaccgcatccgggtccacgtcgatgacacgtaccatgaacctgaactatcctctgggcatcctcgatatgcagcgcgcgctgtccgtgtgcgccgaagacggtgtggcggccgtgatcatcgccatggatgaccgcacattggccgagcatgcgttggaatcggtgaacgtggatgtgctgggcacggaagatgtcaacgcaagcgcaagcttgaacgaattgaagacacgctacgcattcgttgcggaacatgacatgtccatgacctcgtcgacacccgaatcggatgaaatggctgcggattcaccggcaatgtacgaccgcgtccgactcgggcacatgtccttggccatcgccatggtactggccgccggcgtgaggaaaaacaacatacgcagtgccctgcatgtggccaacaatctcaattaagtccgtggatgcgggacgaagcgtaatcgtaaaggagtttgaaacaccatggttccgatgagtgtggaggagatcgccaaggccgtcgatggtcgattgatcggagacgccgattccgagtctcgagccaccaatacggtcagcgactcgcggcaggccggccccggatcggtgtttgtggccatccgaggcgagcgtgtcgatgggcatgactttgtggcgaaaaccgctgaacagggagccacggtggccatcgtcgaccatgaggtggagtccgatggcctgccgcagatcgtagtgaaagacacggtcgacgcccttggcgagctcgcccgacacaacatcgttcgccgccgcgagctggacggcgacttcgacatcatcggattgaccggttcggtgggcaagaccaccaccaaggatctgctctcctccctgcttgccaccgtaggcccgaccgtggctccggtgggatcgttcaacaatgagatcggcctgccgctcactgcgttgcgggtcgatgagcacacccggttcttcgtggctgagatgggtgccagccatatcggcgaaatcgcgcgactgacccgtatcgcaccgccaaacacggcaatcgtattgaaggtcggcgtcgctcaccttggagaattcggctcccgcgaacgcatcgcacaggcaaaaagcgaaatcgtgcagggactgcttcccggaggcaccgcggtactgaacgccgatgacgaacacgtggttcccatggccggcctggccagcggcgatgtgctgtggttcggcttggggtcgtcgcaggagcccgaggtacgggccattgatgtcactgccgaccggtccgatcatgctgaattcacgttggtcgatgcggacggcaaccatacgccggtgcatctgggcattcctggacgtcacaacgtgatgaacgcgttggccgccgcaaccgtggcgatgcgttacggtatggcacccgaaacggtggcgcggattctggcctcgcagcacaccatcagccctcatcgcatggcattgtccacggtgaatcgcgaggggacttccttcacactgatcgatgattccttcaatgccaatcccgactccatgaaagccggcctgaacgggttgaaggcttggaactcaaatgacggcaaggagccgttccgcgtggcgctgctgggtgccatgctggaactcggcgccgatgaaacggcattgcacacctcgatcggcacgtatgcggccgaattgggcatcaacgcgatcatcgcggtcggttccgcccaagaccagcatctcgatgcactggcacaggctctggcggacggtgcccgtcagagcccatccgcgtcggtggattgcgtacacgacatcgatgcggccgaacagctggtcgtcgacttggcgcgcaaccatcccgacgctgtggtactgctcaagggatcgcacgcgtcaggcctgagcgctttggctgaacgctgggcaaagaactgacccgataaccaccccaagaaaccgacaagaaagagaagctgcacgtgattgctctgatcattggaatgctggtgtcgctcatcgtcaccctggtcggcaccccgctgctgattcggctggtccacaagctgcactatggccagtacatccgccaggatgggccgcagtcgcatctggtcaagcgcggcacccccacgttgggcggcgtggtcatcaacttcgcgattctgctcggttgggcatcctccgcactgtaccgatacctgcgttcggacgacgtgccctcctggtccgcggtgctcgtactgttcgccatgctgtcgatgggtctgctgggctttatcgacgacttcgccaaggtgcgtaagaagcagaacgaaggcctatcggtgaccggcaagttcattggccagttcatcttcgccaccatctacgcggtgctggcgctgctgattcccaccaaatcgggtttccccagtgcgcaggcgggcatcagcttcatcgaacggccgttcttcaacttcgacttcgccggtcgaaccgtggccatcatcctgttcgtcatctgggtgaacttcctgatgaccgcatggaccaacgcagtgaatctgacggatgggcttgacggtctggcggcaggttcgtcgatgatcgccttcaccggttttggcatcatcgcattctgggaaagctaccacatcaagggcggcagccatggcggatattcctatgccgtgtccgatcctctcgatctgaccgtcatcgccgtatgcgcggccgtcgcctgcttcggcttcctgtggtacaactcgaaccccgcatcgattttcatgggtgataccggttccctggccttgggcggtctgttcgcagccctgtccatcgccacgcacaccgaattcctggcggtggttctgggtggactgtacgtcatggaagccatgagcgacgtcatccaggtcgggtacttcaagatgacccacaaacgtgtattcaaaatggcgccgatccaccatcatttcgaactgaagggttggaccgaaaccaaggtggtggtgcggttctggatgatcgaactcatcttcgtgctgctcgccctgacgattttctacggcgactgggtcacccgctccggcctgctgttcagctagcggaaatctgggtggattatgctcacccacggaattcctatatcaggaggaacaatgcaagtagcggataagacagtggcgatcgccggactgggggtatccggcacctcgttggcggaggtattgagggaacgcggcgcccacgtgattggcgtcgacgagaggaagcccgaggctgatctccgctcctttgatgacgtggactgggaccacgtggactacgtcatgtcgtccccagtgttcaacccccgtaccccatttgtgctggaagcccaacgccgtggcatccccgtgatgagcgaggtggaattcgcatggcaactgcgtgtgaataacgagcgcaccggtactccggctccatggatcggcatcaccggcaccaacggcaaaacctccaccaccgagatgacctcggaaatgctcaccgcctgcggactcgacgcgccgaccgccggcaatatcgcctccggagacatgagcatgagcctgtctcgttgcgccaccaatcctcagcacgacgtactgtgcgtggaactgagctccttccaattgcacttcaccgattcgctggcacttgactgcgcggcgatcaccaatatcgccgacgatcacctcgactggcatggcgggcgagagaattacgccgccgacaaatccaaggtgttccacaacgccaaacacgccatcgtctacaatgcgcaggacgccaaagtcagcgaactggcggccgaggcccaaaccgccgaaggatgccgcaaggtgggattcacgctcgaggccccccaggccggtcagatcggcattgaaggtggctggattgtggacaggagcggcgtggccggcggcgcagtgggggagccggtcagactggccgccatcaccgatttcacgcatctggcagagccggacggctcactgtacccgcatctggtggccgatgcattgacggcattggcgttggtgctgggacttggcgctgatcgcgataccgcgctgaaggcgcttacctcgttcaagccgggcggccatcgcatcgaaaccgtggctgaggccgtagtcgagggcggctctgttcgtttcgtggacgattccaaagccaccaacggccatgcggcacgcgcctcgctgtccagcttcccggccaagtctgtgatctggattgccggaggtctggccaagggcagtcgattcgaggacctggtcaaggaccaggcgcataccatcaaagcggccgtcatcatcggcaaagaccagcagccgatgatcgaagcgtttgccagccaagctccggacatcccggtgaccatcatcgatcccgaagacaacgataccgtcatggatcgtgccgtcgaagcctgcggcacgtatgccgccgccggcgacattgtgcttatggctccggcctgcgcctccatggaccagttcaagtcctatgcggatcgaggcaatcgattcgccgccgcagccaagacgtggagcgaggtgcatggcctccactgatatccataagcgtaaggcatacagagcccctgacaagcccgcactcgaaatcaccgactacacgggttggcgaagcttgctcaacccgctatggtgctaccacggattccgcatggccgtggtggggctgacatgcttcggcctgatcatggtgttctccagctccacggtcaccatggccgcactgggcaagtcgccgttccttcagcttctgaaccagggcgcgttttgcctgatcggcttggtgctgggcttcgtggcattgacgatgccggtgacgttctggaaacggaccggcgtgttctttgtggtgggtgcctgtctgttgcaggcgctgacctttactccgctgggtctcgacgtctacggcaacaaaggttggctgaacctcggcttcaccactatccagccggccgaattcatgaagttcgcgatatgcatatggctgccctcgtcgttgcatgcctgcagcaagatgtaccacaagaagggaatcaaagcatatgccgcgccgttggtgttgtatgcgataggcgtggcgctggtgatgggcggcaaggacctcggcacggccatgattctggtcttcatcggaggcgtggccttcctgatcgtcggattccccagtaaatggatgggagtcggcgtattgggcgcggtggttatggtcggtgcattggcggtttccagcccgaaccgcatgcgtcgtattctggccacatatggcgattgctcggccgctgacgcgcagagcgtatgctaccagtccattcacgccaagtacgccatcgcctccggaggctttctgggattgggcatcggcaattcgcgagagaaatggaattacctgccggccgcccataacgatttcattttcgcgatcatcggcgaggagaccggattcgtcggttgcgccatcgtattgctgttcttcgcgattctcgcctggtgcatgatcgtcatcgcattgcaggtcaccgatcgttatgttgccatggtgctgatgtgcgtcgccatttggatcgtgggccaggccatggtcaacatcggcgtggtcgtgggtgtgttcccggtattgggcgtgcctatgccgttcgtctccgcaggtggctcatccatgattatgtgcttgacggcggccggactggttgtgggacttatgcgctctcaaccgcagataaaacagtcgcgtcagagcgcgtaagtagactcggtaatcatgaatcaaggcacaccacatatcgttcttgctggcggcggtaccgccggacatgtcaatccgctgctcgcggtcgccggagcgattcgcgacatcgaacccacggcacaggtcaccgtcatcggcactgcggtgggtttggagaaggatttggtgcctgaggccggctacgagctcgacaccatcgaaaaagtgccgttcccgcgtcgccctaacctgtacatgcttcgcttcccggcaaaatggaagcgagaaaccgccaaggtgcgctccattcttgaaacgcggcatgcggatgtcgtagccggattcggcgggtatgcttccgcccccgtctacgccaccgcacacaagatgggcattccgattgccatccatgagcagaatgcgcgtgccggcatggccaataaactgggcgctcgttgggccgatttcatcggtaccgtgtacgaaggcaccggtctcaaaccgcgtgccggagccgacgtcgagcgtgtcggtctgccgttgcgcccgaccatcgcctccctgaccaaacgcatcggtgacgatcgtgccgccgtacgccgtgaatcggccgcgcagcttggcgtcgatccgaaccgtccgctggtgctggtcactggcggatcgctgggagcgcaaagcctgaaccgcgccatcgcctcctccgccgcagacctgttggcccacgcacaaatcatccacttgaccgggcgaggcaaaatcagcgaagtacgcgaactggtcacggcctcggccggcgcggacgtgcttaccggcatcggccccgaatcggccggacaaggtgactaccataccgccgaatatctggaacgaatcgatctggccttcgcctgtgccgacttggtgatttgccgcgccggagccggatcggtatccgagctggctgcactgggtctgccggccatttacgtgccgctgccaatcggcaacggcgagcagcgtttcaatgccgagccagtggtgaacgccggcggcggccttctggtcgcagacaaggacctgaccccgcagtgggtgcatgagcatgtgcccgatctgctcgccgatcacgaacgacttgccgaattcggccgcaaggcatgggaatacggcatcagaaacgctgccgaaatcatggcccggcacgttctgcaattagccgaaccatccaaatagtattcagatatcatcccgtgcgcgatacagaccaatcccgtcccgcaacacgagatacggtcataatatagggtgctggaatccccaaaggagttttgaattgtctcaagatcagcccatcgtgcttgaccccacgtatgcctcgttcgatgctgcggcccgccccgcggatctcggcgccacccatttcatcggtatcggcggcgccggtatgagcgttctggccgaaatgctgcacgccgaaggagtcgcggtggacggctccgatcgcgcacacagcgccaaaaccgaccgacttgaaacgctgggcatcaccgttgaattcgggcagcgagccgaaaatgtcgcccaggccgagaccgtggtctactccagcgccatcaaaccggacaatccggaaatcgtcgcagcacacgcggcgggcaagcgtattgtgcatcgcagtgacatcctcgccctgctcatgaacggcaaacgagccgtcaccgtggccggagcgcatggcaaaaccaccaccagctccatgctgtcccacattctggtgaacgccggtgctgatccaagctacgccatcggcggctttatccaaggcccggacggcaccacgctggacggtggacacgcgggcaaaggcgatattctggtggccgaagccgacgaatcggacggcagcttcgccaaataccatccgaccatcgccattatcaccaactgtgaagccgatcatctcgaccattacggcgacgaagcccactaccgtgccgcgttcgttgcccacgccggccgggccaccggtcacgtgatcatcagcatcgacgaccccgacggacttgccgtgctggaggccatgcccgccgacgtgaaatcccataccgttgcctacggcactaccgcgcgtgaatccctgcccgatttgggcggtgccgcgtatgtctggatcgcttcggaaagcgagaccgcaggcagcggcgtcgaacagctcaccctgcatctgccggccgcggtgacggcgggggagccggtgtctcagagcgttgccctgaaggttcctggcgtgcacaatgcgcgcaatgcggccgccgccatcagcgctgccgtgctgctgggcgtgagccccgcagacgcggccaaggcggccggcacattcctcggtgcggcacgccgcttccaggtgcgcggcacggtcaagcaggtcactgtagtggacgattacgcccaccatcccaccgaaatcgcggccctgctggatgcggcccgacgccggtaccccgattcgaccattcgtgtgatcttccagccacacctgttctcccgcaccaagttcttcgcgcaccagttcgccgaatccttggccaaagccgatgacgtcattatcaccggcatcttcccggcccgtgaaaagcagaccgatttcccggacatcagcccctccaccatcgtggacgcggctgagggactcaaggacgcttccgcaggcacgtggattcagccggtcgaggatatgtgcctggccgccaagatgatggccatgcgtgcccaccacggcgacgtgatcttcaccgtgggcgcgggcgacatcactgacatggatcaggtgctgctcaccgcacttgaggcccatcgggaaagctgcgagtgatgtccgggcgcacggtcagatccgggggcaatgacaacggctcacgtcgttcgtccggaagtccccgcaagccgcgcaccatcggttcacgcggaaacacgggtcactcgtcgaagtctcgcgctccccggtccgtgtcttccgggcatgagatcgacgagccggagatcatcgacgatgtgacggtagccaagggccaggccggtgccttcgtcgatgcacgacggctgcacagcgaggattacgttgccgaaacgctgcaccagaccaccggctccctaggagtcgtatcacgcccgaaagtggtgaatttcaccgaacgcgccaaagaacgcaagcgtgcgaacgtacgtgtcgttgcgttacgcgtgttgattgctgtcgtcagcgtggctgtagtgacggggctaacgtggctgctgctcttctcgtcggtgtttcgtctggaaaccagcgagatcggcgtatccggtgccaacgaatgggtgagcgcgcagaccatccatgccatcgccgataagcaggctggaaagtcgttgttcctggtctccacccatgaggtcacagagcaactcaaatccattcccggcgtcagcgaggccaaggtctccaaacagttccccaagtcgatgagcgtggaagtcaaggcgcaacggcctgcggccatgctgaaaagaggcgataccctgaccgcggtggattcccaggcgcgtgtgttgaactcggtgaagaacgccaacgtggatggcatcccggtgatcgaggtcaaggatatagacgccagtctcaagaaccgttcggtgaaggaggcgctggcgattctgggcgcattgccggaatcgatgcgtaagtccattaccaaggtcaccgctgagacgcaggattcggtgaccaccacgcttaacgacggtgaccgcgtaatcatttggggagactcctcgcaactgaagctgaagctggcggaagtcgaggaaatcgacaagaacatcaccgctggcacggctggctttgccggcaaacatcagattgatgtttccgcatcccagaagcccatcatcaagtgacggcgattcagttggttccgttggttccggggcggcgttcgctccgttggtcctgctgacaacgttggtcccgtcaatgccggggcgatgttcgctgccggcgatttgcgcgagtagcgccatagggtgtatgctgaaaagtccggctgaaaagccggaagtttgataactcaagattgggggcgatcggtttcgacggtgacctgttcgctgcagggaagcgtgccgagaacgccgggtccgctcgtggatgaccccggcaaaagaataagtgctaaatctaaccgcactgagttcgctctcgctgcctgattttagtcaggattaaccagtgagcagccgctccgttcactcctcctcgtctttgggaggatgctgagcgtcgtttagaagacttgctgatgcagttgagcctcagggctgcatcgggactttaactgcggatatgctcgccatcagttgtctgcgacatcgatgggggcagaaaaatcgccaacttggccagcagactacgcacgtagaagactgtgggctcggtcatcggaccggggttcaattccccgcgcctccaccaatccgtttcggcggaaacaagccgcttggccttgcgggagtagggctgagcggcttttcttattcccgccgattccctcggtttcacgggataatgtgggcaaaatgtgggcaaaaatcgagcccgcgaagccctctgccacaacgcgagaacggccccgaccggcaagtaggccgactcgggttgagtcgtctgcgatgccggacggggccgaactgtgcgtggtggtcatgcggcgaggtcgaggcgctgtttgatggcgctgacgccgatgagcgcgccggcgaggatgccgagcgcgttgagcgtggtcactatcgcgtccacgtgagtccagccccatgcggggccgaccgtactgacgaacagggcgagtgcgggcaggacgatgaggcccaaccatttgaggatgtcgtagacgcggctggggattgcgcggttggcttcgatccgacgacctgcggttttggagaccgccgctctaccagctgagctacgcgcataggcggtcatgccggttgattgccatggcacatgaccattgggtggatatgagtaaagcccctgaaccggttgattcagaggctttcacactaatcctgatacggagtatgccacggggtggattcaccctactcccgcttgtgttttgttttttcaggcggcttggatggtgaggcgtccgccgagggcgtggattaccttggcgatggtttggaagctggggttgccgtccttgctgaggctcttgtagaggctttcgcgccccacgcccgcgtccttggcgatctgggtcatgccccgggccttggcgacgttgccgagcgcggcctgcatgagtgcggggtcgtcgtattcggctatggcgttgaggtaggcgatgatgtcctgttcgttttcgaggtattcgctggtgtcgtagtcggtgaattcggtgctcattgtcgttgttccttgtagtcgttgaggatgtcgtgggcttgtctgatgtcggtctgctgggtgcttttgtcgccgcctgcgagcagcagcatgagcacgttgccctgcatggcgaagtagacgcggtatccggtcccggtgtggaaccgcatctcgctgaccgggcctcccacgggtttgatgtcgccgaatggcctgcctgcgagcttgcagacatcgagccgggcttggatggcggccttcgctttgtggtccctgagtttcttgaaccacttgcggtattcggcggattgcttgatttccatacctctattgtatcctacagactacatcatgtcaagccgaatggccgctggagcccatagccaacgcaagaatctcccgtatgttgaactcccagtagccgtcatcgacgggtctcgagctggggagtttgccccggttgagccagttgctgatccgcttacggctgacctcgtacccgtagtttcccttgagccattggctcatgcctgccggtgtcttggtcaggtgtattgcctcggccttgtcgcggctctgctcgtgcagctcctgcacgttgatgggattgccgcacctgcacaggcgcagcgcctcgcccttcgcggccgtcacttcgcgtctgcattcggggcagacgccgattatcctgcgggtgcgcggcctgcggtcaaccttggcagagcgtccatggtgcctcgacctgctggctgccgcagtattggcatggttcggtggtgatgactgcacacgttgtactgtagggaaccatgaaagtcgtattgcaacgagtgtccgaagcgtccgtggacgtggtcaatgaattgggcacgctggatcccacgttcgagccgcagcagattggcccgggattcatgattctggtgggcgtcaccgatgaggacggcgacaagcagatcgcctggctggcccataagattctgaatctcagggtgttcgaggatgcgcagggcaagatgaaccgttcgatccaggacatcggcggcgagattctctccatctcgcagttcacgctgttcgccgacgtgcacaagggcaatcgcccgagcttcatcaaggccggcaagcccgagcatgccgatttcatgtggatcaagttcgacgaggcgttgcgctccgggggagtgccggtgaaggaaggtcgtttcggtgcgcatatgcgggtcgggctggtcaatgacgggccggtgaccatcgtcatcgacaccgagcatgacatgcctgacggaacacgctgaattgcgatagtaatttgacatcatatcccgttcccaccaatatgttactaaagcgctttagtcttctgcgggcgagggcgcatgtcgatatgtttcccatgaacgggcagcacaatgatgtggccgcacaagcggcagagataaggggagtgaacagcagatgttcctgaaacctgaacagcaactggagcggtgcaagcgcatagtgcgccagcgcgtggaccctcatatccacccatcgatcgcacagcttgcggtggagtcctttgacattcccggagagccgatgcccactgacgagttcttcgagaagctcaatcgaggtgacatcgacttcaagccgtttacgctcggcggtgaatggggcaccacatggggcacggtctggttccgcctgaccggtaccgtgccggccggctacccgaaaggcaagccgctggagctcatcctcgacctcggctggtacccgcactcctgcggcggccatatcgagggcctcgtctaccgtgccgacggcaccgccatcaaagccgtacacccgctcaactattgggtgccgttcatggatgctgagggcaacgcgcaagtgccggtcgccgaagacggcagcttcaccctgtacctcgaagccgccagcaacccgctgctgctcggcgtgcctccgttcattgagaccgaactgggcgaccatgccaccggcaagccggacgagccgtacgtattcaagtccgccgatctggccgaattcgatgaacgctacgagaactactccgtcgatctcgacgtggtgagctccctgatggaattcgccgacaaacagtcgccgcgctactggcaactcgccaaagcattgcagcgttcgctcaacgcctacgacgagcgcaaccccgaatccgtggaagccgcgcgcgcagcactcgccggcgtactggccaagccggccaatgcctcggccatgaacgtcagcgccatcggccacgcgcatatcgactccgcatggctgtggccggtgcgcgagacccgccgcaaggtggctcgcaccgtatccaacgcattggcgctgatggacgccgaccccgacttcaaatacgcgatgagctccgcccagcagtacgcctggctggaagaggatcatccggacatcttcaagcgcatgaagcggcgcattgaagaaggccggttcatcccggtcggcggcatgtgggtggaagccgatggcatgttgcccgccggtgagtcactgatccgccagattgcatatggccgcaaatacttcaaggaacatctcggtgtggagcccaagggcgtatggctgccggacagcttcggctacaccggcgcatggccacagatcgcccgccgtgccgggtacgaatggttcctcacgcagaagatctcgtggaacgataccaccaagttcccgcaccactcgttcatgtgggaaggcatcgacggctcgcgcatcttcacccacttcccgccggcggatacttatgctgcttggtgcaaggtccaggaactcgactacgccgagaagaacttccaggacaaggatctctccgaccgctcgcttctgctcttcggtttcggtgatggcggtggcggccccacgcgcaacatgatggagcacctgcaccgctacgagaacctcgaaggcgtctccaaggtgagcatcgaagagccgaatgacttcttcgacaaggcgcatcagcagcttgcagagaacgccggcccagaaatgcccgtctggaagggcgagctgtatctcgaactgcaccgtggcaccttgacctcgcaacaggacatgaaacgcggctgccgccaagaggaatcgctgttgcgcacggtcgaatacctgggcgcagccgccgtgttgtccgatccggagtacgtctacccgcgcgaggagctggaccgcatatggaagacgctgctgctgaaccagttccacgacatcctgcccggctcggccatcgcatgggtgcaccgcgaagcccgcgaggactatcgccgcgacctgaagcgtctcgctgaaatcgcccaagacatgtgcgccgtgctgcgcaaggccaacccgcaggccgacttgctcgccgaggcccgcatcagccagttccgcaatgacggcgcgtcttggcatgccaaccgcatcaacgaaccgaccgacgcgctttccgtactgacccagacattggacaacggccgtgtactgctggccaacggcgtactgtccgtcaccatcgaggccgacggtacaatctcgtcactgcttgacgaggagcatggccgtgaactggttccggccggcacccgattgggccaatacgaactgttgaaggacgaacccgccgtttgggatgcctgggagatcgaacgcgaatccctgctcatggcgaatgccatgaccggatcaatcgaatcggtcgatactgaaaacggtgcggcacgagtccgcgtgcgtaccgccgacgatgacaccgtcatcaccaccaccatcacgctgcacccgggttcacacacgctcgatttccacgccgacattgactggcacgaacgtgaacgcttcctcaaagtcgatctgccgctgggtatcgtggccgaccaagcgacatacgactgccagtatggtctggtccgccgcccaatcgtcaaaaacaccgcatccgacgaagccaagtatgagagcagcacgaaccgcttcacccttatcggcgacgccggttacgcggcggccgtcatcaacggatcggtgtacgggtccgatgcctcaccgatcgccgggaacgccgccgaaggtcgtgactcgggcaccatgttccgactgtcgctgctctccgcgccgaccttccccgacccgcgcaccgatatcggtgcgcatgagttcgactggtccgtggtggccaacgccacggtgggccgtgcgcttgacgccgcttgcgcactcaacgcaccgacgcttcatgacatgcccgacttagcgccgctcgcctcgatcgagtcagcaaacggcaccgtggtgttggactggataaagctggccgacgatggctccggagacctgattgtgcgcgcctatgaggcggccggcggcagggccgatgccacgctgcacgtctgcccggcgctcgcaggcgcttcggtgcatgagaccaatgtgctggaaggcgacgatctggccgccgacctgccggtcgcgctgcaagacggcacacagaacgccgaaggcgccacactgcacttcggcccgttccagctcgccaccctgcgcgtcacgcgctgaattctcgcctgacgcttctgcctccttgtaccatgaggggacagaagtatgtcgtattacggtttctccaattaccatcactcccacccctaccaccagacacagcaaaggagaattctccatgtttcttctgcccgatcagcagttggagcgctgcgaccgcgtcatgcagcagcgcgtcaaaccgcatatccacaccacactcgccgcatgcaccttgcgttcgttccacaatcccggcgaaccggtgccctccagcgaatttctagccaaagtgcgcaacggccaagtgcccttcgaacctttccgcgttcccggagtctggggcaccacatggggcaccacatggttcgaggtgaacggccatatcgacatggcggcggtcaaaggacgaaaagtcgaactcatggtagacctcggctggctcgatcaccgcggccccggattccaatccgagggacttgtctatcgtgccgacggcaccgccatcaaatccgcgaacccacgcaaccactggattccactcgtctacgcggacggcagcagcaccgtagaactcgatgaacatggcgacttcaccgtctatatcgaagccgccgccaacccattcgtcgaaggccccaccccgttctcacccaccgaactcggcgaagaggccaccggcacctgtgatttcccatacacactgagtcgtatggacgtcaccatcttcaacgaagacgtgttcgcctactacatggatctggaaaccgtctcctcgctgattcgtgagctcaaggacgacgacccgcgctactggcagctcgccaaagcactgcaacgctccctgaacatctacgatgaacgcgacttggaaaccgtgtcggcagcccgtgcggcgctcgccggcgtactcgccgaaccggccgcctccagcgcaatcaaccacatcgccatcggccacgcgcatatcgactccgcatggctgtggccggtgcgcgagacccgccgcaaggtggcccgtaccgtatccaacgtgctggctttgatggacgaagacccggacttcacgtatgcgatgagttccgcccaacagtacgcatggctggaagaggagcatcccgacctgttcgcacgaatgaagcggcgcatcgaagagggccgcttcatcccggtcggcggcatgtgggtggaatccgacaacatgattccttccggcgaatcattggtgcggcagatcacgttcggccgccgatatttcaaggagcatctcggcgtcgcgccgcgcggcgtctggctaccggacagtttcggctacaccggctcttggccgcagatcgcccgccgtgcaggattcgactggttccttacgcagaagatctcgtggaacgacaccaccaagttcccgcaccactcgttcatgtgggagggcatcgatggcacgcgtattctcacgcacttcccgccctcggatacctactgctcgtggatgagcatgcacgagctgatgtattcgcagcgcaacttcctggacaaggacctctcccgtaacgcgattctgctgtacggcttcggcgatggcggtggcggccccacccgtgagatgaccgcgcgcatccgccgcgaccatgatctcgccggcgcgccgaagatcgaattcggtactcccgaccaactgttcgaccgtgtgcgtaaggatatcgtcgacgatgcgcaaggggagaccccggtgttcaagggcgaactgtaccttgaactgcaccgcgccaccctcaccgcccagcaggacatgaagcgcggctgccgccaggaggagtcgatgctgcgcgtcaccgaatacctgtgcgccgcggcccgcatcaagaacccggactatgtctatccgcgcgaagagctggaccgtatttggaagacgctgctcctgaaccagttccacgacattctgcccggttcggccatcgcatgggtacaccgtcaggcgcggaccgaatacgcgcgtgacatcgctcggctgaacgagatcgcccttgaagccgggcgcgcgatcgcagccgtggaacccgatgacgcaaccataaccgacgccgtaatcgccccatattcccgccaagcctgtgagacgtgggtggtacgcccggcttcgagccgagccgaagcgggaaccgcatccatggctcgggtcgccgttacccatgacggcgatacgattgtgctcgacaacggccaactgcacgtgcgcattgaagccgacggcaccgtttcgtcaatcgtcgatcagcgaaccaatcgtgaactggtgcccgccggcacccgactgggccgctacgaaatgctcaaagacgaacccttccactgggacgcctgggatattcaacgcgatgcgttcctcaccgccaacgcgctcagcgaggcatcgattgcaagcgtggacgaaaccgccaacggtggggccgtcgtgcatgctgtcactcgcgcgaagggcgttgaaattcgtacgggcattgccttaaggccgggctccgccacactggacttcaccgccgatgtggactggcatgccgtcgaacagttcctcaaagtggatatgccggtcaccgtgcaagcggtgaacgcgcaatacgaatgccaatacggtctggtcgaacgccccatcaacaagaacacgcgcagcgatgatgccaaattcgaaagctgcacgcaccgcttcgtgcggatcgccgacgccgactatgccgccgctgtggtcaacgcctccacctacggctccgacgtcagccccatccacgccgatgcggcacatggcaccggccgcggcaccatggtgcggctctcgctgctgtccgcaccgctgtaccccgacccacgcaccgaccaaggcgcacactccttcgcgtggtctctggtcgctgacgccgatatgaatgcggtgctggacgaagcggcgcgacttaacagccccgtaataggggagttgcctgatatggcgccgctggtctcgctcgccgacgccaccggcgtcatcgtattggactggatcaagctcgccgatgacggttccagcgatctgatcgtgcgcctgtacgaggccgccggcggcaatgccacggccacactgcgccttgacgccgctctctccgatgccaaggccagcgtgcaggaggtgaatctcatggaggagccggagctggatgccgaactgccgcgcgcgctcgccggtgacgaaccaatgcctgccgacggtgcgatcgtttcgttggcgccattccagctcgccacgctgcgtattcgccgataagggatattgggcctaggctcgatattttgggtcgcgcccaaccgtaacggaaccggaacagaccggctctgccatacggttgggcgcggcccattattgtatgagaagagggagagcgatcccgttgggcaaatatcaatgcgacacgcgacgatgaattcgttgcgtgcatgtttcgattgtgttatgtttttactaaaccgatttagttaacaggttcgcgactggccggaagctaaaacggtttagtctcagcgatgagaactgaataaaggttgtgataccacgtcaatcaccgcgacgggtgactgtgctggagcacaacgattaggtttctccgtccacagcagggcgggatgaaaaaggaatcaaaaggaaaggaaaacatcatgttttctatgaagaagatcctcgccatcgccggtgccggtgcgatgctcgtatcggtggctgcctgtggtagcggaactgcgggggatgacggcggcaagaaggagatctccttccagacctggaacctcaagaacgacaagtacaccccgtatttcgaggcgctgatcaaggcctatgagaaggaccacccggacgtcaccgtcaagtggcttgacgccccgtccgatggttacgaagacaagctgtccagccaggctgcggccggcgaactgccggacatcgtcgacggcggcaactccatcctgtacggtcttgccaaggccggcgcgctgctcgatgtctccaagcaggctccggatgcggaaaaggactactacgaaggcgcatggaagtccgtgaccatgcagggcaatggcatcgagaagggtgcctacggcctgccgtggtatgtcaacgatggcccgacctactggaacaccgagctgatgcagaagtgcggccttgatccgaacaagattccgaccacatgggatgagtacttcgccgccggcgacaccatcgtgcagaactgcaaggatgtctacctgggcaccacgatgggttacaacaccgaagatctgatgaccgcaggcgtcaagtccttcatgaacgatgaccacagcaagtacaccttcaatgatgaggccggtgtcaagcagatcagccgcttcgttgagctgtacaagaagggcggcatcccgccggaggccctcgactcctcctggagccaggccgccgatctcttccagcgtggcaacctggtctccatggccggctccgcctactccgctgacggcttcaagcagaacgctccggacctttacaagaacctcgcagtcggcccgcgtatcagcaacgacggcaagtccgcttccgtggcctacgagatgctcggcatcagcgccaactcgaagcaccccgacgttgccattgacttcgcccgattcgtgaccaacgagaagaaccagatcgagttcgacaagaaggcctccgtgttcccgtccgccaaggggggtctggatgacgactactacaagagcatcgacgaaagcacccttgagggcaaggctctgaagatcacgctcgaccaggtcaaggacggctacggctctcgtccatccgagttcaccgacaacaacggctccaagaacttccagcagcagatcgccctcgctatgcagggcaagcagaccgccaaggaagcccttgacaagtccgtcgagttcgcaaacgagaagctcgcacagtgagcaacgcggcactcgccgctgacaggtcggaggcccgcacggcctccgaccggcctgaaccgatgaacctcaaccacggcaagaagcagaatcgtagcttcggcaccatcattgccccctacctgtttgttctgccagcgttcgcgattgtgtttgtattcatcgtccttgcggcactcaacactttcaggcttgctttcaccaactccacactgctccgtccgggaaccttcgtcggactcgaaaacttcatcaaactgttccatgacgagtacttcctcacggcactgctgaactccacactctacgtgatctgcgtagtgccgttcatggtgatcctcccgttgatcctggcctatctggtcaagggcaactcccgcatcatgggcttcttccgcaccgccttctacatgccggtggttatgtccgccgttgtggtgggtatgatctggaccaacctgctggattccgccggtctggtcaactccgtgctcaaggcattgaagatcatctccaagccggttccattcctcaccgatcgatggggcgtgctcttcagctcgatgttcgtgacaatctggctgggcctcggctactacatggtcatctacctgaccgccctcgccaacatcgatgaatccctttacgaagccgcctccctcgacggcgctggccctgtccgccagttcatctacgtgacaatgcccggcgtgcgctccacgatgatgctcatcatgatgctgtccaccatcgccgcattccgagtcttcaacgaaatctacgtgttgaccaacggctccgcaggccccggcggcatggatatgacgatgtcgatgcttatcaagcgcgaaggcaccggtatccaggcccgcactggttacgcgagcgccatctccatcgtcgtgctcgtcatcgtcggcgtcatgctcatcgtgcagcagatcgtacaaaagcgaggtgaggactgatgaataccaacacgcataaggtcaccgtcggcaaagtcgtccagtatctgattctgattctgatgttcctgctgctcgtcggcccgttcgtctgggaactgtccctgtcgttcaagggcaagggcgacaacgtctacgccgtgcctccctacctgatgccgaagaccccgacgctggacaactacatttccgtgttcaagcaggtcccggtattccactacatgctcaacacgctggtggtctgcctgatctccatcttcggcaacgtggtcttctccacgatggccggctacgcactgggacgcctgaagtggcgtggccgcggactggtgttcaccatgttcatgggcaccatggtcatcccgatcgaaggcgtgatgatctcccagttcctgatcattcgctccatccacctgcagaacacactgctggcagtcgcactgcctggcctgtgcggcgccatcaacatcctgctcatgaccaacgccttcaaatccattccaatggaactcgaagaggcggccatggtggacggtgccaacctatggcagcggttcttccacatctgtgtaccgcaggtcaaaggcacgatgaccgttgtcggcatcttcgcattcgtcggtgcctggaacgacttcctgtggccgttgatcgcgatctccgatgaaagcaagtacaccttgaccctcggcatgaaccgactcaagggcatgttcatccaagatccgcgactgatcgccgccggtgcgctcgtctcgcttatcccgatcatcgtcttcttctgctgcttccagcgctacttcttccgtggcttggaacagggtggactcaagggctgagcggactggaaaaaggaggtactccaatgaaattcggagtcaactacacgccgtcgcatggctggttccacgcatggctcgacccggactgggacggcatcgacaatgatctcaagcagatcagcgaactgggtatggaccatgtgcgcatcttcccgatctggccgtatctgcaacctaatcgcacctggatcaacaagaagggcgtggcggatgtgcgccgcatggtgcacatcgccggcgagcacggtttggatgcctatgtggacgtgttccaagggcatctgtccagcttcgacttcttgccttcatggctggtcacctggcatgcgggcaacatgttcaccgatgcggacgccgttgcggccgagcgtgaactggtcaagaccatgaccgatgagctgtccaaggaacccgcgttcaagggtctgaccttgggcaacgaggtcaatcagctgtctgacaggccgcatcccacgaagatgagcgccacggaccggcagatcgacgcatggctggacgcgctgcttccgaccgccgccggtgaagggcacaacgcgctgtacagcgtcaacgatggcacctggttcatcgatgggcacccgttcactccggtgcagtccgccaccaagggtgatatgacagtgattcactcctgggtgttcaatggcatcgcgcaaggatacggcgccaccagtgaggagtgctcgtcgtacgcactgtacctggccgagctggccaaggcgttcggcaaggattccgagcgcccggtgtggctccaggaagtcggtgcgccggagaatgtgctggaaaccgactacacgccggaattctgccgcaagaccgttgaacgtgccatggattgccggaacctgtggggtgtgacgtggtggtgctcgcacgatgtgcccgccagcatggaagacttcccgttcttcgagcactctctgggcttgttcgacgagcaaggccagctgaagccgatcggccgtacgttcggggaactcgccgcacagtaccgttccgcattgccggctcagccgaagaccgtcgccgtggtgattgatgtggatgaggccggaaacccggtgaaccgcagtgcgctcggcccgggaggctcggtgtgcgacctgtggatgaagctgcaggtggcgggccagcgcccgaccatcatcacctcgcaggtggcggccaatcaagaggcgctcgcgcagcgtggcattctggaattgcacgctgacgaacacccctatgccgcccgttactacactgcggtttcggacccatcgttcgaaacggctgattaaaccgatatccggttgtggaatcatctactctttgttccacaaccggatattttcaattgcagtgcgcacaattgcagtgcgcagggcaaaacataagacccggtactcgccgaagagcgagaagaacgagaagacaatatacgagaagggggagcgctcaatgagcatcaactgcgccgcagtggaccgactcattgattcgatgagcttcacgcagaaagttggccagttgaaccagcgtctgctcggttggaagtccgtggaacgcaatgctgcgggacggctggtggcctcggacgagctcaagcaggagattgaccgatggggtggactcggcaccctgtacggtctattgcgagccgacccatggtctggtcaacattggggtaacggcatacgccctgaggagcggactgaggcgattgccgtggtgcagcaaactgtgctggaacgtggcgcgcacggcatcggcgtattacttagcgaagaggcgcctcacgggcatcaggcgctgggcggcacggtgctgcccaccaatctgggtttgggcgctacgtttgacccgcagggggtgcaggaagcggaagctgcggttgccgcagaactggccgccagcggcattcatatcgcattggtatccggtttggacatcgcccgtgacccacgctggggccgttgcgaggaatgcttcggcgaggatccgctgatggctgcccgcatgtgcgaggccatcgttaccggcatgcagggtgagcatcgcagcaaggtcggccacgggggagtggccgtggtgctcaagcatctggcggcgcaaggcgaggccgtgggcggccgcaacggacagtccgccgtactgggcccgcacgatcttcatgaaattcatctgccgccggtggccgccggtgtgcgcgccggtgccttgggctttatggcagcctacaacgatatcgattctgtaccttgctgcgccaacccgtggctgctcaaggattatctgcgcgaccagctcggtttcgacggcatcgtgatggccgatggcctggccgtggatcggctcgaagacatggccggctccattcccgcggcagggcgtgccgcactgctcgccggcgtggacgtctccctgtgggatgaaggattcacccgcctcgaagaatatgcggatgacgaacaggtagtggccgctgtcgacacggccttgcgccgggtgctggaactcaaagccatgttcggtctcttgcccgaagacggtgccgataccgccgcaattgccatgccgagcgccgacgccatcgcgcaggccactgcggatgggcgtgagcaggccaagcgcatggcccgcgaggcgataacgctgatcaatgatggccagtctgccgccacgctcgacgatatccgcagcgtcatagctgatgctcaagccggccctgtgattgtcgccggcccgttcgccgacgatttcggctgcttcctgggcgattacaccgcccctctgcccgccgatgaacagtcaagcgtctaccggcaattggtggcacgtctcggggaggaccgggttctcttggccgccaagccgagcgatgcgccggccgatcaatgggcgcgtgcgtcgaccgtggtattcgtatgcggcagcaccagcgaacgcagctatgacagtgaattcgacgacaatggcgcggcgaaggccgtaaccgaatacggtgccacctgcggcgaaggcgtggacttgtctgacatccgcctgccctggcgtcaggatgacatgctaggcgaagtcgcggcattgaccaccgctccaattgtttcggtggcggtgtgcggtcgcgcgcatgtactgaccgatgtgctggaacgctccgccgtgacgatctgggccggatatgccggccaatatgggccgcaggccgtagccgacgtattggttgacggagccgacatgtctggccgccttcctgtgaccttacccgcatatcccgcagccattcccgttcgatacaatgaccgccaaagtgccgcgcatgtctacaaggatgcggcggaaccgatattgcgcggcttcggctatggatccggttcgctggcggcggtgacgttcagcgagatgcacgccgatacgcaatcgcatccaggtgaagtgctggtgcaggtgacggcacatgctgacgatcacggggccgcgggtgccgtgaatctgttcgcgcatgtcagcggcggccgccgcatcccacgtttggcaatgcttgtcgattcggtatacatggacttgaacgcgggagagcgtcgcgatatcgcgttccacgtgccgtgtgatcgtctgcgggatgtcggtgacgggcaagttcaggtgacctgcacgctggatggagattcgacgcatacggtcacggcgacgctgccgggggaatattaggggggcatgtatgaatgtggggtgcgaagcactggaaccgcatcacacccccggatggagcctgaaaccgcaaggcatccatcctcgcaacctgcaagtctgcgggttgtcacccgatagaggaaacaacaaaggagattatatatgtgttgctcacaaggtagtgaagggcgctcgtccatcggacgcagactcgccgccgtcgcggcgggcgtagtcgccacagcactgatgctcggatgttcgctggccatgggaacggttgcgaacgcccaggagggggattcccccgttgcggcgtcgcaggagggtaacggcaacaagcatttcatggtgtattaccgcgcatggcgtgacgtgaccatgaaaggcgtgaacaccgatttaccggatgacaattggatctccatgtacgacattccatacggcatcgatgtcgtcaatgtgttcagctacgttcccagtggccaggaagcggcggcccggccgttctatgacaagctcaagagcgattacgcgccgtatctgcatgcccgaggcgtcaaactcgtacgaggtttggattacagcggtgttatggtcgacggtttcaagacgtggattgctcagcagggcaaaaacgtcgatagcgcgaccgaatcggattatgacgcgtacgccgatcatgtcatcgaaacgtacatgacctcggttggcctcgacggtcttgacatcgatatggaaactttcccggatgccgcgcaggtggcgatttccgatcaggtcatcacagccctcgccaagcgcatcgggccgaagtcggataacccggaaggcacgatgttcctttacgacaccaatggcagctacactgctccgtttaagaacgtttctgattgcttcgactatgttgcctaccagcagtacggttccgattcgaaccggacggccaaggccgctgccacctacgaacagtttatcgactcgaccaagttcgttcccggcctgaccttccccgaagagggtgacatgaataaccggtggaacgacgcgaccgaaccatacctggacagtcatttctatgatgtggcctcatactcgtacgaccacaatctcggaggcatgttcgtctacgcgctcgaccgcgacggacgcacctattccgacgatgatttggcacacatcaaaccgtcgaatctgatttggacgaagacagccatcgcacaaagccaaggcatgagtctggaaaacgccaagcaggctgccaaccacttccttgaccgtatgtcctataccaaggatgttccagccgaaacgcgccaaaccgtggcagcggccactaacctgtatgaggtgaacaaggcggtgctcggcgcggattggaacgacggatacagcaacacatatgatccgacgctcgaactttccctgacctccatcgacaccacggcacttaccggtgccatagccaaggcggatgcattgctagctgacggcgcaaccgataccgatgtgcggacaacgctgaccacggccagaaacgcggcggtcactggcctgaccagcaagctgtataccggagctgacgttgtctcctggacggcatcgctcaacaccgcaatcgcagatgcaacgggcggcaagcccaagccgcaacagccaggcacaggcgaaacggacaaacctagttccggtgacgcaacacacaacaagccacagtctgcaactggacgtctggcaagcaccggttccgatggcaccgtcgtgctatcggtcgccgtgattatgacgctcgccggtatcagcgtattcgcagtccgccgccgcggataacaccggttcgaatgaaccgaaaaacagtatttgggatacggcgcgatatgcgaagcgccgtatcccatggcccacatcggtagggacgaagtagtacgcagacggttgatctccggcgtaagccggaagaagtcaaaggagattatagatgagattgtcactaggcgatcccgctgggtgtacttctgcccgggctcaacacaggaaatggctgtgcagcggtctggccgcggtattgtcgatgaccacgctggcggcgttggccgcaccggccagcgccaccggcacaatgccatgggggtgttcctatgtttttgtcaactccttggggagttgacgtgtcgggattccggttggctgtcgtgggcgcgcttcgccctgccggtggcgtccggcgtcctttcccgtgtggcccgattcaggctacgagggctggctcctggtagaggacgccgtttttgagcatgctgtagattacgtcgcagcgtcggcgcgcgaggcagatgacagcggcgttatggtgcttgccctgttcgcgtttgcgcttgtagtaggcgatggacggcgggtgtttggcggacgcgacgaacaaggactgccacagcgcgttcctgaggcgtttgttgccccgtctggagggtctctcgcccttgatgctggtgccggactggccggtggccggatcgatgccgactccgacccgctgcaggccgacttcgactacggtaaggactacgaggcggtaccacgcttcaagtacaccaaggtcggtggttacgaaggcggcgattcgctggtgctgagcggcaagctctccaacgacaacaccattcgcctgtacaagaccgacctggatgtcgctgccggctccaagattgacctgacctacaacaagctcaacagcgatgattccaagttgcagcttggcctcatccttgccgacgaccccgagaccgtggtgccggtggacgtgacggacggttcggcaggcaacggctggaagaccgcgagcgtggacctgtcccagtacgcgggtaagaagatcgccacgctgggtctgatcgtcaaggccggagccgattgacaactaccaggtgaatatcggcaagctcaccgttacggacggcgcggcccacacgcccgccgccccgacgaacttccaggtggaacgcgcctatgcgaactccgacgagctgaccgtcaagtggaatctcgccgactactccaccatcaagaactacttgctctacctggacaataccttcctcggcggccgctacgacgacaccctgtatgtcaagcacctgcccgccaagaccggcacgctcaagcgctacgccgtgggcgcggacggctcgcgttcgctcgccaccgaagcgccgctgaacgaagcggcggccgtctccgacgtgaaagtcgaaccaggcaaggacggcaacgtcaaggtctcttggaccaatccgcaggtatccggcgagaaaaccgtgaccgtcaaatccgacaccggttcgtggcgttacgccgcgaagccgtattcccagaccgtcaaggtcgccgccgacaagagcaaagtgacgattgccaatgcgccggttgacagctcccgctatgtggtgaacgtcgataatgcaggtggcactaccgctacggcaacaggtgcatttgccgatgccgccattgagccgtatccggcttgctcggtgatctggaatggcgataatgtgacgttggcccgtcctgagactcaagactggcgctacctgtacatgaccgagaagtggatcggcgagaatggcaagcagcagcaggagaaccagctgggtgctagctacacctactcgcagaacactccgccaatcactggtattatccgtggtcgtaccacacctgcctcatacaccaggtccatcccccgccagtcatgaactgcgggtgcaggtcgaggattacagcggcaacaagaccgatccggtgaagattccgaccgccgacgaactggccaagtgcacggtcgccgaccccacccagccggatgccaagaagtccacgctgaccgcggtcgacggttcggccgtggccgacggcaaggccatccgcacggtgcaggcaacggtcaaggattcgttcggcaatccgctggccaatgccgaggtggcgtttgaactgcccgaaggcgtctcggccattggcggaaacaccaccgtcaagaccgatgccgccggcgtggcttcgctgaacgtcgtgtccacgaaggtcggcaagtacacggtgaaggccgtgctgaacggcaatgccatcggcaagggcgtcaccgtcgaattcaccaaggtcgcggtgacgccgaacaagcccggcgaccagaacaagcctggcgataccaagccgaacaagcccagccagaacgacaacaagaacaatgacaagaatggcgcttcgttgagtgccacgggttcgtcggtcattgcgattgtggcggccatggtggtgctgcttgccacgggtgcggtggtacttcgcgctcgtagcaagacggagtagttcgtcgcaatacgggtgttgatactcgtgccataagcgggatttaggggttgcccaatgggtgcccccctaaatcccgtttgttttgtcgcaggacatatgccgagaccagtgactaaaatgctttagttatttgactaaaattattgatatcataagagttagcgcacggttgatgcatatggcccaatgcgggggtgccgtcaaccgtatcgcaatagtcgcaatgcggtcgtaaaaaggagtgttcatgagatctgctcgcgaggcatcgtcatcgtctgacggcacgcagcgtgtgagcctgaaagacatcgcagatgaattaggcatctcgcagaccgcggtatccttcgccatcaatgatcggcccggcgtttccgcggaaaccaaacgtcgggtcaaagaggctgcagccaggctcggctggacgccggtctacgccgcacaagcactgggatcctcgaagaccatgaccataggctttgcccccgcacgatccacgcaggggctcacggatgaaagcttcatgctgcacttcatggcgggtgtgcacgcctcgctcagccccaaaggctatggtttgctgtaccgcccatgccgattcctgaacgaggagatgagcgtatacaaggattgggcgtcgcgcaagcgcgtggatggcgttatcctcgtcgatttgcgagccgatgatccacgcccggaattgttgaagaatctgggtgtgcgcgcagtgcttgccggaggacccgacccgaacaattatgtgccgtcactgtccatcgatgattcacgcacgatgggaaccgtgctcgaacatttgtcgtcattgggacaccgccgaatcgcctatctttccggcgatccgaacctggattattcacaggggcgtgtcgcggcgttccgcgcatttgccaaacggcgaaagctggaattcatcaacatcgaattcaccgattttgttgcggaacaggccgcgatgctcacgttggagatgctgcattcaccgaagccgcctaccgcgttcatctatgaaacggagatcctcgccgcggccagtcttcacgccatggccgaagattattccgctcggcagatggaggcgggggagggccatgcggaagtctatccgaatgggctgcccgccattgtcagttttgaagacagtttcatttgtgaggcggcgtatccgtcaattaccgccgcgcatcgtgatgccagcgaatacggtgccaaagtggccaaactgctgctcaaagtgcttgccggagagcaggtgagcggcaaccggcgaatcctcaccccgaaactggtgattcgggacagcaccgccaagcccatggataccatggcgtagaacggtcattgcatcggcttgcagacaatgacatgcgaccagtacggcgttggcccccgtattccacgggggccaacgccgttgagaaagaggaagaaaaaaggatatagaggcttagatgctgtcgattattcagcgttcttcacggccgtcgcaatggacacggccgggtccaagaacggaatcagcgtggactggaaggcgtggtacagatcggacttgcccggccagaccgtgccgatcacgtggttgtttttgtcaagctgatggaaccaggaaccgccctcgtggtcgatgacatgctcatcgacatactgggcgaatgtggcgtaccagttggcgtacatctcctcgccggtggccgcatacagcgtggcggaagtgttcaacgattcggccagcgtccaatgcatgcgatcggtgaccacgggcttgccgttccagtcggtcgtgtaggcgagtcccacggtgccgtcggcgttccatgcgtcggccacggcacgcgcgaacagatgctcggcggcgtcgacgtacggctgtgcgccgtcaaggttggcgaaggagcttaacgcccactgcgtgatcaagcgggcccattcgatgccgtgacccggcgtggcgccgtacggcttgaactgatcatccttcttgtcgacgttgcattcgaggtccagcgaccaatcggacttgaaatgttcggggatgcgccactcgttgtgcttcgcccagccgatcacatggtcgatgatgcggccggcgcggacgcgataggtgttgttcccggtggcgtcggccacggccaagaacgcctcggtggtatgcatgttggcgttgagaccacggtacgggtcgagctcggtgaattcggtattccaggtatcgacggccaaaccgatttcgtcatcccagaaatgcttgtcatacgtggcaagcgcctcgtcaagcagttccttggcacccggacgtccggccagcagggcggaggacgcggcgagaatcacgaaggcatgcgcatagcagaccttgcccggcgcatgggtgccgtccgcgaacacctgcgggtaccagccgccgtgctcgtcgtcatgcagaatgccggtcaatcccctgagcgccgcgtcggccagctcgcccgcacccgggtatccgagcatggcaccaatcgaatacacatgggccatacggctggtgatccacgtctcgacgccgtgggaggggtcgagggtgccgtcggcgttcagccagccggaaccgccatccggcgctgggaagcccttgccgaacttcagcagctcgtaggtttcggaagccatgaaaatgcggttggcttcggtgccgagtgcataccgtgggttattggtcataatgattgttcctttccttaacgagaacatgcggtgggtgcgcaatgagcattcagcgggcacgtcttagtgcttcacacgaatgtcgaaatagtccatgaccagttcacaaaacatcatattcgaccagctgaaccattcgcgcgtgtacttggtcggatcatccacgtcgatgccttcgtgcatgagatgtgtaccggcgtcggtggttacaagacggtcgaggatatgcgccttgaagtccttgctgtcgctggtcatcgcctcgatagacagggcgatgggccacacatagcgcggcggggtgtgcggtgagccgatgcccttgagatactcgccctcgtagtagtacgggttttcgtcgctgagcagcgtgcgtcgggtcgccagatacgtcggatcgtccggtgcgcagtaccccaagtaaggggccgccatcaaggagggcacattgctgtcgtccatgatattgacgtgacccaggccgtcggtctcgaacgcgtaaatcgtctcgccattgcggttcgtcgtcttggcgtggttttcgatgccttcggtgatggtgcggcgcagctcgccggcacgggcggcgatatcggcgtcatccagaatctcaccgccgaagatgcgttccagatagcccatcaccacggcggcgaacatgttcgagggcaccagatagtggtaggtgcaggcgtcgtcgctggggcggaagccggaccaggtcatgccggtgtacgccactggcgaccccttgccgtcattgctcagcgattcggtggggatgtccgtgtcgcggatgaagaaatacggggagcgttcatgatgctgctcggtctcgaagacgtcaagaatcttcttgacgccggcaatgaattcggcgtcgaagtgatcggcgttgccggtgttcgcatacagcatccaagccaactggatggggtagcacagcgaatccacctcgtacttgcgctcccaaagccaagggctggagaaatcggaccggtcgtccttgtcccaggaggcgccgttcggttcctcgttgaaggcattcgcatacgggtcgatgatgatgtagcggaactgttgccgtatcagaccggcgatcaggttcgcaatatcgctgtcttcggcggcaagggccagatacgggcgcaattgcgcggtcgaatcacgcagccacatggccgggatatcgccggtaagcaggaatgtggtgccgtcgtcatgccgtttgaccgtggtggtcagggtgtcggcaaagcaggcattgaagttctcggcccaggcggtgtgttcggtgccacacaggtccgtgatgtgctgcatgaaatccgagaccgacttcggtatcgcggtggtcgtcataaattcaacttctttgtttgagggatatacatatcaagggaacagcattattctaaaccgctttagttcatgacacgcgaaaggatgtgaagagcatgagtgtgagcgcaccatatgaaaaaccggtgagatttcctgttcggagaatctcaccggttgcgatcagtcgattcgtgaagtcgcacgaatggcggataaggggatgggtggattacttgccgatttcagccagatagtcgggcatctcggccgggtactgcggccaggcaccggcctgggtgcagacgtaggcggcggtgttgacggccttgcggtgggcttctgccagcgtgtcgcccagcaggatgcgggcggtgaaggtgccggagaaggagtcacccgcacccacggtgtcgttcacctcgacgtgcggagtgtccagcgtggagacctcgcccttgcgggagatgatggtggagtaggcggagccggcggtcagaatcacgtagtcaaggccgaattcctcgatgaaccagcgggaggcgtcttcgccggaggtgccgcggatgtcgaacatgtcgcgcagcagcaggagttcctcgtcgttgatcttgaagacggtggccgccttgaggagttcctcgatgaggtccttggagtagtggtcgccacgcaggttgatgtcgaagaacttcatcgcgcccggcttggtgtgcttgagcagctccgtgatggtggcgtgcgattcgggggagcgcagggccagggtgccgaagcagacggcgtcagccttggagaccacgtcgatgagctggcgggtgtacaggatgtggtcccaagccacgcccttgacgatggtgtactccgggatgccgttcttcagcgcgacctcgacggtggaggtcggccaggcgttgcgctggatgacggtgttgatgccggcctcgttggccttggcaatcagttcgtcgccgagctcatcctcgccgaccgcgctgatagcccagccttcggtgccgttcttcatcgcgtggtaggcgaagttgacgggggcgccgccggctcgcttgccgctcggcagcatatcccacagcagttcaccgaggctcagaacgatcggggtagtcatggttggtttcctttcctttgtttcttttaccgggtgtttcgtatggaacatcttgtgatgtcggcgcttggtttaggagacgtcgaagaacaccgaggggtgttcgaggaattgggtcaccgccactgctgcggcaccggagaccgccgcgtcggcggacagggtggataggctgatggaagtggaggcattgatttcggggatggcccgttcggccaccgtggcgcgcacctcatcgagcagtatcgggccggcttcggacacgatgtcgccgatgatgatgtgctcaggattgtatccattgaagatggtgacgcatccgtagccgacgtatcgggcgacttcgcggacaatggcgattgacgcttcgtcgccgtcgccggctttggcgaacagggcgcgggcggcttcggtgtgggtcatatcggccgcgccgggaaccacggtgccatcggcgatgagcatgtcgtgaatggcgggggtggagcagtagcgttcaaggcagccgacgttgccgcaatcgcaggggcggccgttgacgtcgatggagatgtgtccgatttcggtggcggcaccgaggaagccgttgatgagacgaccgttgtcgatgacgccgaggcccacgccttcgccgaccagataataggcgaggttgccgtcggcgtgcaccgacgggtcgaagagataatgtgcgagggctccggcgcgggcgtcctgttcgatgaacacaggcacgcggaaagcggtggcgaattcgtcgatgaagttgattttgcgccagccctgcatgctggacaccacggcggtgcggcctacgttacgcaggtaggggccgggcaccgccatgccgatggccacaatggacgggtcgttgtcaagcagttgttcgacgcgctggtggatggtgacgatggtgccgttgatggtgttgccgtacaccgtgggcaggttttcaaagctcagggtgttgccgcacaggtcgaacacgccgatctgcaccagcgagcgggcgaatttgatgccgatgatgcggaaccgcgtggtgtcgagtttgagaccgatggaacggcggttcttggaaccttccaaatcgccggtctcttcaatcatgccggcctcgataaggcgtgcggtgattttggtgatggccgcgggggtgagttccagtgccttggcgatttgcgcgcgggagctgatgccgttgtgatacaggtgcttgacgatgcgggagcggttggattcggagacactggcttgggaagtggcatgggtggtgtttgttgccatcggtcttaagtcctccttgtctgcaccgttgcgagttgttccgctcgtctttgaatctgaacttgattaagatattaacgctgttaattgattgacgcaatcaatatgtcattcggtgtgtcgtgcatgtgagtgtcgtcttgggggaatttgttaagatggttgtcaatagtcggatgcacactgatatcaagcgaaacgttcgatgaagaacaggggaggactgatgtctgaaaacactatgaacaatctcaaaatcggtgttgacgtgggcggaacaaaaatcgaagctgtgctggttgacgcaatgggcacggtattgggttccgcccgtattcccgccaggcatggcaacgatgccgtgatcgaagacatcgtcgctgtagcacatcaggcagcgggtgagcgttttgacgaggtgagggccatcggtgtcggtaccccgggcacggtggattcggccagcgggcatgtgggcaatatcgtgaatctcgacgtggtctcgctggatatggggccgttggtctcgcagcgttcgggcgtgccggcccatgtggaaaacgacgtcaatgccgccgccgtcggcgcggccaccgtattgggcggtgcggacggcatggccggtaccattgcgttcctgaacttcggcaccggactggctgcgggcatcgtcgaaaacggcgtgctgatgcatggctatagcggcgcggccggcgaaatcggccatatcccagtcgaacctcatcgcctcaagtgcccttgcgggcaatacggatgcttggaaacagtctgctcgggcgcatccgtggggcgtctgtggcccaacgccgacccgccgatgcccgacctgattcgtcgcgcgaaaaagagggaggccaaggccgtcgatgtgctggacatggtagtgcgcgccatcggcgacaccatacaaatcctggctcagtccgttgatccgcgactcatcatcttgggcggtggcatggccaaaaccggcgaaccattggtcgaggtgatcacggctgagctgcgccggcgcgaatcgcaatgccgattcctcgaaacgctggacctgccggcccggctgcgtctggcacctgtcggccaaccagtcggagccatcggtgccgccatggcggcgtagtctggcatagtgccggggcatgggagatgaggcctcagatttgtctccgaggccccatctcccacgcagtcctatatcgctttatgtcgtgctgtgccgcgcttggtcttgcgcgtttcgttgccggggtgaccggcttttatttggccaagtgttggaagaccacggcgatggcctcgccctgtacggtgatgtcaggtccgcattcgcagcgccgaatcaccgtgtgtttgtggaaggacgaggacgtggcggcatccagatattgctgggccgcgccgatgaacgtcgcgttgatgatgttcggctggccatagacgcatacgtctgccatatccaaaaggcccacaggcatggccagggcttggccaagatagcggcccgcccgagcaaggataccctgatgctgctccatgtctgccgcgctgagttgcttcttcaatgcggttccggaaatcatcgtctccaagcaaccgtgcttgccgcaagggcacagcggcccgtcaagatcgatggaaatatggccgagctcgccagccgcgtgcagttcgccgattaccggcgtgtccgagagcagaatcgccgaaccgatgcctctttcgatgcgcacgaaaagcatattcggcccgccttggccaaagaaacgttcggtgagcatggctgcggtggcgtcgttgctgacgtttacttcaagtccgaaatgttcggcgattggcgtggacaggtcgagattgttccagccgcgcatcgtggaggagcggaccacgccgttgtctaccacgccgggggaggagactccgatgccgatgacatcgccgtcggacatgcccagcatcttctcgataagttcgatgatcacatccacggaaacgaatgagccggtgttcagggtgacttcggcgtgacgcagcggctggccgagcagattggtgactgcgccgtgcagcaggtgctcctgcgtcaggtcgatgctgatgatgcgcagtcga

SEQ ID NO: 372 - DNA, 5999 bp, Unknown
  R42_10m  MAG No. k141_34469
aattacttcaacccgataatcgaggtgcggtttttgcaggcgtaccgactactccagctccaccgcgccggtgtagagctgatagtactcgcccttttgcgcgatcagctcgtcatgcgagccacgctcgatgatgttgccgtggtcgagcaccatgatcacgtcggagttgcgtacggtggacagacgatgggcgatgacgaagaccgtacggcccttcatcaggttatccatgccggcctgcacgacttcctcggtacgggtatcgatggaagacgtggcctcatcgagaatcagcgcgggcggatcggccaccgcggcgcgggcgatggaaatcagctggcgctgaccttgggacaggccggatccatcaccctcaagcaccgtgttgtatccctcgggcagcatacggatgaagctgtccgcattgaccagacgcgcggcctcaatgcattcctcatcagtggcgttcagacggccataacgaatgttgtccatcacggtaccggtgaacaggttcacgtcctgcaacacaatgcccaaagacctgcgcaaatcaggcttcttgatgccggccacggagatgccatcatacagaatctgaccttgctggatatcgtagaaccggttgatgaggttggtcacggtggtcttgccggcaccggtggcgccgacgagcgcgatcttctggccgggcttggcgaaccaggtgatgtcgtgcagcaccggcttgtccgggttgtagccgaaggtcacgttggtgaagcgcacgtcgccgcgcagcagcgtataacgcccatcaggcgaggtgatcgcctgctccttggccttcatcgccacctcgcaggcggaaccgcgcagcttttcggcggccttcagagacctcataccatcgtcgccgatctcacgcttccacgcccagtggccggtctcatggtcgacttcggtcatggtgcggccgtccggcccaagttccacgttcacgagcgtcacggtgcccttgtcttcctcgatgggttcgtccatcaacttgaagatgcgggaggcgccggcgagcgccatcatcaccatggtcagctgctgggagacctggccgatcgggttgatgaacgagcgggatagggtcagcagggagacgagcgtgccgagggtgagcggcttgacaccggtcagaccgatgtcattgacgccggccagcgaaacggcggcaccgacgatggcgagcagaatgtagagcagatagcccatattgccgacgaccggcatggtcacattgccccaggtgttcgcctcggcggacgcctcaaagagttcctcgttcttctcatcgaaggtcttctgagtggcgtcctcatggttgaagaccttgatgaccttctggccgttgacggattcctccacgaaggcgttcacgtcgccgatccactgctgctgcttgacgaagtagcggccggaacggctcacgatcttgcgcacgatgaaatacagcagaacggtgaacacgattacgaacgcggtgaatggaatggacagccacagcatggacagcaatgccgcaatcgcggagataatcgaggagaacatctgcgggaacgactgcgagatggcctggcgcagcgtatcggtgtcgttggtgtagtggctcatgatgtcgccgtgctcgtggctgtcgaagtagcgaatcggcagcttctgttggtgggcgaacatatcgtcacgaatcttcttgagcgtgccctgttcaacggtgatgatcagccactgccaagcccaggatgccacgataccggccacatacaggcagcccatcagactgatggcgcgcagcaacggagcccagtcggggttcgattcccccaccatcggcaggatgtaggtgtcaatcagcgattggaggaacagcgcggatccggcctgcgcggcggcaccgatcaggatgcacaccacgatggcgataacgcgcaatttgtattggaagatgtagctgaagatgcgcttgatggttccggggtcggctttgcccatgtcaggctcgcgattcttgaaactctggtcgttgctcatcgtgcttctccttccttggtatcggctgcattggtatcagctgcgctggtatcggccgtgggcatggtcactgtcaccgtcacggtttcggacggctcagcggtagatgactcagcagcctgtccggcagcggccagttctccggtcttagcctggttcttggtctgggattcgtaaatggaacggtattcgtcgcaagtggtgagcagttcctcgtgcgtgccggaggccatgatacggccggaatccatgacaagaatcatgtcggattcctgcacggaggccacgcgctgggcaatgatgattttcgtggtgtccgagatctcgttgtggaatgcggcgcggatcagcttgtccgtcttggtatcgacggcgctggtcgaatcgtcgagaatcagaatcttcggcttcttcagcagcgcacgggcgatgcacaggcgctggcgctgtccaccggacacattggtgccgccctgctcgatgtacgtgtcgtacttatcggggaattcctgaacgaatccatcggcctgcgcgagctgcgcggcatggcgaatctcctcatcggtggcgttcgggttgccccacctgaggttttcggcaatagtgccggagaacagcacgttcttctgcaacaccatggccacctgatcgcgcagcgcctcgatgtcatagtcgcgcacgtccacgccgccgaccttgagcgagccagagctcacgtcgtacagtcgcggcaccagctgtaccagagacgactttgccgaaccagtaccgccgacgatgccgatggtcatgccagaacgaatcttcaggttgatgtcgtcaagcacgggcttttcggaactgtcggagtagcggaaggtgacgtggtcgaattcgatggagccgtcggccatgtcagtcaccgggtgagccgggttctgcaccgtgctttcctcctgcagcacctggcagatacgctcggcagaagcctgagaaataatcaccatgacgaaaatcatggacagcatcatcatggccataagaatctgcatggcataggtgaccagcgaagtcagctcgccggtggacaggcccaacgccgcattattgccggaagcgacgatctgctgcgcgcccatccatgcgatgagaatcatcgaggcgtagacgcacaccatcatgatcggcatgttgaagctcatgatgcgttcggccttggtgaagtccttgaagatgcgttgggagatgcggccgaacttggagacctcgaaggattcgcggttataggacttgaccacgcggatgccctgcaggttctcgtcgaccacgttgttcaacgcatcgtaggtgtgaaacacgcgctcgaacacggggttcacgagcacgaccagaccgcacaggccgatggccagaatcgggatgcaggccaggaacaccatggaaatcgacggggagatacggaacgagaacagccaggccacgaccaccatgatcggggcacgcacacccagacgaatgatcatcatgtaggcgttctgcaggttcgtcacgtcggtggtcagtcgggtcacgatcgaaccggtggagaaccggtcgatgttggtgaagctgaagccctgcaccttctcgaactggtccttgcgcaggttcttggcgaagcccgcgccggccacggccgcgtactttccggacaggaagccggcacccagcgaaaccatcgcgcacatcagcagaatcacgccgaacttgacggtggccggcatgctgccaccggtgataccctcatcgatcagcgaagccatgatggtcggaatcaggatttccagaataccttcgaccgccacgaacaccggagccaggatgctggctttcttgtattcacgaatcgaatgacccagcgtgcgcagtacatgcttaggtctaccgggttcgacggctttgcgcgcctgcgcgattgcctctgcggtatcgctcattcgttctcctccttcgtgtcagcaacctccgctccgtcttgatcgggagccatcaccacaggtgactgagggagcgtttgatgttcaaattcgcgttgtgcgcgctcgatgttcgcacgcatgcgtgcgacgtagtcgcgcagagcggccttctctccatcggagaagccgccgaccagcaaccgttcgacccggtcaccattcaccttgagatcagcgacgatcgcgtccgccttgtcggtcaggacgatgcgcttgcagcgcgcgtcatgctccaccgattcacaggcgatcaggcccttcttctccatcagggccagcacacgcgaggcggtggaccgggtgatgcagaattatacgcaacaattcatgataaagagacccatagacaacagttgtacatacaacaatcagcgtgttgtagtatttccggctcttccgattttggcgtgtaagggcatgtgtcagaggtgggtttggatggcgtgtctgaagccgccggcgtgcagcaggcttctggtgatggtggcgtcgaggttgcggaagcccagggccatgcccctgagggtctcgagccttccgctacggcaggtccttacgttcgaacacccacatggtctcgtccgtggatctgttgtcggtaagaatcgtcaacatgaaccgctcaccgtcgttcttcacgtaaccgcattgcactgcaccttccgacttgagccggctacggacgacatcgtagtcaagcagtcgcaggagaccttcttgatattcgggagcaatcctcacataacaaaactcacgtaatgcttcgcggaaggaaccgccatgaccatcaagcatacgctgaaagaaatcgggcaccatgatcgaacgctgcgtatcggtattcagattgactataaatgacaccggataacgtacattcagatgttcaagcagcattttcatatcctcatcgcgcaccagaatatcctcaagctggttgttgagcatgcggagctggcgtttgcctccgccattgacgtaataccgtttcttgtcctgacgcatacggatttccgcctgattgatgaggtccggaaggccctctccatcatcggattcggccatgcctacggatatatcccaatcaccttccaggaaatcccgacgcatacgcgccatccgacgcatactttggctcaccgtatggttgcagctgacaatcacgaactcatcgcctccgatgcggtagatcctgtcgtccccgaagcaggcacgcatcgcattcgcaagtccgcacaacgccgaatcgcccttggcatgccccaaatggttgttgatttcatgcagtccgatcatgtcgacgtacaccaccgtcaacggcttgtcatgcgtggcctggatgtactccaaatcgtcatcgtaggcattgcggttgagtagtcccgtaagcgagtccctgcggtaattatcggcatcgccgcatgccaatagtcccatgggcagattctgtccgaccagcaccacagcccaagggtcggatggggagcatgcgtgagcgggaaccgccgcgaatgcgactacgccggttttggccaatatctcgctgcggtatatccccagcacggtttcctgcctgtatagccgttcccggatcgaagacaaattcagatcggcgaagaatcgtccggcatcgtcaggatgcaccacccggttggcggtcaccgcacgcatgtaggcgccgaattcgtcgacttccggatcgggaatcaccccatcccgtttgatgacacggtattcgcctgtctccacattcaaccgggatatttccgccagaccatcagccaggatttcaaaggtgtcggccgccaacgcggagactcccaacagcacccggccgttgacggtcacatgaccgcgatgcaggtaatcgcacgacatatcccaatagtgccgaccgtcggcacgctcggccaacagcgtttccatccgtttcaccgg

SEQ ID NO: 373 - DNA, 9219 bp, Unknown
  R42_10m  MAG No. k141_35364
accatacttgaaaatatgacgcgtgggccctgacgacctctcaaagaacggcatgacaccaccatacgaccagcatcgccgcgtacacaatacacatcacacgcggccggcaagaaaaccgcacaactcctgcgccaccggtagcatctgcgactccaaaccggggttcatgaaacggtcgtagatattccacctatcgcacagggacacccacagatacgcccgccccgaagcaacaatcacattggagtgcaacggatgagcggacaatacctgcaacacattctgcggcggccccaccaactgtggccgaaccgcatgccccaacaaatcgcttaccgagcaccacgcatacccccctgcgaacgagccggcacaggcaacaccaccacctgcatataccgcatggcgtaattactcaaaaagccattattgtcatacacattcagcgtgaacgtcagccacggtcccttgctgtagaacctgttcacccgcatattacgcacggcttcgccacgaagcaccaccgtgcttccagcatcgacggtccgtttggcctgccaatcacgcgcatggaccgaatacgtgaccgaagaaactccgggagccggctcataacggatctcaaccagcacaggaaccccgaaaccacggaaaaagcccaacacatcatcgcaatgcaaacgcacgccaccacgaacgacgcgatgacgccgttgcgataccaataccgccacgtcggccacatgcgctgcctgacacggaccatacgccagccgagcaacgaaccagccaccacgaacacgcaccagacaacaatgccgtaccggaaaaccctacccacccagaaaggaaaaccagatttatcagcattcagcagccacagcacgccgacgaacaccacggcctccagcatgtaccacggccaatccaactgccgacgaacaaccgcaccggcaacagcatccacacgatcccacatcatcaaccttctctcatcaaaaaccgcttcgtaaggcaaccatacagtcagcagtacggacaacaagccggctatcacacgtaccagcacagctcctgtgccacacaagcagcatctgcgactccagcgccaggggccatgtaccgcgaatcattgtcgcacacattgatcggcgtccacaggcaagccaggccattcgtcaccttcatgctgtcatgatttccgtggaaggccggggtgagcgctgcagaagcgcagacgatggccagtggggtctgttcgtccgtccgccatggacagtggccggccgaatacagcctcatgcctgtgggacggcacgcggatttggccggtttccgcgcggcgtcccgcaggaacgtgggatggtagagaaatcaatcgtttgacgttcgtggcgttccacactatcaaccgccagaaccgcgcaatcacgccaatccccgttacggaccataatcatcccccgggctctctgcgggacggcagacgaaaaaccgcgaaatccgcgcgtcgtcccgcacttcgcccggtccacgaacaggacaagcatcaccgatagaccgaacacacatctacagccgcgacaagaaccccaacagctagccgcccgccccggatatcgccgtccaatagtaaatcgagcccaaaacgcaaacccaaagcactgactcagataataaaactcggattttccaccacagacagcgagaaactctcccctataccaagtagcgtacatgccaccttgctcgatagacgaacaatgagaagtatcggttaacgggcatgccgggcaggtcgatgggctctggcgcgggaacgaagacggcgtaccagcacgaatgggccggcaaacgtgatcgtatacaacacgacggcgaggaacacgctgagccatgcggtgaacatgcccaacggcatctcctctaccggagtggtctcggctatgcatgcaacgatctatcactccgatgttgtggtcagtatgcgcggcagttgttcgtcacggttgaggaaagaacgcgtttggcaacgaagtagcgtacgccggccttcctcagtgcgggtgtataccatggtgcaatgcgtcaggcagcggtccaactgccggcgcagtatttcggcgtcctgctggcggcgggcaaatatggacgggaatgggaagcttacaccatacgtgcgcacgccccattccttgccgatgatgacatatcgcggattgttgatgggcgcgagtagctccttcataacgccggcgaacagcacctgctcgcgccgcgaaccaccaatcagcatggcacgcaacgccgtgaatctgcgacgtgtctggcggatcgaggaagtcactcacctctttgcctaccgcgttggtttctaggcgctcaggttccgcagtcgccaaatgccagacattggccaccttatcggggtctgcggccacgctgcggttggcggccatgctgtatgcttcactgcatcagtgtaaggcatgaatcaataggttttgagccccagatcgatggtgagaatgatgccggcgattacggcggcggcgcgcatgatgtttgcgggaatcttgcgggtgatgggcggggcgatgtacccgccgatgaagcagccgatgtacagcatgatggcggccggccaatcgaccgcgccttggatgatgaataccactgaggcgctgatgttcgcgcctgtgccgatcagggttttcaatgcattgatcttgtggaatgggccgattttggcggcatcaagcatggcgagagccagggtgccggcgcccgcgccgaagtagccggagtagatggcgactgccaccacgcccagccatacccaccaggaatcctggctcatgggctgcacgagttgttccggcgggcggtgaggtgcggtaggggtggttgcgcgcttggcggcatcagtggcatcggtggcttcagtggcttcgatgtgcttgagttgcgcggtggcatccgcggcggcctgcttggcctgcatgcggccgcgcggattgatggcgatgatcagcgagctcagcaaaatcagcactggtgcggcgaattcaaagacactcgggtcgagtttgagcaacagaaacgcaccggccaccccgccgaacgcgccaatgaccacatacgtaatggagcgtaccgcttggcctttgagttctttgcgcgcgcccatcacgccaccgatgcccgtgccgaccacgccaacggtgttagaagcgtttgccaatacaggcggaatgccgaacgcgagcaaggccgggtatgagaccagtgacgatgcgcctaccgcatagcccacgaatcctgcgccgattccggccaacagaatcagtagtaatgaagttatggaaaagcccgcaatcattccccgtatccttgtcgctcatcgaccggcacattgccggccttgagcgagaatacgctgttgaggattggttgcgggttttatgttggaatgtggacgtagctcctcgcggaagcgattccctcagtcgcctgaggcgacaactcccctcgcacccgaggggagccagaaggaaatcagagcgcttcgttgtattcgcgaaccttgagggtgcggtgggaggatgccacgttttcgacgatcagacgcttcagggcgttgtcggcggcaatgtgctcgtccagccaggcgtcaccgagcttgaccagcgtggcgggatcggcgtaacccgggtacaggccgttgagcaaagcctcggccatgtggtaggtcttgttcgcccagatccagtcgacggcctcgaaataccgggcggcgaacggctcggccagatcggggcgcggggtggcggagaagccacgggccacggcttcgagctgggagttggtcagctcgtcgttgtggagtgcctgatcccaagcccattccttggcttgcgtcgtggccatggaggcgcgggcgccgtaggcgaactcgcggttttccgtggtctccttcttggcgagctgcgcgtccacgtcgtcgttggtcatctcgttgacggaggtgagcgcttggacgatggtccacgtgaagttgttgtcgatttcgaggccttcaagacgcacggtgccgtccagcagaccgtgtgcgttggcggcgaatgcggcatcgccctcctcgccatagcccaggtaggcggtggcgagctggaactgggtgtccgagccggcttcggcggcgttggccagggtccacagctcggcggccacgtggcgcagcacatcgtcgcggcgggctggcgccacgtagtggtgggcggtggtgctcatgcaggccagcgcgtaacggaaggtggtggattcggtttccgtggccagaagacgcagggtcatgtccacgaagcgttcggccgggaattcgccgtcacgggtcatatcccagaaggcgagccaggtcacggcgcgggccagggcatcgtcgaaacgatgcaggttggcttcggcgaatgcctgggattcggcgtcgaaacgaatcttggtgtaggtcaggtcatcgtcgttgaccagcacgaatgccgggcgcggcttgcctgccgcggcctcgacgatggtggtttcgccatccacgtcgagttcgaactgctcggtgcgcacgatcttgccggtttcggcgtcttcgttgtagaagccgacggccaggcgatgcggacgcagcaccgggtgttcggccggcgcgctctgggtgagcttcaattcggcgatggtgccgtccgcgtttacggtcaggccggtggcgatcgtgttgatgccggattcctccagccacttggcgctccaggccttgagatcgcggccggaggtcttctccagttcgctcagcaggtcggccagagtggcgttggagtaggcgtggcggttcaggtagttgtggataccttcgaagaactgcgtgcggcccacgtagaatgccagctgcttcagcacggaggcgcccttggcgtaggtgatgccgtcgaagttgacgtaggtgtcgttgaggtcgttgatcggggcgacgatcgggtgcgtggtgggcagctgatcctggcgcaacgcccagctcttctcaccggagcagaaggtggcccaggcgtcatgccattcggtggcttcggcagtggccagcgtggaggtgaattcggcgaaggactcgttgagccacaggtcgttccaccacctcatggtcacatagtcgccgaaccacatgtgggccagctcgtgcagcacggtcaccacgcggcgctcggccagcgcgtcggtcaccttggactcgaacacgtaggagtcacggatggtgaccatgccgatgttctccatagcgcccgcgttgtattcgggaacgtagatctggtcgaacttggcgtacgggtagggcacgccccaggtcttggcgtagaacgcgaagcccttcttggtgatgtcgaacaggtagtcgacgtccttcgcgaaggccttggccaacgactgtcggcagtactgggccatcggcacggtgcgaccgtcttcgttcaggtattcggtgtgccattcggcgtacgggccggcgcagatggcggtcaggtaggagctcatcaccggggtcggctcgaagtcccacagacgggtgctttcgttcggcttgtcgccgagggtgccgtcgagggtttcgcgcggatcgtcctcgatggtggcaaccggcatgttggaggtgacgatccagctggcgggagcgagcaccttgaaatcgaaggtggccttcaggtcaggctggtcgaacacggcgtagacgcggcgcgcgtccggcacctcgaactgggagtacaggtagatgttgccatcggacgggtcgaccgagcggtgcaggccctcgccggtgttggagtaacggcacttggcttcgacggtgacctcgttcttctccttgaggtcggtcagttcgatgcggttgtcctggaaggccacggctgggtccagggacttgccgttgaggtcgatggatgtcacttcgtcggcaatcaggtcgaggaaggtcgacgaaccaggcttcgcgttgaagcagatgagcgacttggaaccgaagttcttcgcgccgaccgtcaggtcaaggtcgacgtgataatgaatcggcgcttcgataacggccttacgttcttcggcttcaatacgagtgagattagaaccgggcatgacttcaattactccttacggtcgtccctggataatccggactacttggtttctacggtttcgacgtcctgggcgatgtcggccacgacgggcacgatcatcggcttgcggtgcagctggcgcgcaacccagctgccgagcgtgcggcgcatggtctgctgcagcttgtaggtgtcacgcgtgccctgcatcatctggtcgttgagctgttcgacgatctggtgacgcaccttgtcgaactcgctttcgtcctcggccacggcgttcaggtagatcttcgggccggtgacgacctcgtggttgtcggtgtcgaccaccacgaacgcggatacgaagccctcggtgccgagaatgcggcgcttttccagctcgtcatcggtcagctcgccgacggaatcgccatcgacgtacacgtaaccgcacggcacggagccgacgaccgcggccttgccgtgatacaggtcgaccacgtcgccgtcttcggccaagaccacgttctgcgggtccacgccggtcttgacggcgatcaggccgttggccaccaggtgacggttctcgccgtggatcggcatggcgcacttgggcttgacgatgttgtacatgtacagcagctcgccctcgttgcagtggccggacacatgcacggcggcgttgtcgcggttgacgaccttggcgccgagctgcacgagcttgttgatcaccttgtagacgccgtgctcattgcctggaatcagggagctggcgagaatcacggtgtcgaactcgttgatgtggatgtcgcggtggttgccgtcggcgatgcggccgagtgcggccatcggttcgccctgggaaccggtgcacatgaagacgagcttgtcgtcctgaatgtcgttggcctgcttcaggtccacgacggtgccttcggggatgtgcaggtagccgaggtcggcggcgatggacatgttgcgcaccatcgaacggccgacgaacacgaccttgcggccgtacttgtgggcggcgtccaccacctgctgcacacggtgcacgtgggaggagaagctggcgacgatgatcttgcgggtggcctgggcgaacgcttggtcaagggccgggccgatggaggtctcgggcttgacgaagccgggcacctcggcgttggtggagtccatcatcagcaggtccacgcccttttcgccgatcttgccgaattcgacgaggtcggtgatgcggtggtcgagcggcagctggtcgagcttgatatcgcccgtgtcgatcagggagccggccggggtcttgacgtagacggccagggcgtccgggatggagtgggtgacgttgacgaattcgaggtcgaaggggcccaccttgagcttctcacggccggcaacctcaaccttggtggggttctggtggtgttccttgcacttggcgtccacgaaggcgagggtcagcttggagccgatcagcgggatgtccggacgcagcttgagcaggtagggcacgccgccgatgtggtcctcgtggccgtgggtgagcaccagggcgtcgaccttgtcgagacggttcttgatgtagctgaaatcgggcaggatgagatccacgcccggctgctcctcctcggggaagagcacgccgcagtcgatgagcagcaggtgaccgttgtattcgatcacgttcatgttgcggccgatttcgcctaagccgccgagcggcgtgatgcgcatggagcccttgcggtacttcggcggggcgatcagcacggcatcctgctggggtgcggtggcctgccgggtggcgttgatcttacgggacggcgtacggctgttggatccgttggcgttgcggccgcgcgcggaaccgcgacggcgagaattcgtgttcttgcttgttttcttttgttcttgtgccataacctttttgggatttctgttgtggtgcctctgctctgtcatgcaggggcggcgggctggcaacccgtatgcagcgtttcgggcttacagcagtccggcagcgcgcatgccctcttcagccttgtcaagctgagtggcgtcgggaccgatgttcggcagacgcatggtggtggaggggataacgcccttgaccttgagcgcagccttggccatgacggcctgatagccgtcgccattcaacgcgtggacaaggggggcgagctggttggcgaggcgacgggcggtggtgatatcgccgcgatcgaatgcctggacaagctgctgcatggggttggaggcgacgtgggcaatcaccgaaatgatgccgacggcgccgatggagaggaacggcaggaacaggccgtcatcgccggaataccaggcgaggccggtgcgctgctgcttctccactgcggctgcaagatcgccggtggcgtccttgacagccttgacgtgttcaagttcggccagtcggtcgtaggtttcgaccttgaccttcaagccggtacggccgggaacatcgtagacgatgatcggcttttcggcggattcgtcgacggccttgtagtggccgacgataccgtcctgcgaggggcgggaatagtaaggcatgacgacgagcaccgcgtcggcgcccgcttcctgagtctgttcgaccatacgcacggtgtgtgcggtgtcgttggagccggcgccggaaatcaccggaacgtcgacgacctccttgacggccctgaccagctcgaccttctcatccatatgggtgacgggcgattcaccggtggtgccattgaccaccagaccatccgcgccatcggcgacgaggtatttggcgagcttctgcgcggcggcgaaatcgacgctgccgtcggatttcatcggggtgaccatagccggcagaatgcggccgaaaggtgctggctcaagaaggtgcatgtcatgctcgctcatagtgttcaccgtacttcccattgtggactcttatactacgtaccttgattgttgctgaatgcgtggcattatggccggagccggtggcaatgccgtgatgcgcgtcccggcgcgcttccctgcctgaaatgcgggggcgactactggtcgactgcgggtcgattac

SEQ ID NO: 374 - DNA, 9154 bp, Unknown
  R42_10m  MAG No. k141_36643
ccggaactgagctatgaggcgggcttcatgatcaccgcccagtcccgcagcttcctcatgctcatgagcgacaaaaagcccaagaagcccatgggcctataaccagaccgaatttaagctccctctgacgagggagctcccggtatagccgggtgagggagagaccgcagcaaagccgcgaacccctactcgcgccccttacgctcctccacgagccgagcatcgacatgattcggctgatcagcacccgttttgaggtgccgatggcggaatcctgccatatcagcgtcgaacaggccgaggactgcatgtcggcgctgttgccaaacctcaagcggtggcggcgtcaggacgagatcgatgcggtggcggaaggggaatgagcgatggcattcgattataagaaggagtataaggacctgtatcagccgaagaggatgcccgccatcgtcacggtgccggcgatgcggttcgtcgcggtggacggtgtaggagatccgaacgaagaaggcggcgactacgccaaggcgatgcaactgctgtacggcatttcgttcaccatcaaaatgaacaagaagtcaaagaacccggacgagcacattgacgggtacttcgactacaccgtgcctccgctggagggcttatggagcatggagaagggtgtgcccggcgtcgattacacgcgtaaaaccgacttccattggacttcgatgattcgtctgccggaattcgtgaccgatgaggtctttgcgtgggccaaggcatcgtttgccgccaaacatcccgaagtcgacatcaatcgtgcatatctcttcgacttcgatgaaggcgtggtcgcgcaggtcatgcacaaaggcccgtacgacgacgagcccgcaaccgtgacgattctggacggctacgcgcgctcgcaaggctacgggctcgacttctccgacgcccgccgccatcacgagatctacctatccgaaccgcgccgagccaaaccggaaaatctcaaaaccatcatccgtcatccggtagtgaaggtgggttgactttcggcgaactgctcgaagcgctcaccgcgcagtagcgcgaacaatctgccggaatcctcaccgtggtcaaagagcgctaccaagaactcgataagcaaaataactagaagcactggttcctctcggagagattctgcccgagcgaccttataaatccttgcgcgggtcacctttcccggtgcaggaagcatccaggctcatgtgcattgatgacgccgatggattgcagataggcgtagacgatggtggtgccgatgaatcgcatgccgtacgtcttgagatccgctgcgatggcgtcggacagaggggatgtagtcatgcctgtctcgtagatgacgtgacggccggtgaaccgccaaatatagtcgtcgaaactgccgtacgacgtctggatatcccggaatgcgttggcattgccgaccgtcgcgacgattttgcgacggttgcggatgatgcccggatcgttcatgagttcggcgatcttgttctcgtcatagcgccggatccgttcgatgtcgaacccatcgaacgcctgacggaaacgctcgcgtttgttcagtatcgtctcccatgacagtccggcttggaaggtctcgagcaccagcatctcaaagaggtggtggtcatcatgcgacggaaccgcccattcggcatcgtgataggcaacatagacgggattgctgagattgcaccagccgcagcgtgggttcatgtcatccatgtgttctccctatggattgtcggagacggttggttttagccgttagtgtgatgtgcgattcagtataatcggatttttactccagccgtggataccgtgaactgaaatcgatgtctgtgttcgcgtcgccatgctgatttgaccctcacatgatgtcatactttagcctgtaaccatgaatgaccggcaatcacacgacatggacactccggcggagcgtatttcccatctcaacgtaggggatgtgtcgcggctgacgaacatcagtattcgcatgctgcggcattgggacgaaatgggtctggtgtctccgcaacgcgactggaatggataccggctgtattccgattcggatctcagacgactgcgcaggctgctgctgtacagggagctcggcatacccgtgccgcgtatcaagcagctgctcgatgccaagccgagtgaggtaatacgcgagttggcggatcgtcggggccaacttgcacgcaaggcggaacatatcaatcaggcattggccgatatcgatcggcttatgaacgttgcacagaaaggaatcgatatgaatgatgcgacgcagcaatcccgagaatgggccgaagaagcgcagagccgttggggcgggagccggcagtggatgcaggttgcggaataccaggtgaggagaacgtctgatatgcaggagcgcgacatgaagcaattcgaagccatcgagcagcggctcgccgatgccatgcgtcacggcgtgaagcccggcagcgatgagggcaatgagctggcggaagcccaccgtcgttccttggtatggttcgatgtcaccccgtcaatgcacgtgtgcctcggccgcatgtacgtggccgacgagcgtttcgtacagcattacgatgctttggaaccgggtttggcccagtggctgcttgcactgattgaagccaacgcgacaagattcggtgtggatctcgacaatttgacgtggcagtgagatgtgatcgggaggtatcggaattatcgtgacatgaatgtcgttccggtcagttggctcacgaattggctcacagcgtgtgagggattgcgacgatccatcgatcataccgaaaccattggaatcacaaggattacaggcaccaagctgcgttaacagaaaatgttaacggattcagccaatccgttaacactggaattgtgttagcaaacgcccccagagcaaaaaagaagaagccctacatcccaagtgggagtagggctttcattgtcgggctgacaggatttgaacctgcgacgtcttgctcccaaagcaagcgcgctaccaaactgcgccacagcccgttttcatgccttaaggcataactttttaattatacgcaccgagtgggacactctgtaccttcaggcacccaagggatcaagccctgaaacatccgcaaactcggaggtctgcggtcattgttaaccattgttaacggatgccatttttcagtttttaccgaagtcccaaaacctaagcggcagtaggcctcagcgagggtcatagttttgctggtttggtatcatcctgctcccaaagcaggcgcgctaccaaactgcgctatagcccgatgtgccattaaggcacgaggaatcattataaacgacgctggatacattgcgtgtcgagcatatgaattcaaaaaggttctggattctcttgatagcttatgagtgacatctttattcattgatgctctacaacgactaggtttggatctgcatcgatatccggcgcatccgctggactaacaaggaccgtgcaaacgatgtggcccccgacttcctgcgaggaagtcgggggccacatcgtttgcacggtggactatcggatcaattctgatcagatcagctcgaggtcgacatcgaggctgatcggcttgtccgccgggatatggtactgggggtgcaccggcgacatccaggaatcatcgccgccaacgcccatctgtgcggcaaggacgcgcaggaacatgtgcttcggcttcggcagctcgtcctggtgctgagcctcctcaagcatgaagctggagtacggcaacaggcttaccgcgaacggcgcggcaccatcggcgcggctgacgcgcatgccgtggccgtgatcgtcggtaatctcggcccaacgcacatcctcatggttgcccgtctcctgcggcatgaggtacggcgcatgatcggcgaaggcgttggtgctccacacgccgagcttggcgtgcttgcggtccaggtacgtctcctccgggccggtgccgaagaacctcaggttcgtgtactgcacaggcagcgtccattcgatgccgaacgccgggatggtgggcaggtcaccctgctctccagggtattcgacgtgcaggttcacgcggccatcggtgtgggccgtgtaggagacggtcaccttggtgcgctgcgcggtggcgagctcatacgtgtacgtgcccttgagcgtgctgtcgtcgatctgctcgagcacgttgtccacgcagcgggcgtagcggccggcgcccagccactggacgcgctcgaagccatgaccggcaccgcgatcgttgtcggtcagcggacggaaggtggtgattgcgggacggcgcagcacgaactcgttgccggcgaaggtgtaggagaccatgccgccctgggtgcgcgacagcaggacctcgcgtccggcgcctcgcacgccagcgttccaacggcccacggtgatggtcccatcggccggcttcgcgtcgggcgtcgcggtggcgtccgcgggcaccaccgcctgtccgaaggcaagctcgtagccgctctcggcccaatcggtcgccttggcgagacgctgcgaaacctgcagcaccagttcgcgggcgtcggcgcggtacgccgccaccggccatgcgacatcgaacgtgcgggtctcaccggccggcacgtcgaaacgccgggtggactgccagaccggcttgccgtcggcgagaacgctcaggacgaacacgtagtcgctggtggcggtgaacaggttgtcgttcttgacggacaccgagtccttcgtcacgtcgatgtggacgttcgagtacagctgcttgacttcctgggccttgggggacggcttgcggtcggcgaacagcaggccgtcgccggagaactcgtagtcggacggacggtcgccgaagtctccgccgtagcgcaggctcctggtgccgtcgggctgggtggcgtagatggcctggtcgatgaagtcccagatgaagccgccctgatacttcgggtagcgttcgagcgccgtgtattcgtccatgttgcccacggagttgcccatggcgtgcatgtattcgcaggagaggtacggcttcttcgggtcgtccttcaggtacttctcgatctcgtcggcatgcgagtacatacgggtctcgatgtcggtgacgtcatcgtagtcacggttgtgggtcacgccctcgtagtgcaccggacggttcgggtcgatgtcgtgcacgtgcttgtacatggcgcggaacacgtcgcccacgtaggattcgttgcccagcgaccagatcagcacgctcgggtggttgtagtcacggcgcatcatgctgttgacgcggtcgacgcaggcgccttcccattcgcgcttgctgcccggcacgatggtgtcctcggtgaggacgtctccgggcagggaccagctgccgtgggcttcgaggttggcttcgtcgatcaggtagatgccgtactcgtcgcacagttcgtaccagcgttcctggttcgggtagtgcgaggtgcggatggagttgatgttgtggcgcttgcagaagaccacgtcatcgatcatgtcctgctcggtgatggcgcggccgcgttcggcgtcgaactcgtggcggtcggcgcccttgaacacgatgcgcttgccgttgatggtcaggatgccgtcctcgatgcggaagcggcggaaaccgaccttctgggacgtgcattcgatgacgtcgcccgcttggtcgatgacgtcgacgtcaagttcgtacagcgtcgggctttcggcgctccagggttcgatgccctgcagcggctcgctggagatcgcggtctgcgcctccgcgtcgcccgtcgtctgccacaccgtgttgccgtcggcgtccttcagggtcgcgcggaccgtggccgcgtcggccgcgttgagcacggtcagcgcggcgtcgagggaagcggtgccggcctcgggatcccaatcggcttcgatttgcgtgttctcgatgtgcacgtgcgggcgggcggcgagttcgacggagcggaacaggccgtgcagacgccagaagtcctgatcctcaagccaggaggcgctggagtattcgtagcaggcgacggccacgacgttctccccgtcgtgcagcagttcggtgatgtcgaactcattgggcgtgaagccgtcctcgccatagccgacgaacgcgccgttgacccacacgtagatcgccgtggccatgccgtggaacacgatcgacaccgatccgccggcctgcttggcgtttgctacggggacggagacggtgaacttcctgcggtagagcgcgacgtgattgttctccgggatgttcggttccaacgggttctcgtggccgtcccacggatactggacgttcacgtacttgtggttcatcagaccggccgtctgcaggtggcccggaacctggatacgctcgaacgaggagtcgtcgaacgactcggccgtcgcgggttcctcttcgaggttgatgtcggcggcctgaacgacctcgacccgccactcgccgtcaaggctctgcttgagatcggaccattgtccgctctgggggtcgcgggcgtaccacttgtggctggaatgggccggagtccggttcacctcgaacaccgtcgggtcggtcagccaagcctgcgatgcgcgatcgacatgtgtgacgtctgtcatgctctcctgctttctgtcattacctcgttgtgaatgatattatggaggaggtcggggcctcctttaccgaaaagaataaacagtttttatataaaacgcaaatcctgtttaccgcttccaaatcactggcactgcttgccgtcgacgctacgccgcgtccatgcaatgtctcggttcagcccatgttatcccatccttgcgacacgctgtttatctccttgtttactaatgctttttacttttggtgataaaacttgtatgcttactttacaaaatcaatgagtgattccatgctctgggttcttaaggagaagattaatgagcaacgaaaatgccgcggacggtgacgtccgcaggaagagtgggttaggccagcgcatcgcctacgcgttcggcaacctcggtcaggccgccttctacaacgcgatgagcacgtacttcatcgtgtatgtcaccagctgcctgttctcgggcgttgacaaggcgcttgcggccaagctgatcggcgtcatcaccagcctcgtggtgatcatccgcatcgccgagatcttcgtcgatccgctgctgggcaacctcgtggacaacaccaccaccaagtggggccgtttccgcccgtggcagttcttcggcggactggtctcctccgtgctgcttgccgtggttttcagcggcatgtttggcctggtgaacgttaactccacattgttcatcgtcgtgttcgtcatcacgttcatcgtgcttgacgtgttctactccctgcgtgacatctcctactggggcatgatcccggcattgtcctccgactcccacgaacgttccacctacaccgccctcggctccttcaccggctccatcggcggcaacgccatcaccatcctcgtgattccggtcgtcacctatttcagctgggtgttcaccggcgagaacgccgagcaccagtcgggttggaccgctttcggcatcatcgtcgcggtgctcggcatcatgaccgcctggaccgtcgccttcggcaccagggaaaaccaaagcgcccttcgcgccaacgccgaagacaacggtggtccgttgcaggcgttcaaggccgtgttccagaacgaccagctgctgtgggtcgccctgtcctacctgctgtacgccatcgcgaacgtgaccaccaccggtgtgcttctcttcctgttcaagttcgtccttgacaatcaggccgctttctccgcgaccggtgtcatcgccatgatcgcgggcctggtcatgtccccgctgtacccgattctgaacaggtacattccgcgccgctacctgtacatcggcggcatggtctccatgatcgtggcttatgtgatgctcgccctgttctccagcaacatcgtcctggtcttcatcgcgctggtgctcttctacgttcccggcacgctcatcatgatgacggtcatcctctccctgaccgactccatcgagtacggccagctgaagaacggcaagcgcaacgaggccgttacgctttccatccgcccgatgcttgataagatcggcggcgctctgtcgaacggcatcgtcggcttcatcgcccttgcggccggcatgacgggtgacgcaaccgccgccgatatgaccccgacgaatatccacgtcttcaagatctgcgcgttctatgccccgctcatcctgatcgtgctcagcctgctggtgttcgtctccaaggtcaagatcaccgagaagatgcacgcgcagatcgttgacgagcttgaagccaagctcgcttccggcgagatcgtcgacgatgaggcgcagaccgtggaggccgccgaagccgccgcagccgccggtgatgaggcgcaggcagttattaagaactgatctcccgttcccatccctcccataaggcccgtccgcctgaaccgcaagatgcggtccatagcggacgggcctgttcgttcctgcgatcggcggtcatgtccaggcccatgcccatgctggttcgggccttgaggtcggagccggcggtgtgtcacctgtcggcaagtgattatctaatagagatagttccatgctctggattcttaaggaggagactaatgagcaacgaaaataccgcggtcggcgacgtccgcaagaagggcgggcttggccagcgcatcgcctacgcatgcggcaacttggggcaggccgccttctacaacgcaatgagcacgtacttcgtcacgtacgtcaccagctgcctgttcgtcagctacagcaaggctctcgccgcccagatgatcgccgtcatcaccggcctgatcgttgttatccgcatcgccgagatcttcatcgatccgttgctgggcaacctcgtggacaacaccaccaccaagtggggccgtttccgcccgtggcagttcatcggcggactggtctcctccgtgttgatcgtgctcatcttctccggcatgttcggactggtcaacgtgaacaccacgc

SEQ ID NO: 375 - DNA, 74638 bp, Unknown
  R42_10m  MAG No. k141_37135
catcaaaccccaccaaaccaagggacagcccattgcgcatcgaccgtagcgtccgccccgaaccgtacactcacaggtggttttgtgattccatagcgtgcagccaaggcagtacgattgccggtttatccgcacgcacaggtacctacgccggttggtaaaccttacattccatacattgcaaccgaacgtttaggagcatgtatgcctgagcagcatattgataacgagaagattcccacacgtcttatcggcgcgattgtggctgtcggctcacttgccttcattggcattctgaccgaaaccgtgatgaccgtgcttttccccgcactgatgcgcgaattccatgtcgacacggccactgtgcaatggattaccacgatttatctgttggcggtggccgctaccatgcccatcagctcgtttttgaagcgccgattcgcactgaaaaccatttttcttgcggctgtgattctggccatcgttggctcgctgatcatgatcgtcgcccaagccttcccgctgctgattgtcgcccgcattattcagggcattggctcaggcgtggccacgccgttgatgatcaacatcattctggagcagtctcctcgttcgaagatcggccgattgatgggcgtaggatcgctggtcattaccgtggctccggccatcggcccgaccgtcggcggcgcggtgaccacagtgctgccgtggcgcgcgattttcgtcatcgccattccgctggtgctaatcgcagcatgcatcggcatgaagtgcattgagcagaagacaccgaccgaggctgcctatcttgacccgattcagcttgggtccattgttgtcgcgttggtcggtctggtgctggcgctcaaccaaggtggcgtggccatcagtgcggcggtgtccggcaagtcagccacacgctccggcattatcgccattgtcagtctgattgtgggcctcgccttgttgatcgtgttcgccatgagttccaagcgtgccttctccccgctgctgcgccttggcattctcaaggatcccgccgtactgttacacgcctgcgcatatctgctgctgccattggtcgccatcggctacggctatgtcatcaccaatgtggcacagctctcgctcggcaccacggcatttgtggccggctctctggtgctgcccggagcactggtcggcgctgtctgtgccccgcttggcggctggttctacgataagttcggcgcggtcaagccgattctgattccgatcggcatcgctattttgggcccagtgcttatgctggtgttctcgatgcagcttacgcccgtgctgctcgccggattctatttcattttcggtctgttctattccatcggcaatgcgaatgtgatgaccagtggcctgtcggaggtctctcccgagttcaagccggacggcaacgccattttcaacacgtgtcttcagtttggcggcgctgccggtaccgcactgttctccacgattctttccgtggctcaggccggcgcaggagaagaaggcaccgctgagtttgctcacgccactgccgtcggcggcacatggacgtttgccacgatgacggttatctgcctgattggctggtgctgtctggccaccgcgttccgcattcgcgcctcacgccggcgcgcctaagaccgtcagtccgcggcccgcgacgcctcccgcccggattcgtcaccgtgcagtatcgggcgaatcttggcaagacgctggctgacttcgtgttcatagccgcgatcgttgggatggtagtactcggtgccacgcagctcttcgggcatatattcctgtggcgccacggcaccgggccaatcgtgcgcatacttgtagccctcgtggttgccccactctttcataagcttggtgggggcgttcctcaaatacagcggaacagcgccgatcttgccggcatccacgtccgcgagtgcctggttaatggcgttatagctggcatttgatttgggcgcggtggccacggcaatcgtggcttcggccaaaataatacgtgcctcgggcatgccgaccagcgccacggcctgcgccgcggccacggtgacctgcaaaatctgcggggcggccatgccgacttcctcgctggcggcaatcatgatgcgacgggcgatgaagcgcggatcttcacccgctttcagcatgcgcgccagataatggatggcggcatccggatcggagccccgcatggatttgatgaatgcggaaatcacgtcgtaatggtcatcgccgtctttgtcgtagcgcacggtggcggtgtccattaccgtagccacgatttcgggggtgatgatgggtcggcgtgcgccctttttgcgggcttcgtcgccggtgaccgcgccagccgcggcctccagaatcgtgagactcttgcgtgcgtcgccaccggccatgcgcacgatatcggcgatggcttcgtccgtggctttgacctcgcccttgagaccgcggtcatcagtcagcgcgcgctgcaccagttcggtgagctgatcaggctccaatgactcaagcttgacgaccaccgaacgggagagcaacggtttgatgatggaaaagctcgggttctcggtggtggcgccgataaaggtcacgtcgcggttttcgacggcgggaagcagcgcatcctgctgggatttggagaagcgatgcacctcgtcgatgaacagtacggtttcccggccgcgtgacacgagccgttcgtgagcgcgggtgagtacgtcgcgcacgtctttgacgccggaggtcacggcggagagttcctcaaacacgcggccggattggccggccacgatggtggcgagcgtggttttgccgacgcctggagggccaaacaggattacggagctcggcgcggtgagactgcctttgctggccggattggcgaggcggcgcagcggcgagccctggcccaacacctgcgtttggccaatcacctcgtccaaagtgcgtggacgcatgcgcaccgccaacggccgtgtcatcgactccggcgcatcagccgccccaaacaaatcgttctcactcataacgtcctatagtaccccagtgttcgaacagacgttcgagctgcaccttggcttccctcagagaggggagccaggaatcagttactcaccttgtagtcgtggaagactacttcgccggtgtcttgggtggcgtcaaggtccacgatgccttcgatggcccagtcgtggtcgccatcggaatcatcgataatctgacgcaccttccacgtatgctcgtcgttctcgtgcttgtcatccaacatgaacagttcgggcgagcgtgcttcggcgccgatgcccacgtactcgtgctcgtcgtagtagtcgtcgagcacatcttcccattcgtgcacgccgtagccccagtccttgtcgagcgcgccgagcttgtccggctggtcgaggtccataagctgcacacggcggaacatggcgtttctgatcagcacgataaggcctcgtcggtcctcgaccaccgcgttcttcttgcccggcgccgccaaggaggccgccgcctcggactggtcggcggaatcgccggcgttctcccattcatccaccagcgaggagtcgatggagcgcacgagcacgcgcagccaggagatgatgtcttcgagttgctcgtcacgcttttcgggcggcacggtgcgcgccagcgtgcggtaggcgtccgagaggtagcgcaacagggtgccttcggagcgggcgatgttgtatcgggtgatgtatccggtgaagtcggaggcggtttccaccatgtcgcgcaccacggatttcggcgatagccagtagtcgttggcccacggcacatcgtggcggtactgatcgaacgcggcttcgagcatgtcttccagtggcttcggatacgtaatctcctgcagcttatccatacgctcgtcatagtcgagtccgtcggccttcatatcggccatcgccttgtctcgggcctgacgctcctgggcacgcagcacctgcttggggtcttcgagcgtggcctcggccatggagatcacgtccagcgcataggtgtcggactcggggtcgagcagttcgagcgcggccagcaggaacggggagagcggctggtcgagggcgaagtcgtccggcatatcaagggtcatgtagtagtccttgccgccgtccttgcggccctcggtttcgatgacttcggtatcgaacagggtttggaaaatctcgtcggcccgctggtgcagatgctccttctggtcgggggtctgcgcggaatcgtcgatgagatcgtcgatacgggcacgggcgtcaccgccctgcgccacttcattgagcaccatcgaatgcgtgattttcaggtgcgggaccagggtctccggttcagcgtcgatgagcttatcaaacgtgctctggttccaggtcacaaaaccttccggcgccttcttgcgcttgaccttcttgagtttcttcggatctcccccggccttggcgatggctttctggttttcgatttcatattcgggagcctcggcgatcaccagtccctcggtatcgaatcccatacggccagctcgtccggcaatctggtggaattcgcgggcgcgcaggcggcgcatcttggtgccgtcgaacttggtcagggccgtaagcaccacggagtgaatcggcacattgatgccgacgcccaatgtatcggtgccgcaaatcaccggcagcagaccctgctgggcgagctgttcgaccaggcggcggtagcgaggcagcatgccggcatgatggatgccgacaccggtgcgcagcagtcgctgcagaatcttgccgaaggctgtggtgaacttgacgcctttgatggcttctgcgatggcttggcgctgttccttgctggatacaccggtggaggcgagcgcttgcgcggtctccaatgcggcgtcctgcgaaaagtggaccacgtaaatcggggtttcgccgttgcggaaggcgagttccacggttttttccatcgggtcgagcgtgtattcgtagctcaacggcaccggtcgcggcgcgtcggcgattacatccacgtccggggtgtcgttcagatcggagagcttgtcggcgatggcgtccacattgccgagtgtggcgctcatcagcaggaactgggtctgcggcagcgtgagcagtggcacctgccacgcccagccgcgctccggatcaccgtaataatggaattcgtccatcgccacgaggcccacatcggcatgggtgccttcgcgcaaagcctgattggcgaggatttcggcggtgcagcagatgatcggcgcgtccgcgttgatgtggctgtcgccggtgatcatgccgacattgtcgcggccgaacacttcgaccaagtcgaagaatttctccgacaccagcgccttgatcggagcggtgtaataggagcggcggccagtgcatagggcggcgaagtgcatgccgagcgccaccagcgatttgcccgaaccggtcggggtattcaaaatcacatggtcgccggccaagaggtccataatggcctcttcctgatgcggccacggctcgatgcccttgacgtcttccacccagccgaagaaccgttcgtagatgtcgtcggccgtaagattccgttcgcgtccgtcgccgtcccattcgggggccagccgccccagggatccgtattccttctcgtcagtcataatgctcagtctacctagtggcctattccgacggcacgagccgccctccgtcgctatgcgacgcctcccgccagcgggcggagccatgcgaagagctgtgccatgcgcttggctccgccaatgggaggatcgctcacgccaaccggcggcgcacctcgtcggggtccacctcgggttcgaggggaggccaggtcatgttcatgttcttcaaggtggtgcgcagcagttcggagaccacggctcgcgaataccagcggttatcggccggaacgaggtaccacggtgcggcggccgtgctggttttctcgaacacttcctgccaagcgaacatgtactcatcccatcggtcgcgggcctcgaggtcggagatatcgaatttccagaacttggtgggatcatccagcctcccaagaaagtgttttttctgttcttcctggcttaccacgaggaagatcttgaggatggcgcatccgctggcggccagttcacgttcgaaatcgttgatctggtcgtagcgggcacgccatacgtcttcgggataggtgccatagacgtgcggcatgaccacatcttcataatgggagcggtcgaatacggcaatccaccccggcttgggcaattcacgcttcacacgccagaggaagtcgtggtcgagctcctcggccgtaggcttgccgaagccatggtaatggatgcccatcgggtcgccttggctgaacacgtgacgcacaatgccgcccttgccggaggcatccatgccttgcagcacgatgagcagccgccgtgtcgagcctttgacgccattcgcgtacatgagccgctggtatcgggcgatttcggaggagctgatcgaaatgaacttctcggcgtcctctttattgccgtcgaatccgggagtggaatcgccttcgacatcagtgacctgcatgccgtggtggaacataagacgttgagcgggcggcaacgaccatacggcgctgagcagttcactggatttcgccgcacgcgccagtcgttcaggcacgctggcactggagtcgatggtgtctatgcgatccaccgcgagctgtaataccttgtcgatccgtcgatcggttttggattcctttcccttgccgttcttgttgttctttcctgaggattttccggccgtaccccacttgccggcctcttcaggctcgttggttctgtcgtcgtccttggtcatgctcccgattgtacgtcttgtaactcaggagacctagcaacgtagcgacattcacatttcgcctgttactgcaaatctataggcatgcagtcgttcggaccgtaattgttggctttgcaccaattccaagcctcatccgtcgagtcgaagccctcaccggcaagaatcacatagtatttgtcggaattgctgctgtaggcgggccagtcacccgaccagataagcagtacgtttgaattcttgttgtgcatcgtgatgaattgcgcaagaatatcgcggtagttccaggtcttgccttcagcctccatacccttacgcttgctggacagctgtgcggtatacgtggaatagaacagctctgcggagtccttgtcgtgctcgacctgccaatccaatgccttgcttgcattattttcggcttcgtcatccgtaacgttgctgccgcttatcgcgcctggatcagacgatccccagcaatatcttctttccggcagacccaccggaacgcggctgcgcagcgccaccgttgcctggcgccgtcgacaatgtcgaagtaggtgcggtcgccgtgttgaaacttgggggcaacggcatcgaactcgctggcacctgctggggagcagccggtaccagcgttgggccatccatcgactgaggacttgggcttggcgcagactgtgccatcggcgcaccgcattccgtgcagaatcggcttccctccggcatctccgttccgcaaacctggcacttcatactctctccgttctctctcgtccctatcggccaatcccccgcccgttttgcagtacataaagaagcggcaaacggcccgaaacatacctgagctatcaggaagacggcacgatctgctacgagaaagagatcatcaccgaccggcaaatcgtcggcatcatgctgaagcatccgaccagcgcacgcggcttcaagcgctacttgcgcgccgcatcatgacgcttgaccacgatggtgacgccacccgcagcgaacagcgtcgccagaaccacaaccaacgcaaccgaggcaccggtattggccgtatgttcggtctgctgtggcttggtgctgccattggcattgacgctaccgctatggttgccgttatccttgtcgtccgtcccggtggacactccggtaacggcaacgggcagagcgaccgtggtcttattggtcgcaccggtcactgtcaggcttatatcaccggtcttggttccggcgggaatcgtgaccttgagctcggcggtatcgccattcgcaacctgtgcttcgccgaccatctgctcgccgatggtggcggtcagcttcgtctcgtcaggcacgcccagcgaggtgagcgtgagcttcgagaagtgcagggtgaacgagccaccggccttgaccgcaccggtcgggataccggtgacggccactgcacggcggtcgtagcgcggggcaaccggatcgttgtccttgagatagtcgatccaggcgtcgcggtccaccagaccggtgtccttggtgttcgtgccttgggcgaaggcgcggaagttatcgccgccctccaacaggaagctgaacgaaccgatacggtagttgcgtttcaggtccagaggctcaccgttgacggtcaccgaggtgatgtgatggccttgcgcggcatccggatcatacgtgtagctcacgttgtgggacagtccgagttgcagatacgcgcgcgatggcgtgctgccgtccgcgttcgtctgccactgctgttccagcgcttccttgaactgcgcgccggtaagcgtggtggtccacaggttgttcaggaacggcagtacagcgttggcctgggcgtaggtgatattgccgtcggcatcgagcgtgcaggcgtcattggtgccggacttgcagaattcggcacgcagaccgccggggttgaccacaccgatttcggccgcgccgcggtcctcgcctttgagcgaatcgagcagcgcatcagccaccagattgcccatggtcgattcggaggcgcggtcgtcacgcttgccgtccttgaatgcggtggtgatatccgcagacaccttgccgaccttctcgccgcccttttcatcggccaccttaagagcctggtacacgatgtccctcaccttggcgacagtcgggttcgcggcggcgagcaggccatcgttgtattcggcgtaatcgttgtagtgcggatcatttttgtcggcgggctgcgaagccacctgcacggccgtgttaccggacttgtcgtaagacaccgcaccggtggccgtgttgtaggtgagcaccacttggccgatgttggcggcatagctaccggtctggatgatcggccggttgttgtgcgcgggatcggtgtacgagtacttcatgtgggtgtgtgcagtgaagatcacgttcactgccgcatcggtatcgtccacaatcttctggaatacggggctggcggccttctgctcgtcaagcgtgggcttggccgtggcgtcatcttcattggaggctgcaccctcatggtattcggccacaatcacgtcagcctcgccattggattcgtcgccgtcggtgagttgcttggtcacacggttcacggcttccaccggatcgccgaattcgatgtccttgacaccaccgggagcaaccaacgtgccggtttcctgagtgaccgcaccgatgatgccgaccttcacgccgttcacctcctgaatgctgtactcgggcagagccggggttgtggtgcccttcttgtacacgttggcaccgaggtaatcccattgggcgttgcgcgcgccctccttgccgatcacacgatcggtaaggtcggcatagccttgatcgaactcgtggttgcccaccgccgaagccttgacgcccaaagcgttaagcacatcgatggtcggctggtcctgctgcacagaagagttgaacagcgaagcaccgatactatcgccggcggacagcagcagtgatgagtcagggtattcgcccttgagctgctcgatggtggcggcgaacggcacggtgaggttcttgtcgatacggccgtggaaatcgttgaagttcagcagattgatggtggtgctggcgggaaccggctgattggttgccatatagcccatacgcaatgaatggccattggtcacgccgtcgtctgcccagaacaccggcttgtacaccttgccatttactaccttggtggcttcggtatcaggggtgacggcaaagccttcggtgttctgcgtacggatttcatccggagtgtcggtcagcttggtcagctgcagcacaccgttcttgaactcgtaggtaccgattttggcaccggtgttcgcatcattgtcgctttgggcgagcagctggttgtgctcggcgtcccaagtcagatcgcgcgggccatcatagccggtgttcaccgcggactgcggcaggtcgatgtcggccaccggatgcaccaggtcctcatcattcacggtttgcagtgcgaaggcgtagatatgaccggttttctccagtgcggcgaagaacagaccgccgaaatcattgccgaaaccgtccgggtcgtaggtcattacgttcttcgggtcaaggttggattggaatccgttggcggtcaggaccgagtcgggaataaaggctatgccttccaccccaagattggcgtccgctccgtggcccagcgtcacgccgaattgtgtgagtgctgcggtgagattccactcgtgcgtagcggtcagctcttgcgctccgtcgccgttggcgtcggtggttttcgcggtcacgtcatactgcaggatggaaggccgcggcacattcttgttttcgttgtcgcgctcggcgccgatgaatatgcccttggatgaatctccgttgatcagcgtgatgccttcggagtccacaccgcccttgccgtccttgaagtgcagctgcttgccgcccttggtctgaccgttgttggtgaaggtccagccatcagtgggatcctgctgccatgtgccgttctggtagacgaacttgttgatggagccagggcccttatcagcggtgttgccgagcgtggggttcagatcgttgtcggccgcccacagcacgccttgcttgccgtctttaccggcttcatacaccagaccagacagattgccgtcagtgtggtcgccgccttgtcctttggcgccaaattcgccttcggcatccactgtggtcacatcggccaatcccgaccatgcgtccacggtcatggtctcgccggcgggcggagtcggagtcgggtcatcgaacacgttctgtgcaccgggcgtgggcgtatcggaaagcgcgaaagtgccatcgtccttacgggaccacgactgactgtcgctcatcttcttcacgccggttgtatcggtattccatgacgtggaatccaccacatcgctatcggtaaagtcgccgctggtagtggtcagataggcttcgtcggcatcggaacccaggccgggctcggccttgtcggggtcgatgtatgccaccagatatccgccggctttgatgacggtgtccgtattcgttacttcgctggtgccgatggtgtagtgcttcttggctttcttgccgctgtcgtagatgccccagcccttcacgtcaacgtctgtggagccggtgttcttgaactcgacccaatcgcaacgcttgctatccgggtctccggcagctttcgtattgccggcatagacctcgttgatgattacggatggtttggcagccgtgttctgttcggcagtggcctgctgctcgtccgcagccgcagcgggcacgccgatcagggcgacgctgctcagtgtcaccgcagcggtgagcagcgcgatggcgcgccgcgacatcgcggtgaaattgttggtgtggaacattactcccgttccttcctcgggttgtgccgccgcagcatgatgctcttcggcggatgacaccccgagagtatgagagagaaatgaagccgacaccgtatgaaggcaaactcggcagatctccaaactgaactttggctgaattaccgctgaagctggttcttggatttgcgtcgaaccgtccgtattccgccgacaatcgcgattacagcggtaccgatggctacgctgatcaacgccggtcgttgcgcggcatggagggtggcgagatccggcccggccgcaatggcgctgttttcacccgccgagccatcagacgccggatgattacccgcgtcggcgtactgggcattgaccacactcgggccggtaagcgccacctggtcggcggtctcgaccttggccacatcgccgtgcttatccaaggtgacgcgggcgcacagggctttggcccagttgatacgctgccagccgtcgctcgattgccatagggggtatccggaatccaaggcagtggctttcaaaatcgcgttgcgctgatcggcgtgcagttcgggataggccagtcgcagcacgtccgccgccccgcgcggtgccacgaaatcagcgccggactgggcggtgtcttgcgggaaggtgtaggtcaggcgtgcggtgtagacgcgcacggccgaggcctggtccgcgaccggctcggtggccaccgggtccagaaaatcgttggtgtagccgcccgaaccggaggccttggtgttggcgatgcaggcggcgagggtagtgccgtggccgtccgcggcgcagcgggacaccagatagtcccgcagctgccgggacgcgggcacgatggacgaagcgaattcgttatgccagtactgcccgttctgggcggatgcgccaatgcgaccgcccatgatgtcaagcggataatgcacgccgagcacgatgcggttgttgccggcctccgaagtgcgggccatgatttgcggcgcgagttcgggaatcatgccggccagcgcgataccccacgaataggcgccggtagtgtggccggaggggtaggaactgtttttctgcaagttcgagtagccgggcacgtgttcgagccatgagggtgattgcttgatgtcaagcgtggcgggcagtccggcgagatcgttagtgccgccgtagctgctttccgcacggttcagataggggcgcggatgcatggccgcacgttttgaggcgtaggtggaggccacgttaaaggagaagatatcggcgacggcgttgagtttcccggatttgagcccttcgctcatatatttgccaagcaccggaccgagcgcgtccggcatggcttcctcggcttgcagatcggagtcgacgagcgcacgcttgcgttgggcgttcaggccatccttatcgagattttcggcggctttgtggttaatggccacggccaaatcttcgtcgagtttcattgtatcggcgtcgagcaccttgccaccgtgttcggcatcggtgggggcctgccaatagttcttttcgtagtcggagagcaatgccacccaatccgggttgggcagctggtcggcctgtgcgattgcaggcgtcacggctagcgtggccgccaacgccagcggcgcaatggtcgcaatagcaaaaacggaggataggtgccggaacatcttcatatgttccaacctatcctccgtgaaggctacgtagccggagcccagtcaaacactcagtaaattcttcgtgccggcttagcggcgattgagctgactgtcaggcctctgactcgtcttcggacttgcggaacgccgggaattcgccggtttccgggtcaacctgtgactcgggctgggtggcgtcatatccctgttcgtagcgggtgcgccgccagttgcgaatcgaggcgttggtgccacggtgatgcacatggtatttgcgcggcgcaccaccaaacggcagctcttcgacttccttggccacagcgatctggttgacattggacgggtctccggcggcgatcggcgccacgggctcggcctcggtgggcgcggccgtgcgctgctgcatgcgcgaaggcagccattcggcgagcctcgacaacagccagcaggcgacgaagtagatcaccgcagccatgaccagcgtctgcaggatgttgaagtacatcgagccgagtcggcgcgattcctgcagcaggtcggtatacatgatgatcgagcctagggcggtgtccttcaacaccacgaccagctgggtgacggcggccggcagcatggcgtagacggcctgcggcacctcgatctccatcaacgactgtgtttcggtcaggcccaaagcgagcgaggcctcgcgctggccgcccggcagattgccgacgccggagcgcaccagttcggcgaccaccgaaccgttgtacagcaccaaggccagcaccacggcccaataggacgggctgggcaggcccgcgaacgcgaaccatcgccagaagaagatcatgagcagcagcacgggaaccgcacggcagaactcgacgatcacggcggagacgccacgtaccaacgggttcggcagcagtcggcccacgccgaacaccaagccgaacaccacggcacccaccacggccacgatggtggccttgatggtcatccacagtccgggcaggtagaagtcggtccacgcctctcgttcgacggcgggcttccacagctcccagctgagctggttctcgccgtccggcgggttgtgcaggcgcatgaggataaacacgagcaccaccgcgaacagaatgcccgcgatccagttgacgatgcgaatggtgcgccggcccttgggacctggcgcgtcgaacagcacggaattcgaagtatcggccatatccgtcacctccttacggcgagtttgttggacaggtacgtggtgagcatgccgatggggatgatcaggatcacgtagccgagcgcgaagatcaggaagatttggatgatcacgtcgggacggaattcgatcatctcgctcatcagcgaggatgtttcggtggccacggatgcggcggcggccacggtggagttcttgagcagggcgatcagcgtgttgccgagcggtgccacggagcctcggaaggcctgcggcagaatgatctcggtggcggactgcatgaagcccaagcccagcgctcgtgcggcctcggcctggccaatcggcacggtgttgatgcccgaacgcagagattcgcacacgaacgccgccgtgtacaggctcaggccggtgaccgcgagccagaagaagttcgtggtgaaggtgtcggagaagctgagcttcagctgcgcgtaggcacccagcaccatgaacaccatgatgatggtcagcggcaggttcttgaacagttccacatacgcaccggccacggccctgagcgaggaaatcggcgagatgcgcatcaccacaaggatcacgccgaggatcagggagaacagggcggaccatagggtcagttcgatattgaccagaaacgcgccgagcacgtcatactggctgaagagttccaggaatccgctcatcaggcctcctctccttcgtccggggtgggcgggttgtagcgtacgtcgggcgtgtagttggtgcccttggtgttatcgctgatggcgttctcccacgagccgtcctgaatcatgtccacgatggcgttgttgattttggtggccagctgcgtgtcgcccttcttgatgcccacgccgtagtgttcctgcgtgaacggtttgccgaccaccttgagcttgccgcgcgaggcggaggccaggccggccaggatgatgtcgtcggtggttaccgcgtccacgatgccggagaacagggcagtggcgcattcggcgtaaccgggctgttccataagctggacttcggaggcgaacttctccttgacggtggcggcggaggtcgaaccggtgacggagcataggcgcttgccgttcaggtcttcggggccgttgatggagttgtcgtccttgcgcacgagcagatcctgtccggccacgaagtacgggccggcgaaggagacggccttcttgcgctcgtcggtgatggagtaggtggcgaggatcatgtccacgtcgccgttctgaatcatggcctcacgctgcttggagggagcttccttccagatgatctggtcttcggaatagccgagtttcttggcgatgtacttggccacgtccacgtcgaagcccacgtaggtgccggacttcttgaagcccaggccgggctggtcgaatttgatgccgatgcggatcttgccggtttcgtccgcgccgcaggcggccagcgacattgtgcaggccacggcggcgagcgcggcgatcacgcggcaaaccttccgtttgaacgtattggtgaatgtcattggattgcgtacccgtctttcagtgggttcgtcagtgggtgaggatcttcgagaggaagtccttggcacggtcggtctgcggatgctcgaagaactcgtcgggcgtgttctcttcgagaatctggccgtccgccatgaagacgatgcggtcggcggccttgcgcgcgaagcccatctcgtgggtcacgcagatcatcgtcatgccttcatgcgcgagttcgaccatcacgtcgagcacttcgttgaccatttccgggtcgagtgcggaggtgggctcgtcgaacagcatgaccttggggcgcatggcgagcgcgcgggcgatggccacacgctgctgctggccgccggagagctgggagggcatcttgctggcttgggagtcgacgcccacgcgggcgagcaggtccatggccagttgctcggcttccttcttgtccatgtgacgcactttgatgagggccaacgtcacgttttcaagaatggttttgttggcgaacaggttgaacgactggaacaccatgccaacttcggccctgaggttcgcgagctccttgccttcctgtggcaggggcttgccgtcgatgcggatgtcgccggaatcgatggtctcgaggcgattgatggtgcggcacatcgtggacttgcctgagccggacgggcccacgaccaccagcacctcacccttggtgacggtcaggttgatgtccttcaggacgtgcaaagcaccgaagtgcttttcgacgtgggtcagttcgactagcggacggttcaggtcctctttgccgggaaccagcggggtcaatttggccttgcttggtgatgttgtgcttgtcgtgcgcgaacgcactgctgtttcattgttcgtttcagacatgagtgggaggataacacaccgacgtttccaacgtgttcacagtatgtccacacagttgctcagtcgatgtctcatttccgcatcagacatcgtgatggcggcattgggcatcggcatacattctcgctgagtcgcgcatcgctcggcgtctgctgtgcgctgattgcctgctgcgtggtggctgagacgttgctgcgacggcaaagcgggcacgtgttgtcctatctgctgattccatgtttggccttggtgtcgttggcgttgctgccgtgtatgccgcagtcgggcgcatggctggcggtcactttgtattgtgtggggctggtctcgccgtttcccatgtcgtattcgtataaatgtgctaggcattttgagcgtggctagctgttcgcacacgatgagtgctgttatacggtggacgacactcccgaagcgcggtggataaccgggcgcggcacacgatatgccggtggataaccggttcgcgccgcttaagttatccccatttttcggttttgcccctgtgccaccgtggaatgcgctacgctcggcgcatgaacggatacagcgaagcgccgcacaatggcgaaatcaacaactatctgcgcaaagatcttgacgccaaagccacggccaagaacacggcctgttggaatctgctgggcaaagtgcgcacgaaacgcacgttgtgtttctcgctgtataccgcattggaattatgcggcgtggagttgccgaggcacagcacgttgccgcagaaggatttttatgtgacggtgaggagcaaggggacccgctcttcattggacaatgtcgactatcgcatatggaatgcaaagttcagcagtatcgctttttcaaacggcgtaacctgcatgcatcccatggatgcgtggatacagtttgcccaatatctcaacctcactgaattagtggtgctggctgaagcgctcatcagacgttatggatatgccattgaacaattcactcaacgactaacggcctttcaccgcgttattggtcgtgcgcgttgtgaggcagcgctgaagctcgtaaaaccatcggattccgttcaggaaactcgtacacgcttggcgcttatgcttttcggcctgcccctaccgcaaacacaatatggcattaccgattcagagaacggatacacctacaccgttgacatggcttatccacaatacaaagtcgctattgaatatgatggcgatcatcaccgtcgcttccgcaaacaatatgtgcgggaccagcaaaaacgtcgacgtctgcggcaattgggctggaccgtcatcgaggtgttcgccgatgacctgtggaataccgccaaacaacgtgccttcgcacaagaggttgccaccgcgatgcaaataccgcttcctggccgtcctcaaccttcatgccgggtattaatagacggcagccttaccatcaatgcacgcaaaggggaatacaggaggcggaaacaagcaaaacacaacaaagcctcacaacattaatcaaatacggagttgcgatcgctcctcatggggcggtaattccctcatggggcggtaatttgcccatggggcggtttgaagaaattgtaaaaccgcggaattaagccattttgacctaccgccccatggggttttcaccgccccatgggttgtttaccgccccatgaggaagttaccgccccatggggggataatcggcaaacgccaagggggacaccgcatggtgcgaggtttgccgcatggcggaggtgccatcgggcggagtatttggcaccccttggcaggtatttggcacattgggccccacccgcaaaaagcaaatggcccttggaataattccaagggccatttgcggctaatagcaccggagcattactcctcgaaaattaatctacgcatgcggagaccgccgttcgaagccgaaggcgcactaaggtgcgtcgagtgctgaggaaaggcggtatacgctccgtagattagttttcgtcggcgtccgggtcgtagtcgacgccggtctcggcgcgctgctcgtcggagatcggggccggagcaccggtcagcgggtcgcggccgccgccggccttcgggaaggcgatgacgtcgcggatggagtcggcaccggccaggatggacacggtgcggtcccaaccgagggccagacccgcgtgaggcggagcgccgtacttgaatgcctcaagcaggaagccgaacttctcgtcggcctcttccttggtgatgcccagcacatcgagcacacgggcttggatgtcgtcgcggtggatacgtacggaaccgccgcccatctcctcaccgttgcagacaatgtcgtaggaatcggacatggcgtgctcgggatccttgtcgaacttgtcgatccaatccttggagggcatggtgaacgggtggtgcatggaggtccacttggagtggccgacagccacatcgtcatcatccggatcgtcggtgggcttgaacagcgggaagtccacgacccaagtgaaagcgaacttcttcggatccagcaggccttcgcgggaggcgagctccacacgcacggcacccagcagcagctgggcggactcgcgagaaccggcggcgaagaagacggcgtcgccttcctcggcaccgacggcctcgcgcaggccgttgcgctcctcatcggacagattcttggcgacggggcccttgagttcgccgttttcgccgaagaccacgtaggcaaggcccttggctccacgctgacgagcccaatcctgccaagcgtcgaactgacgacgcggcgtggcggcaccgcccttgaagaccacggcacccacgtacggggcctggaacacgcggaacggcgtgttcttgaagtactcggtcagttccaccagcgggttgccgaagcgcaggtccggcttgtcggagccgtacttgtccatcgcatccttccaggtgatgcgcggtagcggcagctggacctcatagccggcggacttccagatggcggcgatgaccttctcagtcatggccatcacatcttcctggtccacgtaggccatctccatatcgagctgagtgaactcgggctgacggtcggcgcggaagtcctcgtcacggtagcagcgggcgagctggtagtaacgctcgacaccggagaccatgagcagctgcttgaggagctgcggggactgcggcagggcgtaccaggaaccgggcaccagacgggccggcaccacgaagtcgcgggcgccttccggggtggacttgatgaaggtcggggtctcgacctcggtgaagtccatgtcttccagcgcgtggcgggcggccttagccatgtcggaacgcagcttcagattgtgctgcatggacggacggcgtaggtcgaggtaacggtacttcagacgcacgtcctcgcccggcagcttgttctcggactcattctcgagagcggtggaaacctggaacggcagggcgtcggacttggcgaggatctcaatggtctcggccacaacctcgatcttgccggtggccagatgggtgttctcgttgccatccgggcgcaggcgcacttcgccggtaatctgaatcacgaattcactgcgcagcgggcgggccatatcctcgtcgtaaatgacgacctgcacgaggccggtcgaatcacgaaggtcgatgaaggccacgccaccgtgatcacggcgtcggtcaacccaaccggcgagggtgaccttctggccgaccagggcctcggtcacttcagtggcatgatgtgttctgtaagccgtctggctcattgtcttgtttctcctcgatttttcgcgcgaatacgtcagatttcgacggtttgctgggcaaccacagtatccggctcccacgacgtgcaatcggcggcaacctgctcgcccgtgacgatgttcttgacctcgtcgccagcgggctctgcaccttccgcaccttcggcagcggtggccgggaaccacacgtacggaatgccgagtttgtccgcgtacttgatctgcttgccgagcttggccgcggtgggtgccacgtcggtggcgatgccgcgcgcacgcagttggttcgcaatacgattggcggccgggcggtcctcttcattccacacagcgaccagcacggcggccgggctgacacggttggcgtgagcgccggcggtgtgcagcatgtagctgaccagtcggctcaggccgatggacaggcccacgcccgggtacttgcggttgccctgggaggcgagattgtcgtaacggccaccggaacagatggaaccgagtgatgcggcaccgtcgaggaaggtctcgtagacggaaccggtgtagtagtcgagaccgcgggcgatcttcaggtcggcgatgacggaaccggggcggatggcggcggcctcgtcgacgatcatggccagggtatcgagtccctgacgagccagcgtgtatgcctcggaatccttggcgatgccgtgagactcgcacagcgcatcgaacttggcggcaagctcagcaccgtcggaggcggtgagctcggccaattcgaggcaggcgcgtgcctgtgcttcggtggcgccgcaggtctcggtgagcagtcgggccacctcatcggcaccgattttgtcgagcttgtcgatctcgcgcagcacgccctcgacatccgtcagaccaaggccgcggtagaagccttcagacagcttgcggttattggcgtgcacggtggccttggggaggccatacgcgcgcagctcttccagcgcggagaccatgaccagcggcagttccacttcatagtggtcgggcaggtcgccggcgccgatcacgtcgatgtcggcctgcacgaactcgcggaagcggccttcctgcggacgctcgccacgccacaccttctgaatctgccagcgcttgaacgggaacgccaacacacccgagtgctcgaccacataccggctcagcggcacggtcagatcgaaatgcaggcccaaccgctcttcaatcggagtgtcggattcatgaccgacctcctgcaaacggctcagcaggtagatctccttgctggtctcgccttttttcaacaaagaagcgccggtttccaccgctcgcgtctcaatgccgatgaagccgttgagctcaaaaaccttacgaagcgtatcgataacacgctgctccacaacacgttcggaggggagccactccgggaatcctgatattgatgcacctttagccacgaaatcaatataataggtgagggttgcgtcaaaacttcctggttcgcccgggatgggagacgctcccgcttatgcattctacgctttaaggagctggccatggccgacgaaactgtcaccgaacccgtaaacaccgctgcgcccgaagagcaggcaacgacacccgcacccgaagccagcgcggccacgccggcgccgactccgtcccccgcttccatgccgaaaccgcacgcgccctcccccgccgccttcgccaagaagactccgtcggccaagccgcgcgctgccgccccggccgccgccaccgccacctattccgaggctgatgtcaaggccgccgaggccttcggccgcgtggatgacaacggcaccgtcttcgtcaaggatggcgacgccgagcgcgaggtaggccagttcccggatgtctccaaggaagaggcgttggcactgtacgcccgtcgtttcctggatctcaaggccaagctcgatctgctggccacccgtctggcttccccgaacatcaaggcccgtgaaatcgacgagtccgtgaagctgctgggcgaagaaaccgccgaaccggcggtggtgggcgacctcgcggccctcaaggcccgttacgtggaactgaaggccgccggcgaggccaagaaggccgagatcgccgaagcgcgcaaggccgctcaggccaaggccgtcgccgagcgcaccaccattgtcgagaaggctgaagcactggccgcttctctgggcgacaacaccaactggcgctccaccgccgacaagttccgcaacctgttcgacgagtggcagaaccaccagcgcaccaccgtgcgcatcgacaagccggaggccgaggcgctgtggaagcgcttctccgccgcccgcaccaccttcaaccaggctcgccgcaagtgggctcaggctcgcgacaacgagcgtacagccgccaaggaagccaaggaagcgattatcgccgaggccaatgagctcaaggattccaccgcttggggtgagacttcccgcaagttcaacgatctgatggaccgttggaagaaggccggccgcgctggccgtaacgaggacgacgagctgtgggccaagttccgcgaagccgccgacaccttcttcaacgctcgtcaggctgatcgcgatcagatcaactcctccgagaaggagaatctggctgccaaggaggctctgctggtcaaggccgaggctctggtgccggtgaagaccgacgccgaggccaagaaggcccgccaggagctggccaagattcaggaagagtgggatcagatcggttacgtgccgcgtgacgatatgcgccgcatcgagaaccgtctcgacgccgttgacaagcagatcaaggccatcgaggatgccgcttggaagcagaccgacccggaggccgacgcccgcaagtccagcttcgaggagcagctcaacgcccagctcgccgagctcgacgccaagatcgcggccgaatccgacccgaagaagaaggccaagctcgaagccgagaaggccaccaaggagcagtggctgaacgccatcaagtaagggtctcgtgccaggttcccctctgagggaagccggcagcaaggctgactgaggggagtttacggttataccgcaagctcccctcagtcgcctacggcgacagctcccctcagcgaggggagctgtcgtcatatttatgccgttttcttctgccctatactcataactccaccccatagttcctcagtcacccagcaattggtgtcttacgcctgagtccctaccggtgctgcaacaattgccgtgagagcccttgatgtgcagccagatattcatgcaacggctggctgtatggcatattcagctcgccgtaattggttccggcacggaaggcggggtaactgtcgccgccctgaagcagatatgaattggatgcgataatcaccaggtcatcgtccgcaatcggtcgaccgtcaacggcgaggttcacgatacgaaccgccgcatgttcgtcggcagcacactcgtcagcgtcagcgttggtatcagcggcggcatcggcattgccgctcccaccggtcgtaccgcattcggcataccgatacgtcacgttcgaggagatgccgagccagcgccgctccagtcgcccatcgtcacggtggaattgctcggcgagcactctcttcacatcgcgcccggtgagcgtctcatgcgcggccttgaactgcaaggccatgagactatccacctcgcgcacggtgactttgccatcgccattcatatcaagccgtggagtccgcagactgccattattcgaaaatccgattaccggcaaacgatttccggcatacacatgcttcatgattgactcgcggttcgcgtccgccaccagcacaccgaccgtattcccgtgcttatccgaaccttgtttgtcgaaattcacgccggaggccaaggtgccaatcaccgcgttgccggcatgattcgaatatgttgccgccgcctggtaaatatgctgagcgcgcgatacctcatcgttcgcctcagcaccggcagacatccaagcggcttgcgccggatgcgcattaagcccttccacgcccagcacgccgtcaaccgccgtatggctggtgccattgccgaggtccacatcggccactcgcaccgtggcgcgacgcccggcaccggtgatgatcaaatcctgcacggccatattccgcccgaagctgcccgcctcgtaaataggcgcgccaccagcggtcgtaccacgcttgatcgcgtgattgtggccggtgtataccacatcaacatctcgcccaatatcggcggcggctgaggcatcggcgtgcagcaaggccaccaccgcatccacctttccggagcgtttgagttcacaggccacgcgattgatcgcgtccaccgcccgttcgtcaagatcggcatcacgcgtaatctgcggagtggctaccgagccgagcgcatcagtaagggcgcccacgaaaccgatccgcttgccgttcaccgttcgaatcgtagagtcacgtacatggctcagcagtccgtcaggcgacttactggcggcagacgtgttggcgcacagccagtcgatgccattgctgggatcagcgatgcgattgttgaaatcggcgacaccgcggtcgaactcatggttgcctaccgccgaaatcgtcaatccccacgctttggccatgtccagcgtgggttggtccttctccaccgccgactcatacggggaacctcccaccaaatcgccggtcgataccgggatcatattgccgggattatggctgtcggccacggtgaaggcggtggcgttgtccgcaccacgttcgatatgcccgtgaaaatcagtgatgtcggcgatggtcaccgtacgggtgccggaagatggattatcgccggaaaaaggaacggctcccgtggttcccgcacaagcataaggaaccaccagagccgtaaggataagcgctactgcaccaaaagcgatccccgatcgcttgccggcccaccgccggttcttcatattcctgctcacaccagtcacgttaggatcgtcgattgaacggccatgcctaggaaggcgactctcaggtgaattcttagcggcgtcttgggatgggaaaggcctgaccccgtactatcagggtcaggcctttgcaacccgtgtcactacgaatgcgtcggcaaggggagattactcggcaaattcctcgacgcagatctcagctaccgcatccacgcacgcctcggcaatcaggcggccgcgttcggcgcttgagccggccggattggcgagtccgccgtgagcgggaacgtcaccttgacgcaccgggtagcgtacataggatttcgccgtggcaccggcttcctcgaccatacggtccatgtgcaccagttccggcgcgtagtggagcatcaacgaagtttcggtgacggccgcatgctccaatgcccagccggggaacaccaatccatcgaacaccttgtcgataaccgactgcggaaccgggtcccaccaattggtttccacgatggtggccactcccccggtttcgcgggtgaccaggtcgatggcctcgacgatgaacgcctcgttttcaaaatgcgcgttcatgacgacgatcttggtgaagccatcggcgatgagttcgctcagcacgtcgtgcatttgggtgatcactgtcacgccgttcatgtcgatagtacccgggaacagcggcccgccaccggagagcggcttggacttgtatccgtagctcagggtgggcagcacggtgccgtcgatgcgttccgccagatcttcggcgacccgcgtggcgagtaccgcgtcggtaccgatgggcagatgctggccgtgctgttcggtcgaaccgatcggcacgatgacgggatgagtcttcacctccttgaattccggccaggtcatgtggtccatacggcggttgctacccattgcagtactcctttgggttggtggtggattggatggtcaatgaatacgcccggctccctcgggaaaggagccggagctgaggagatcagatgtgattcagatccttgtcggtgttttcatgggaaagaatcatcgcgaccaaggcgatggccgcaacacccaccatgtaccaggccggggcgatggatgaaccggttagggcaatcaggccagtggcgatgaacgaggccgtaccaccgaagatggcattggccagattgaagctgaacgcgaatccggtgaagcgcacggaggtggggaacgtctcggtcaggtagctggacagggtaccgtcgttggcggtcagggtggcgcacattgccagctcaaccagcagcacgggccagaactgggaggtgttgaggatgaggaaggcaggaacggtgaggacgatgaacgccacgcaagcaccgatgagcaccttcttgcggccgaatttgtcggagatgtggcccatgccgaacaccatgaacacgtaggcgaccaagcagatggtggtgatggtgccggactgggtggcgtccatgccgacggtgtcagacagataggtcggcaggtaggtgagcacggtgtagaagccgaccgcattcagcacgcaggctccgaagctgatgatcagggccttgagatggttgtggaagagttcggcgagcggggcgaacatgccgctcttggaaacgacttggccgtcagcggaggcggcgctcttggactcaagagcatcgttcattgactggtacacgggggaatcggagagcttggtacggatgtacagcacaatcaggccgagcgggccggccagcaggaacggcacacgccatccccaaccgaccatcgcgctggagttcatgttggcggtcatcagcgtggccagcgtggagccagcgagcagaccgatggcggtggacgccggaatcagcgagcagtagatgccacgctttgaggtgggtgcatattcgccgaggaatgtggccgcaccggcatattcaccggaagcggagaagccttgcaccatgcgcagcagcagaagcagaatcggcgcgccaacgccgatcaccgagtaagacggcaggcagccaatcaggaagctcgcaccggacatgaacataatcgagtgggccaatgcggctttacggcctttcttatctccgtagctaccccagaacagtgcgccgattggacgcaggatgaaggatagcgcgaacacgccgaaggtctgcagcatggcgacggtgtgattgtcggttgggaagaacaccagggcgatggtggtggcgaagtacgaataggaggcgtagtcgaaccactcgatgaagttgccaaggaaggaagataccgcgactttcctgaccatggcctgttcttcagtttgaggggtgaaattcatcagtcgtgcagatgtagtaatcgttgcggaactcatgatgtcaccgtcctttcaaggatgtgctgttcgtgtgactgaatgggattcaagtgggaattcgtttcgcagcaggtcgaccagcgccgcgatagcctcgactatgcccttgagtatttgctgaaacgtgaatcgtcgattaacccgttcggcgtagaagtggacaggttgcccagtggtgctggcgcattattcaccatgctgttcttgccatgatttcgtgagtttggcggcgaatagcagcatcgaccagttcggtttgtcgttatagtcgacgccgaccatttgtgtcactttgtccagtcggttgtacagggtttgccgtctgatacccaattgctcgcacgcgccggttttgctatcgaggttgtcgaagcagacgcacagtgtgtccagcaacaacggagaggcggcgacctcgaatccgatggtctgcaccacgagcatgcgcatcgccttgtccatatcagaggatgcgacgaaacggtcgacgagtgcggacatggtacttacgattcgcccgtatgccggttcctgattggcgatgtcacgcaataccgcgaacccgtcgaccagcgtcaccgtgtccaatgccactcggccatgcaccacgtacacaccgtcgccttccagtacggcaagcgcatccatgcaatggcgtccgaatgcggccgcaccgtctgaggaatcggtggtggagcaccatccgaccatcaagtcaccttccagcatgcaggagacggcgcatcccgaccgttcttcgaaccgttcgaccatcgtcgatacatggttgatgccttccaccaccgatctgaaccgaaaagcgaatggcatatagatgcatgatccggcaaaacccagcgcgtcgagcatcgcatgcgcttcctgcgcctcaaatgtattgacgtgcacgccgtcggccgggcccatactcagatgatgcatcatgcccatgcgcgcgccgccgtcaatatagagggcggccaccggagacacgatggtggcgatggcccgacgcatcgtggcgtcgaaagtcatggtgcgttgcgtgatctccaatgctcccaccggccgggagcgactttcaagggcgatgacggcgctcgattcgttgccggcatcgaacgcacgacccgctcgagcggccaacagaccgtcaccatcgaaaatggcgacgctttcgccgaacagcgacgcaatggtttcggccacagcctcgatattgccggtacgggacaatccctcacgtaatgaagtggacattgtgtccacctccaattgcaagtgcatctgttcgtgcacgatagcggtattgacactctgacagatgtcgacaaaaggtacgcgagatttcagaccaatcaacgtcaacccatgcagcctggccgcagacaccagttcgtccggcatccgcaccacaccctccaccagttcgaccaccagagcggcgacaccagcctgcgccaggcttgctacatattgtcctaacgtgccgtgccaatcggcggcgagcagagcgttaccctcgataatcagcatctcaccgcccgaaaggaaactggagacatcctctcgctcgttggtaaacacccatcgcactggcgtatcgaggtctttgccttcgacctccaccacaggatcggctcgtttgaactgcgtgttatgaagcgcactgcgaatcgatacagtcatacaatctgtccattcccccgcggaacaccggtcgttccggttaacctcaccgcaaagcgtgctgttgacaataacctcagttggttacgcgggcagtcggttcacgtaaccgttcggcaacacaccagttgaaggagcgacgatgactaccacactgttcaccaacgcacatatcgccaccggagaacccggcagcacggctgcaagcaccctgccattgcaggacattctcgtcacggatggcgtgttcaccgcattcggccccggactcgcgcaacaatatgaggctcagggtggtgatctggcggccattgaggtggtcgatctgggcggcaaacttgtctgcccaccgttctgcgatacgcatctgcaccttgattacgtattcacggcccgcaagcccggtgcggtgaatgaaagcggaaccttgtttgagggcatccagcgatggagtgagaccaagtccgacttgacggtcgacgagatcaagcagcgcgcgaaaatcggcattaagaaagaaatgctgcatggcgtgcagctcattcgctcccatgccgatgtgaccgacccgaacctgacctcattaaaggcgctgctggagcttaaggaggaattgaaggatacggtcactctccagatcgtcagcttcccgcaggagggcatgtactcctacgagggcccgcatggcgaatcgggggccgagctggtggaggaaggactcaagatgggtgccgactgcgtgggcggcatcccccatttcgaacagtgccgtgagtttggcgagcattccatgcacacggtagttgagttggcttcgaaatacgacaagctcatcgacgtgcattgcgatgagacggatgatccgaattcccgttacgtggagctgctttcggcgttggcatataaggctggcattggcccgaaggtcaccgccagccacacctgttcgctgggatcggcggacaacgcctacttcttccacctgaccaagctgcttaaggcggcgcatatcaacttcgcctgcgcccccaccgagaacctgtatttgcagggccgtcaggataccttccccaagcgccgtggcatcacgcgagtcaaggagctcactgaggcgggtgtcaatgtgtcattgggccaggattcaatgcaggacccgtggtacccgctgggcaatggcaatatgatgctcattcttgattatgtgctgcatttggcacagatgatgagctttgaagaaatcgacgatgcgttgaagttcctgaccgtcaacggtgccactacgttgggcctgcgcgatatgtacggcttggaaacgggcaagccagcaaacttcattgtgctggacgccgatagtgtgttcaacgccgtgtatgagcgctgctcggtattgcgttcggtgcgcgccggccgcacgctgtttacccgcgaggagaccatcgacaccggactcgccctgctgcaataacccgacaacaaacagtagttccccttgacaggggagctatcgccagaggcaactgaggggtagaccaaaaacgtgcacattatgtgtgcgtaggtctacccctcagtcagcttcgctgacagctcccctgtcaaggggagctttgctggtatgcgctagctacgctatcgaaacggactacttctgcggagcgtcaccggaatcggcgggagcggattcggctggttcagtggccggagtggcgtcggctggagtctcgccatcagtggaggcaccggcttcggacgaagtttcggcatcggtggcggcaccgtcttcggcgggcttatcggcggcggccggctcctcgaacttctcccccttgaaggtgaattcgccgaggataccctcgccttccgcatccacaatcacgcgctgaccgtcttcgagatcgcccatcagaatcttctcggagatggcgtcctcgatgtcgcgctgaatcacgcggcgcagcggacgggcacctagcagcgggtcgaagcccttctgcgcgagcaggtccttggcggcgtcggtgagttcgagcgacatgtgacggtcgaacaggcggtcgttgagctgcttgacgtccagatccacgatctggcgcacctgcggctcggtgagctgcttgaagacgatgatgtcgtccagacggttcaggaactccgggcggaactgctgcttcaattcggagctgacctggtccttcatgcgctggtagctggactcgttgttagcacccaggttgaagcccgtgttggcggccttggcgatgtctcgcgtaccgaggttggtggtcaggatgatgatggtgttcttgaagtccaccttgcggccctgaccgtcggtcaggtggccgtcatcgagcacctgcagcagcgtgttgaagatgtccggatgagccttttcgatctcgtcgaacagcaccacggagaacggcttgcggcgcaccttttcggtaagctcgccgccctcctcgtagccgacgtatcccggaggcgcgccgaagagtcgcgaagccgcgtacttctcggagaactcggacatatccacgcgaatcagcgcgtcctcatcgtcgaacaggaattcggcgagcgtcttggccagctcggtcttgcccacgccggtggggccggcgaagatgaacgaaccggacgggcgcttcgggtccttcagacccacgcgagtacggcggatagagcgggacagggcggaaaccgcctcgtcctggccgatgatgcgcttgtgcagttcggcttccatgttgagcagtttcttggactcggcctgagtcagcttgaacaccgggataccggtggtggagctgatgacctcggcgatcacgtcctcgtccacgaccatcttgacgtcggactcgccttcgcgccaggagtcttccttctgcttgcgatcggcttccagcttctcctgcttgtcgcgcagttcggcggccttctcgaagtcctgacccttgatggcctcgtccttgtcggcggcgatcttggcgatcttctcgtcgagttccttgagctcaggcggggcggtcaggcgcttgatgcgcaggcgtgcaccggcctcatcgatcaggtcgatggccttgtcgggcaggttgcggtcctggatgtaccggctggacagctcggcggcggactgcagcgcgccatcggtgatggtcacgtgatggtggttctcgtaacgggaacgcaggcccttcaggatctcgatggtctcggcgatggtcggctcgtgcacctgaatcggctggaaacggcgttccagagccgcatccttttcgatgtacttgcggtactcgtcggtagtggtggcaccgatggtctggagctcgccacgagccagcatcggcttcaacatgtcggaggcacccagcgcgccgtcggcggagccggcgcccacgatggtgtggatctcatcgatgaacagcacgatatcaccacgggtcttgatttccttcagcaccttcttcaggcgctcctcgaaatcaccacggtagcgggagccggccaccatggaaccgaggtccagcgagtagacctgcttgcccttcagggtttccggcacgtcgccggcctgaatcttctgggccaagccttcgaccacggcggtcttacccacgccgggctcgccgatcagcaccgggttgttcttggtgcggcgggagagcacgaccatgacgcgctcgatctcgttggtgcggccgatgaccgggtccagcttgccttcagcggcttcgacggtcaggttgcggccgaactgatcgagaatggcggaaccggacttgttctgcttgtccgtcacgccgccggcgttggccagatcgcccttgccgtcaccggtgccggtgccggagttgccgcgaatcatatcgatggtcgcgctcctgagctcacccaggtcgacgtccatcttgatgagcacctgggtgcccacgccttcgccttcgcgaatcaggccgagcaggatgtgctcggtgccgatgtagctgtggcccagctgcagggcttcgcgcagcgagaactccaacacctgcttggcgtgcggagtaaaggggatgtgcccgttcggagccgcgttgcccttgccgatcatttcttcaacctgcttgcgagtggcatccagctccacgcccttcgaggcgagcgccttggcggccacgccctcaccttcgcggatcaggccgagcagcaggtgttcggtgccgatgtagttgtgctgaagggccctcgcctcttcctgcgccaacacgatcacgcgccgtgcacggtcggtaaaccgttcgaacatgcttgtccttcctcaattgacattccgtcttactctaccgattcacgatgacgtttattcatcggattccatgaattgcgccgtaagaggataagaaaacgatatgctggttctagattcacccgtagtcgattacaaggaggctcgaaatgagtgaagcgacaaccaagcccgacatcgttgtcggcgtggatggttccgatgaatcctttgccgcgctgaagtgggcgcttgaggaggcttcgttaaccggtcagagcgtcaacgccgtgtttggctggacgcattcgtgggatatgggttccgaaccggacagcgacgaggcctgggccaaggtccgccacgacatcgccaacgagctgcgtgtgtgggtcgacaaggccgctgcaggcatcgacttcgatccggcgaatctgaagctcacctcggtgaaggcctccggcacttcggccctgctgcagatcggccatgatgcgcagcagatcgtggtcggccgccgctcgctgagccgtgtggcccgctggttcatggggtccctgtccgcttcgctggccgaggccgccgaagtgccggtgaccgtggtgcgcatcgccggcagcgaggatgagaccgtgaccgatgccatcgccaatgccctgacgccaggagaccagccggtccactacacgcagccacagcccgtggtcgaggtggctcgccgcccggtggtggttggtgtggatggttccgagacttcccgccgcgcgttcgacttcgcgctggaaaaggcacgactgcacgacgcgccgctgcatgtgatgttctgctggcagctcaaggatttgggcgttattccgggctatgagaacgccgtggcaccggtgaaggtcggtcagcgccgcgccgaggagattctcaccgggctgatggccaaggccgagattcccgatggtgtcaaggtcagcgcgaatgccttccatattcccgcgtccaaggggctgattgcggcatctcggtacgccagccatctggtggtcggttcgcgcggcctgtccggtctggacgcgcacttcctgggatcggtgtcccgtcagatcgtgaacttcgccgaatgcacggtgactgtggtgcactgatgcaccgaaatcggcatggagtgctaacgcacgtctcggtgatgggcttgcagggaggaattctttattcctgcaaccccatcaccatctactttttaggaaacatcttcgctgagacctataagttgatccgagagtacattctgctgttggggagcaggattggcgtttattttattcctcgtccgccctgttctggcgcagctgctcaatgagatcgatgacggtttcgagttcaggagtcacatcgtctgaaggacgaacgttatcctcttcgtcgtccatctcatcatcctcatcatcatcggcaacggtgttgttgaggatgtcctcttcggtggcctcgtcgtcagcatcagacttggactcgtcgctggaatcagctgcatcaacatccacaacggaatcggatgcgttctgtgcaacagactcatcaccggcagactgggattgcgaggtcccgtcgcctgccgcctcctcagcgggctcagtatcgacggcgttcccgtcaacagtcttctgtgcttcgatatcatcaccggcaggctcgcctgtcttgtcggtttcgccttcggcctcgtcctgggcaacctgctcctgcttgcacggacggttggcaaccacgtcgatatgcagatcgtcaaaggctggcttggactgcacccacagctggcttggctcgggaggttcgatttcggaatgctcaccgcagccgtggtccagggagaccacgcggccgtcatccggactccacttgttggcgcacacgccgaacatacggtcgagttcgcccgcgagcggcacgaagaaaccacaggtggagcacaggttgccttcggcggttttggtgctcaacgctttggggcctcgcggaccttcataccagcgcttggcagcctgcgcacgacccaacgaggtcagcacgtgacggcgggtcagtcggaaggtctcgacggcatcgttgacatcctgcagcgaggattcctcgacttcgccttcctcgatgcgctcgtcatccggatcggtaccgatcgaatcggtgggagccagatctgtgggctcaaggcgatccttccagggaatccacttgggcggcatcaacgcgccctcagtggggatcaaggaggattcgttgacggtccaggagtcgatctcctcgtcgtgatacagcgtcaccgaccattgccatccttcgtagccacggatattcgcggcgaagcggaagtcagtgacgtgatcctcaagatcatatgaggtaacgaaatcccccacctgatcgctctcgtcggccacttcgagcagcacggcgcgcgcgatggcgtgagggtccggtgtcacgatggtttcggtggtatcagtcatagatcagatcagtcctgtacatcgaattgatccgccaccgcacgcagcaacgtggccagctttttgctgtcggcagcagatgggtaacggtgacggcgcaacgtattgccggccgcatcaagcatcttgataaggtcctcgcagatggcggccatgtcatccgccttcgggcgggtggccttgaccaagctgggagtggaggcgatcaggcgaacatccatggcctgcggcccacgacggccgtccaccacggaatactccaccttggcccccttgcgcaacgtggtggcgccagtgggtagggcctgagccggcaggaacacgtccttgccttcctcactggtgatgaagccataacccttggctgcgtcaaaccaacgaactcgaccggtgggcattgcgaaccttccttaatcctcaatggaaatagtaaaccgaaggtacagtttacctcacagggcttgacctcacgctttgggctgagtcgcctgagtcttacgctcagagctgaaccaagaagtcttctgtttggcgtccttggttttgccggtgggccgcttgggctcaggagcgacgatctgctcaatcggcagcaccacggtgaaggtcaggcctcccccatcggtgccggtggcgcagataaagccgtgatgtgctttgaccacggattgcgcgatggccatgcccaaaccggtaccacccttttcgcgggcacgggatgggtccgcggtgtagaagcgttcgaaaatcttcgagcgcgattcaggcggcacgccggggccatggtccacgaaacgcaatacggcgtatcgatagccggtctgcatcgaggcacctacttcggcggcgtcgatgaaccgccgcattgatgcgtcgctggcgggcatgcgagcgagctgtcttggatcgatggcggccggcatcacaccgagcgcggcctcggcaggcgaatcggcaggcgtgtagcggtggatgttgcccacgatgttggtcaccacctggcgcagtcgagaggcgtcgccgggcagcacgacctcgggccaatcgccttcggcaaggttgaattcggcgggatggttcaaatcgcgcgccggttcgagggaaatctgcatgcggcgaacggcacggtccgggtcgagcgcatgcaagtcgtcgacggcgtcggtgaccaacgacgagagtttcaccgtgccggtcacatcgatgccgcgcccctcatcgagacgggccaaagacagcagatcctcaacaagaacagtcatgcgctggctggaccgttcgatatgttcgatggactcgtccgcacgctccaaggcaccaggcatatcgcgctgcatcttatacagctccgcatagccatggatggcggccaacggggtgcgcagctcatggctggcgtcggagacgaaccgtttcatcttgtcggtggtctcctcctgctcatggaaactggattctattcgggcgagcatggagttcagcgaggcggccagggagccgacctcggtgttttccggcgcggaaggaatacgctggctcaggtcgccggcggcgatctttgcagcggttttctcgatgcgcttcagcggcgtcatcgtgtgctggatgatcagcgtggacagggagccgccgagcagcaccacggcgatgccgaccacaatgcagtatcgggtgagtgtgttgacggtgtcgatctggtcggccagcgacaagccgatgtacaccacggcacggtccttgccgttttgctggaaggtcaccggcagaatacgccatggtgccctcgccgtgacgatggcggcatggttggcattgacagtggggttggccagtaccttggcgatggtgtcagaggaattggagtttccgttggccggatcgttctggctgtccgcactgtcggactgcaccgtgatgatctgcttggccactgcctgcgtagtgaatgcctggccgagcgtgatgccactggtatcaccataggtaggaagaatcggcaccgatacgataccgtcctgcatctgcggcatcagcggggtcacgaccagaggattgccctctttgtctttggtgccgtcggtatattgaatctgcagaaagtacgagttcggccccgatgagtcattttttgacagcagatcgatattgttgaccaccagctggctttgcgagcttaactgggtgtcggttttctgcagcatgtagttgttcaccaacgcgcggatggagaaggaaatcaccgacacgccgataagcagcacggcgatggtgcaggccaccagcttgctgctcaacgagatacggtcgatatgccgcatcagtatgtttttcttacgctcgcgccgctcttggaaatgggcggcgaacggcggcattgcaggcatgggattcgtgttcggggcggcgttcggcgtgctgctcggcggtacgccgcctgactgcttatcggggatactcatgagattgcgatgcgttatggatggggcgactagttcttcggttctcgaatcatgtatccgataccgcgcttggtttcgatcagcggagtcaccttgcgcttgccgccttcgccgtcgtcgacctcgatgccgtcgactttcttgcgcaggtaggagatgtacgattcgacgatggctgcgtcgccgccccagtcgtattgccagacatggtcgagaatctgtgccttggacagtactcggccctcattgtccatcaggtagcgaagcagcttgtattcggtggggctcaggtcaaccggctgccctgcacgggtcacatcgtgggagtcctcgttgatttccaagtcggcgacgcgaataatcgggtcgtcttccacctgttcgcgggtacggcgcagaatggcgcggatgcgagccacgacttcctcgaggctgaacggcttggtgacgtaatcgtcaccgccgacggtcaggcccatgatcttgtcttgggtgtcgtcacgagcggtgaggaacagcacaggggcgttaatgccttcctggcggatgcggcgggtgacggtaaatccatcgatgtcaggcagcatgacgtccaacacgatgagatcaggctgcactttttcgataacctcaatggcttcggaaccggaagcggcggtgtttacctcgaatccggcgaagtgtagggaagcgaccagcagttctcggatggacggctcgtcgtcgacaacaacaatcgatgcttcaataggcttactcatgcttcctagagtgtcgcgctcttctgggcgtttcctgaatgtcatcttggagttcggccttggaatccttcttgatctccttgcgccgacgaatcaccaccatgaccacgatgatgatgaccagcgccaccaacaccacacccatgatgattatgcctacggtcaccgtggatgatgaggtggaggcttttttggatttcacgatttgatccatcattgccgttgccgcgccagaccagctcggcgggttttccagtaacggctgctgtgcggcttcggatagcttatcgacggttttgttatcgagaagccacttatcggagttcttggacacgacgaccaccaggttgccgtcattcgaggccacggcaagcatcactgtgttcggcttgggattcatggactccatcacggttgccgcccagtcttccggtttctgttgactattgaaactggaaagatacagcagatgcacgtgtacaccggtttccttctcggttttggcgatggcatccgcgacttcggccgcatgggagcccaggagattttccgtatccgtgatgttctcggtgatggtcacgccgctgtcggtgctgctgctggagctgtcagagctgtcgcccgagttatccccataggcatttgcggttatccacattgcgttcatcgctactgcagcaagggcgcaaatggcacaaacaagccattttcggaccatattcccgaaggccgaacaggacggctccgaagataggaccacaatagttgtttttccgtcttcccgattcgttgttgacatatcctccaccttagcggccggtattggcaagcggccgccatacataccattaaccctctagaaaaggagcaacgatgccccaatatcaggtagattccgagcgaatccaatcatcctcggccgcagtggccacttcgatctcgcagatcaggcaggccgtgggcggcatgtacaccaatctcaatgccttgcaggacgcatggcgaggttcggcggccacccagttcaccgcggtagccgaacagtggcgtgcggcccaacagcagatggaggcctcactcgagtccatccaacgctcgctgacgcaagcctccaccgtgtatgctgacgccgaaatccaagcttcgcgcctgttcgccagctagtttcttggctctcctccctgaggggagctcgatcgcgaagcgaaactgagggagtatccctacaccgcagctccccttagtctcactgcgttcgacagctcccctcaaagaggggagccagaatacaaaaaaggggactcccgaaggagtcccctttcagctcaatcagctagcgatcgcttgcggatcagtagcccatgtcggcaccggcggccggggcagcaggcttcggctccggcttgttggcaacgacggcctcggtggtcaggaacagaccagcgatggaggcggcgttctgcagagcggagcgggtcaccttgaccgggtcggtcacaccggcggccagcaggtcttcgtaggtgtcggtggcggcgttgaagccttcgccatcaggcagggagcggacggtgttgatgaccacgtcaccggacacgccggcgttctcggcgatctgcttgatcggggcttcgatggcgcggaacacgatggcggcaccggtagcctcttcgccggtcagggaggcgacggcctcggccttctcggctttggcagcagcctgaacgagggccacgccaccgccgggcagcaggccttcctcgatggcggccttggcgttacgcacggcatcttcgatgcggtgcttgcgctccttggcctcaacctcggtggcagcgccgaccttgatgacagccacgccgccggccagcttggccagacgctcctgcagcttctcacggtcgtaatcggagtcggtgttctcgatctcagcgcggatctgggccacgcgagcgtcgatgtcttccttggagccagcgccctgaacgatggtggtctcgtccttggagacgatgaccttcttggcgtggccgagcacggaggtgtcgacggactcgagcttcaggcccagttcgtcggagacaacctgagcaccggtcaggatggccatatcctgcagcatggccttgcgacggtcgccaaagcccggggccttgacggcgcaggacttgaaggtgccacggatgttgttcaggatcagggtcggcagtgcttcgccgtcgacgtcctcagcgatgatcagcagcggcttgccggtcttcatgaccagctcggccacgtgcacgatgtcctgctgggaggagaccttgccggaggtcagcagaatgtacggatcttcgagcactgcggtctggtcgtcagcgttggtgacgaagtacggggcgatgtagcccttgtcgaaacgcatgccctcggtgaagtcgaggtccaggccgaagcggttgttgtcttcaacggtcacaacgccgtcctggccgaccttgtccagagcctcagcgatcttctcgccgacctcagggtcggcggcggagatggtggcggtagcagcgatctggtccttggtctcgacgtccttggcggcggcgacgagttccttgacgatgacctcggtggccttctcgatgccgcgacgcagggcgatcgggttggagccggcgaccacgttcttcagaccctcgtgaaccagggactgagcaagcacggtcgcagtggtggtgccgtcaccggcgacgtcgtcggtcttcttggcgacttccttgaccagctcggcgccgatgcgctcgtacgggtcttcaaggtcgatttccttggcgatggacacaccatcgttggtgatggtcggagcgccgtaggtcttgtcgagcacgacgttgcggcccttcgggcccaaggtgaccttgacggtgttggcgagcttgtcaaggccctccagcatgccctgacgggcttcctcatcataagagatgatctttgccatggttgcgtattcctccaaatggctaggtataccggttatcactcgcaagcgtcgagtcgtgacgaccagccgtcagctgccgattatcactctcgacctccgagtgctaacccagacattagcactcgcgaccgccgagtgccaacatcatcggcggcgattgcgctttgggcatgaaaaggccccaaccgtcgaaacggtcagggccttcaatgcacatccttgcgtgcgtgttgctcactcggagcgggcttcacccgaagacagcttgacaacatcctttgcctgcgtgcctttgccggacgaagcgggcgtatactccacgcgatcgccctcgtacagcatcttgaacttattggtgctgccgtcgtccttgatttccgcgtagtgcacgaaaacgtcctcgctgccgtcgtccggctggatgaacccgaaccccttcttggcaaggaagaacttcacggtaccttgtgccatatctgatctttcctttgttcccttaggcgtcgcgacacaaaacctatagggaacgtagaaagaaccgcatcgcgctcccctacctcgcgactagatgacgattgtacagtgacgagggaacaatcccaaccgcagtggcacattttcggtacgaattatttcatagacgtgagaacgctcacagttttcgatgtattccacgccgatatcaggggcgcatcaacaacgctagttgagcagcaccaccgtaatgggaacggcgagtccttgcacctgctccacagccgaaatgccaagcgtggtcgccacatcttcggcggtggctttatcggcttcattctgataccataccacggaagaagccggcaatgtgccgcgcggattggtcgcctcgacgctggtgtaaccggcggtctgcagcacatcggcctgctgacctgcatatccttggattcctgtggcgttgaccacacgcacctgcgtggccttattcacagtcgcggtggctccggactgctgagactgctgatcggagtcttgattctcattcgaggatgtcgtatcactgttggtatcggattttgccgaatccgaagtcgagtccttggacggatcggtcgaagtggacgaggaatcatccttggtgctgtttttggtctcagccttgctggacgaatcggacttggaagcagtcccggacgtggtcgcagtctgggacgatcctcctattgcatccctgtattccccggaaatccatgcccagaccccgacaccgcacagtgcggccaccagaataacgacgatgaacgggcagaggcgggccactgccgaacgagcgccacggtgaactcccaccggtcccttcggaggattgtcgaaggaatccggttcataggattcgtaggtcatcatgtcgcgtgccataatcgccctttcttcctgtcaaaactacccatgagtgtaatcggcaaacaactcatcagtccaccacaccacgcctcgtgcaccggatatgcacgtttgactacagtggtgagtcatgatcaaaccattgagcgaactggtagagccggggtgggcccatgccttggccgacgtggagcccgccatccaccatatgggcgattttcttcgtgcggaaaacgccgccgggcgcccgtggctgccggcaagccacaatattctgcgcgcgttcaccatcccgttcgattccatcaaggtgctgattgtcggccaggacccctacccgaccccgggtcacccggtgggtttgagcttctgcgtggcgccgaatgttcacccgctgccgaaaagcctggtcaatatttataaggaattggttgacgaccttggggtgcccatgcccaccaacggcgatctgacaccgtggacggaacgtgaggtgatgttgctcaacagatgtctgaccgtcggcgtcgggcggccgaattcgcatcagggcaaaggctgggaggaagtcaccgaggccgcgattcgtgcgttgaacgcgcgcacggacgccgacggcaagcccaagccgctggtggcgattctctgggggcgtaatgcgcaaagcctcgagccattgctgaccaatgccttcattatcaaatcgcctcatccgagtccgctgtccgcttcccgcggattcttcggctccaaaccattctccagagccaatcaagccctagtcaccatgggtgccgacccggtggattggactctttagacagaccaacagtcattgtgagtagttacagtgagggcatgactttgttccccacgcaaccgaacataccttcgccgaccaccgccgcacgaccggtcaccgttcccacgcccggcgtgtcggctccgctgggtgccgatgacgccaaacgcgcacgtatcctggccgacgccattcgggcgaggttcgcccagacactggtgggtcaggataatctacgcgaatcgcttatcgtgaccttggtggccggcgggcatattcttatcgaatccgtgccgggcttggccaagaccacggccgcccagacgctcgccacctgcgtatccggctcgttcaaacgcgtgcagtgcactcctgatctcatgccatccgatctggtgggcacgcaggtcttcgattttgcgtcgcagaagttcaccacgcagatcggcccgattcacgccaatttcgtactgctggacgagatcaaccgttcgaatgccaaaacccagtccgccatgcttgaggccatggccgagggtgccacgaccatcggcgggcagcgtatcgccttgcccaagccgttcatggtgatcgccaccgagaatccgattgaggaggagggcacgttcaacctgcccgaagcccagatggatcgtttcatgatgaaggccgtcatgacctatccttcgcccgacgaagaggctcgcatgctggccatgctcacccaccgtggctccgatatgatcggtcccgacaccatcaccggcgaacgcatttccgtgtctgacgttgattttctgcgcaaggcggcacgccgcgtgcatgtttccgacgcgatcatgcgttatgcggtcgatatcaccgccacgtcacgaggtgccggctcccgccccatcaagggactgtcgtccttggtgcgtttgggtgcctcgccgcgcgccaccatcgccttgacccgtatcggccaggcgaaggcgttgctgtccgggcgcgactatgtggtgcccgaggacctcaaggcgttcgctcatgaggtgctgcgccaccgtattatgctgacgttcgaggcactggccgatggcgtggtcagcgatcagatcgtcgacaagatcgtcgaaacggttcctgttccgtgagttccgattccgttcgcaagaaaatcgaggcccttggcactcagctgagcctgcctaccgtaaggaaggctttgggcgtgctggagggcgaacacgcatccgggcgtcgtggcggcagcggcgatgcgatggatgtgcatgcctatgagccaggcgacgaatcccgtcttatcgattggaagaccagcgcccgccaaggccgccccatggtggtcgagcgcgagcgcctgtcgacgtcacgggtctggttgctgatggacgttggcctggagatgactggcgtatgcccttccggagaacgcgcatggcaggttgccgccaatgcgctgcgtatgttcgccgcactgtcgttgcgccggtcggacgatatttcgctggtgttcggcgatgagtccagcatcacccgcgtgccgttcaacggtgggttcgcgcagttcgaacgcacgctggacaaggcgcttgatcgtgattgggatcatcaccgtaatatcgacgcgctgctggaatatgcgcgccgtatcaaggatcgtgaggcattgatcgtattggccaccgatgagcatgcgatggaggagcggcatatcaccacgatccgtcgtattacccgcacccatccgatggtgctgatcgatgtggcgacgatgaatccgttcaaggccgtctcatcccgccacgctcccgccgacggcttgagtgcacggcgtgtgccggcattcctgcgcaacgccaaggcagcggccgaggtcgatactcatcgcgcgtatatggccgcggctttggaacaggagctcacccgtgccggttcccatatcattcgagccgcatccagcgaatccatgttcgatcgtttcgtcgccctggtgtcccgggcattggcccgcaccacacgcaatagactgggcactgcacccgaactggtcggactgactttggcgggtgatctatgatgcacagcatgttccccatcatcccgctcgccactgatcccggcgatctcaggcccgtggagtcgttggccttgaccactcccctggtgatggccatcgtcgcatgcctgttgctggcggtaggtctgatcgcgttgatcatcatgctggctcgccccgcacgcaaacctcggaacagcgaccgtgcgcgtggcactcatagcaatgccagctccaaggccgagtggcgtgcccgcatcgacgatgtggtggcccgtcatgaatccggagcactgccccgtcatgaggctttcgtcgaattggccgtcatcgcccgtgatttcgccggtgccgcatcaggcaaggagcttagttccagtacgctgaccgatttggcgtacctgaatcgcacgcccgcgaatcgccaaggattggacgcattgaagcagaccattagcgcgttgtatccaccggaatttgccgatgatgcccgcaaccgaatcgcccagacgaccagcgtgcagcaggccgccgagtgggtggcgaatctggtggaaaggtggcgttcatgatgctggcatggcattggccttgggccgctctggccggcgtcttggcagcgctggcgattatcgtgctgattgtcgtgttcgcccgccgtaacgccgccgacgacacccctgtattctcgatggacgacgatctcaataccgagcacgcttcccgtctgttccgtcaatggcgcgctttgggccgtctcgccatcagcgtgctggtgcttgcgctggcgctggccattgtgctggtggctcgccccagccaagtggatgccggtgacgaacgtgcttccagccgagatatcgtcctgtgtctggatgtgtcgggatccacgctcccctatgatcgcgaggtcatcgatacctatttggagctggtcaagcatttcgagggggaacgtatcggtttgagtatcttcaactcgacctcacgcacggtgttcccgctgaccgacgactacgaactggtcaccaaacagttgacctccgccagcaaggcgctgaaaggcgtcgagtcgcaggatgacatcgataagatgtccgatgccgaatatcaggacatcgccaattggctcgaaggcacgcagaaccgcaaggacgccacctccttgattggcgacggcgtggtgtcttgcgcggcgatgctccccggtttcgcttatggcgaagccaatcatgcgaatgccgaccgtcagcgtgcggcatccatcgtgctggccaccgacaacgtcgtgtcaggcaaacccacctattcgctgaccgaagcgttggacttgacccagcagaccaaaatcaccgtggacggcctgtattccgggccgaaagccagtgaatcggaccaaaccacaacggatatgaagtccgcgatcgagtcgcatggaggcatcttcctcacccaatcgaatggcgcgtcgatagatgagctggtacgggatattcagtcgcgtagagatacggatgtggagaacaaggcgaaatcctcaatggtggacgctcccggtctgtggacgcttgctctggccgtgatactcattatctggatcgtatgtgcatggaggttgaggcgatgaacggattcaccttctcccccgccttgggctgggtcgccgacggactgctggcggccgggctcgccgtactggccattctcgaaatcgtattgtttgttcgccgccgtgcttccagtgacgagaccgtgtgggcttgcatacgacgtacgcttatgctgctcattgtcgcggtgatggtactgactcccagcgtggtatcgtctaccacctcacaggtcatcaatgccaccgacgtcatcgtggcggtggataccaccgggtcgatggcggtggctgatgccacatacgggtccgagaagaccattacccgcatcgatgccgcgcgtcaggccgtgcatgatgtgaccgctgcttacccggacgccagtttcgcggcgttacggttcggtgcttcgggaacacttgatgtgccgctgaccccggatgcgccggccatcgataattgggccaacacgttggcggtggaagccacatccgtgtcggcgggatccagtctggatgctccgatcgatcaattgctgctgaccgcgaagtcgattcgtgaagcgcacccggatgatgcgattgtgctgtacctcatcactgacggcgaacagacctcgaatgtgacgcgtcgtacgttctcgtcactgcgacagtatctcaatgatgggtttaccgtgggcgtcggctcgaccgagggcggcaagattcccgtcatcgccgatggcgtcagtgccggcgattccaacaccacggaccactgggtggtcgacccggataccggcgaacccggcatctccaagatggatgagaagaaccttaaagacattgccgacgagatcagtggcacgtatgtggccgtggacgcttcacagactttggcggattcggtttcggccaggtcgtcgaagcagtggcgcatgaccaccacggtcaaggagcgcacacgcaccacgccggtggtatggccgttggccattgcgttggcgatattgcttgccatggaagtcggtgcatggatcgcgacctcaaggaggctgctgtgaggaacagtaacgaaatccacgagaacgatggctcggcgaatattcggatgcgggcgaaatgcccgctttgggcacgtatcgtcctggcttgtggcaccgtattgctgctgctggttgccggcgtggcggcagtaaacctgtccgcttcgattacgttcaatcaggccaccgcatcattgaatgccaatatcaaagcggctcaggatgagtcgactgatatcaccacgctcaaggcgcaacagcagcagaccgatgcgcaattcgccgaggccgggcgaatgcgtacgcttctgttgccgcaagtcaaggacgccatcgacaccaatgcttcgatttcttccgagctgacgaagatcaccctgaaacaggccgaggcgcagaacagcggttccgattccgggcaagcccagtcggcgcagcaatccgagagttcctcagccaatgccaaaaagggcggcgcgttgaccgacgagcagaagaagcaggtcgaggagctgatgaaggccaatcagcaatccaccgatacccagtcgaacaccacccaatccaagcagaaggcgacgcagaacaagggtaccggggccaccaagccgtggtaagcagtcgttcacggttgctctttttctcacatcctcacgggtcatggccttatcgcggctgtttcccggtttcggctgtcggctttggcgtttgtctgatcccgctagcccatggctgatccaaggtgtgcccaaacaggctatttgtggataatcgttacggctatacacaacacttgtgaataacttcgcccaaaatcggcaagctagaaccacattggtcgttccggctggacaagcatgagtcctgtccttttagctggatatatgaatacctacaccagcaccccagcacccatcgatcccgccggcggctttgccggcaatacggtgacgccgttcgattacggcacttgcccttgccatgcggcggtacagcgtagtcgcgacctcgtgtccgtccaacgtgcggccacactggcgcaatcggaccagatggcggtggccgtgaaccgctctcgcaacatcgtgtggaccggtaaagccgccgacctattccgatcgcggctcagtcgcaccgcacagtattcggccagtctcgcgcaagacatggagaccacccaccgattggcttgggggtcatcatgagcgagcacgattactggcaggtggaatcgtccgtttacggcggagtgggatatgcgccagccactcttgaagaatatgccgccatagccaaggctctcgatgacgaggcggcaggatttgcggccatagccacggcttgggaatcggccgcattacagttgcagtcacatcggcatagtgcgccgatgtgcgtcaccttgcagtcgggcgatccgagcgccgttgttcccggccatgtcactgcaccatatgccgcgctgggcaatcggtgttatgaccatgcaacggcatgtcagcggttgagcgatgacctgcgtggcgcggccgatctgctgattcgcgcacactctctgtattctcaggcggagatgacggctcggcgcatgtttaccgaattattgcaggccggtacacaggccaaaccgggatatgccgcggtgggtgttgccgctgtggcggcgggcggctttctggccggctgggctattgacggcaaaccgaacccagcatggatgtccacgttcacctatccgttccaggaaggagtgctcagcggcgcgggcggaatcattggcggcgtacctatcggcaagagcattgcgcacaccgatgaggtcaacaaggctgcggggaaaatcgccaatttctccggcccggcgaaagacgtcgtccaaggcaatcatctgaacgtgcgcgaggtgcaggcgaatgccgacgtcgtccgtgcaagcggatcggtggccgagtcaatggagaatctgcgcaggctcgccgaagaacggctcggcaaaatcgagctgaacagcggactcgaatatgggaccatcgccattcaacgctatgaacgggctgatggaaccaactcctggctggtcaccatcccgggtaccgatggacaacctgactcaccattcggctgggcgcagaacgtggaactgatgagcgccgatcaggagcgccgcaggaaagcggacagcgctcgcacggttgccgaggcgatgcgtcaggctggtatcggcaaggacgagcccgtggcactgatcggccactcccaaggtggcatcgttgccgccacgcttgcctcggattgggcagaggaatataccatcgagcatgtggtgacagccggatcgccggtggccaatcatccgattccgcaacgcacgtgggtcaccagcgtggagatcgatgatgaactggtcgccgcgctggacggtgccgccaacccggtcaccgataattggctcaccgtgcaagggcatgtatcgcccgcgcccacggcaacaccatccacagtgcattcggacgtctcatgcactcccggcgcaacgcccatcaacggtctgaccccatatgacgccgcatccgtggctggttcgaccaacggcagggagttgtcgcattggctcaaataccatcaggccgcttatcagaacgccaccgacctcggctcccccgccgtgcagcgccacgaagcgcattttcaggaagtcatcaacggagaactcaaggaaacccgctattaccaaggccgcatgacccagtccacaaccattgctcccggcgagcgcaccaccgagttcagcacgttcggcggttaaaagtaaataccacacttgacagagttgtcaagaaaggagttaacaatataatgacgagtaggagatggctcatcaaactgatgaagcaagcggcgaaacgcaagaatattacgtttgagagtatcaggcaaagagggagtcatgagatattccaactcgatggactcatgattcccatcccacgccataacgaaatcgacaacgacctcgcgaacatcatttgtaaggaagcagaagccaaactcgggaaaggctggtatcagcagtgaaaacatatcaggtcatcgttcgtcctggcgaaaaatactggattctcgagattcccggtatcggtttcacgcaggcaagaacaacagcagagattgaaagtacggcacgcgaccttatcaccgtcatgacgcaagatgctgatttcgcactcaccatagagacaaaactgccgcaatccgtacaagagcaccttgatgaagctcggcgactgcgcaaggaagaagcggaatgcagatcgaacgcagcgcgggaaactcgcgccgcggcacaagaactacatggcatgggtctcgccctacagcaaataggcgatatactcggggtctcacggcaacgggcacatcaacttgtcaatgctgtcaatgcttagcatcaatcggctaccccccacaatgcaatcaccgcagagacgcgactagcgccactttcccgggattgttgcgctagcatgcccgaaaccccctctatcagcgcaacattcccgggaaagtggcgcgcaaagagtgtcaggcgcgtcgctcgatgagtgcgcggccggatgcgaggcggtcgagcacaccggttttggcgatggccagcatcagataccaggccatcacgccgctgataagcacgccgccggtgacctcggaaatcatgtgcacgatgccacgcgggctgacgaatgacacacccacgtagcgaaacagcatcagatatgtgccgtattccaaggcgaccaacgcaccggatgcaatggaaatcggcagattgaacatgcggtaacgggtcaaagcgaacggaatctcagcgaaaacaccctgcagcagcgccgagataatcacgaagcccaaatcgaactggctaccaatcaccgtttcgaccagcgtgccgataaggttcacgtacagcgccgctccgggtttgcgcagaatcagcaccgccagcgtaccggagaaataccagacggcgtgcacgatgctggcgaaaccgggcagaatcgcaccaaacaccgaagagatcggcatgtacgcgaagttgaatccccagaagatcacgccgcaggccgcgcccagtgtggcaccgaccgcgatgtccaacggctgccatttcagcgacgatacggcgaccgaacgtttcggaagagtatgaatggtggttgcaggcatggtgatctcctagccttaaaggccgcacacagtaatcgaatcacgggcgttccttgacctgtgcggctcgggcgggaacgccacaccacagtgtagccgctcggttcacggctggaagtacccttggaggttatgaagcttaccgatatttcccccgcaatcgcattgaccccgctcgacggccgttaccacaaggccaccgccccgctcgtcgaatacatgagcgaacctgccctgaaccgcgaacgcatgcgtgtcgaagtcgaatggatgattcttctggccaacggctttgagggcaacggcaaccagccaatcgttgacggcgtcaagccgttcactgccgaagagcaggccttcctgcgcgccattcccgaggacttcggcgccgaaggcatcaagcagcacgccgctcatgaggccatcacccaccacgatgtgaaggccgtggagtactacatcgatgatcagatcgacaaggctccggccgagctggccaacatcaacgacgagctgaagaccctcgtgcacttcgcctgcacgtccgaagacattaacaacctctccatcgcccgttgcgtcaagaacgcgatggaaaacgtgtggaccccggagttcaagcgcatcatcgaccacctcgccggcaaggccgaggaattcaaggatatgccgctgctctccctcacccacggccagccggccacgccgaccacgctcggcaaggagctcgccgtctacgtctaccgtctgaaccgtcagctcaagcacatcgaaaaccaggagtacttgggcaagatcaacggcgcgaccggcacgttcggcgcccacctggccgcatgcccggatgtcgactgggtcgccgtctcccgcgaattcgtcaccaaccgcatgggcctgacctggaacccgctgaccacgcagatcgaaagccacgactggcaggccgagctgtactccaccgtctcccacgccaaccgcatcatgcacaacctgtgtgtggacgtgtggatgtacatctcccgtggagtgttcgcccaggtgccggtcaagggtgccactggttcctccaccatgccgcacaaggtcaacccgattcgtttcgagaacgccgaagccaacttcgaaatcagctgctcgctgctcgacaccctctccgccacgctggtggaatcccgttggcagcgcgatctgaccgattcgaccacccagcgcaacatcggttccgcgctcggctactccttgctcgccctgaccaacctcatgggcggccttgagtccatccacccgaacacccacgtcatcgagcgtgagcttgatgagaactgggaggtgcttggcgagccgatccaaaccgccatgcgcgcctgcgagctcaagggcctgccgggcatggacaagccgtacgagaaggtcaaggagcttatgcgcggccacaccatcaacaaggaacaggtcgagcagttcatcgaccagcagtccttcgacccggaaaccgccgctcgcttgaaggctctgacccccgccacctacaccggtgtggccagccagctcgtcgctttcgaccgctgaaataggtgcgatgcgagtccctcgagcccatcgcatccaccacactactgcgctgagtcacaaaccaaaccacaaactgaaccgaacaaggacaggcgtcaggtaaccatttcatgactactgaacaggagcagtccactacggaagatcgcccggacaaggcgacctcctccactaccgaccggccgatcgcctctggtgacggccggtcggccagttttgctgtcagcggaccggacagcccggcaaccgacgacagcaacgattccggaccgtacatcgacgacatcgctccgcgccgcacgcgcgacttcggcgatctgacccgggccggtctgtcgctgttgatggccgccgtggtcatggtgttcgccgtgtatctgggcggcatgacgcgcggcgtcgaatccgacgcacacaccgcagcccaggtcatcaactggttggctgacttcccctccaccgtgctgacgcagctggccaccatcgtcatcgtgatcatcgtgctcgctcaattgctactggcccgggaatggctgcaggccgcggtgtccgcgctggccatgttcgccggctacggcatggtgtgggtcgtatcgacggcaatcagcagtctgaacgatttcaccctgccaatggcactagtctcagccgccacctcatacggctccgggctgttgcccgacatctacgccggcatggcgtccttcctgaccgccgccgggccacgccgcacccgctccacggtcaaatggagctggaatatcctgtatgccatcgctgcggtgatggtggtgctgtcgtggcattcggtcaccggcatgctggtgtcgatggccgccggccgcacagtgggcatgctgatccgattcgtggtcggcacgcagaacaagggcgtgtggggccaagatctggtcgccgccctgaaaggcatcggactggacaccgcctcgctgattcggcatcaggagcccggcgtcggccacggttcactggccgtcacgctggacgacgatctggccgaaggctcgcgcatctacgatctggataccacggacaaccgtcgtttcatcgtttccgtcatcgacgcgcagacccataccgtcggctatctgaagcagttgtgggactgggtgcgtttcaccagtgtgtccatccgacgtgaccgttccgtgcgtgacgccgtccagcatcatttcgccatgctgctgggtctgcacaatatcaaactgcccgcgcccgcaccctacggcatcgccgataccgacgaatccgcgattctggtgctggatgcacacaccatcgaactgcccgccaacctgaacacgcttaccaaggcggatgccgtggcctacatgcgctacctgtccgtggcgagccggcgcggctatacgcaccggcgcatcacgccggacacgctcgcccggcttgaagacggcaccgccgtgattgccggctggctcaacggcgacaacgcttccggtccggccaacaccgcgctcgacaaagttcagctgctagtgctgttcgccgcgctgatcggcgtggaaccggcggtggaggccgcccgcgaggcgtggggagacacgactctgacggccttggccccgttcattcagaaggtcgcggtcccctcccccacgcgcgcgctggaatcctgggacaagcagctgctcaagggcctgaggagtcgtatcaccgcgctggctgacgaggagacggtggaatccgccgaaccggtgacgctggcccgattctcctggcgttcgatgatcaccatgctgctggtcatcgtggccgtggtcgtggtcttcacccaactgaagcccgaggagatcatcaccgcgctgaccaacgccaacccgttgatggcggtggtgacgctcgcgttcggtgtctgcggctggatcggctcgtcgatttcgctcggttccctgatggcgcggcacaagcgtgacaatatgggcgtcttcatgagccaggtggcaggcggcttcgccaccgtatccatgccagccggcgtgggcccctcgttcgtcaacctgcagttcctgcgcaaatccggctatcgcaacacccaagcgaccgcaattatgagcgccgtgctcgtggtgtattacgccgtgtacttctccatgctggtcatcatcggcctgttcaccggccgcaacatgttctccggcgcaatcccgacaaacacgttggttatcgtgctgggcgttgtggtcgtggtgctgtccattgcgatgatgattccgccgttgcgccactgggtgacccgtcgtcttatgccgctggccaagacgtatatcaaccagctgctggacgtgctttcccagccccgacagctcacagtcagctgcctgggcgcgctgttccagaacgcgaccactgggctcgctttctgggcggccctgcaagcgttcggccattcatcgaatccgattgaaacgacgttcgtcttcctgctggcctatgcattgggttccgcagtgcccactccaggcggtctgggcggtgtggaagcggcgctgacattcgcgttcgtggcggtcggagtgccgcagggcgtggcgctttccgccactttgctgcaccgcgtggtgttctactggctgcgcattccgctgggcgcggcggccatgaagtggcttgacaagcataatcttgtctgattcgtctattttcatacccccttcggggaaatagatgtgaaaacccttataaaacgcgggttttcgctgaaacatgcgctagtatcattgatgacaacatggactaagcaaaagtgcttgtcccctgacccaagaaggatgctttatggcatacaacaagtctgacctcgtttcgaagatcgcccagaagtccaacctgaccaaggctcaggccgaggctgctgttaacgccttccaggatgtgttcgtcgaggccatgaagtccggcgaaggcctgaagctcaccggcctgttctccgctgagcgcgtcaagcgcgccgctcgcaccggccgcaacccgcgcactggcgagcagattgacattccggcttcctacggcgttcgtatctccgctggctccctgctgaagaaggccgtcaccgagtgaccttctgctcgtagcgattacttcgagcattactgacgacaaagaccccgaccgagatggtcggggtctttttgttgtggtgctgtgacgtgttgtccaaccgtattattccggactagttcagcgcttccataagctgctcgaatcccagggtgggctcggcctcgaagggatcgaggagtatggcttcccggcgttcgggggcggtcagggtcaggtgggtccagtcggcggagaactgggctccgacgttcagggccgcgtccacgaaccggccacgcagggcggcacgggtgtcggtcggcggattgtgcacggcgtattccacgttgtctcctgtcagcagctcacgcatctggttgcgggctacgagcgaaccgtacaggcgaccgttggcgatgtcgtggtagtcgagctcaagctgttccatctgggcgaaggtgacgtccgggcgacggcgtttgagcgcgtcgaacagacgcttcttggcagcccagtccacgcggtcggcgagcgcatcgtatgcaccacgctccagcgcgtccagaacgcggctccactcccccataatcgtgtcgatcgtggtggccggcagcgaacttgccagcgcatcgccatgggtttcgatgaaggccttgaccgccgcataataccggcgctgcagacccagtgcggacacggattcgcctgattcgagcgtcagttcggcgcgcggattgtcaaggaatcgactgaccgtgcgattggcggcagccggatcagcaaaggcatactgctcgaatccggacggaacgccatggcggaaggcgtcttcgatcgcgcacagcacaaggtgcgtgacggcaagcttcatccatgtggaccattgcgaacggttcgagtcgccgatgatcacatgcagccggcggaaggagtcggggtcggcgtgcggttcgtcgcgcgtgttgaccatcgggcgggagcgggtggtggccgaggagacggcctcgtccaggaagtccgcgcgctgggtgatctggaagccgtccggggtcatgcggccggcaccggtgtacagctggcgggtgatgaggaacggcagcagctggtgttcgatggtctccaacggcacgaagcggcggaccaggtagttttcgtggcagccgaaggcgtggccggcggagtcgacgttgtttttgaacacatggatcgtggcgtgtgcgccgtaggattcgcgcagcttgcgctgggccttcagggctaggttgcgcatcacgtgttcgccggcgaggtcctgggccagggcctcgcgcgggtcgcgcgcttcggcggtggcgtattcggggtgggatccgacgtccagatacagacgtgagccattggccagatacgtgttggtggagcgggaacgggagacgatgggctggaacatggtcatcgccacctggccggcgtccacggggcgttcggcaccggtgaccgccacgccgtattcggtttcgacgccgaaaatacggcagaacccgtccatctcggcggatggtacgggttccgtggcgtgcagggagcgggtgccgctgtcacgcagttggggcatcactcgccgcctttttgcacgaagctgttgacgtattcctcggcgttggtttccaaggcggattcgatgtcgtcgaggatgtcgtccaacacgtcggcttggtcggtggactcggtttgggcggcggcctgcgtggtggcgagggcgtcgtcttcctgggtcgcggcctgctgtgcttgaggttgttcgaattgttgtggcatgttgtcttctttttgggctgtcaaactcccctcagtcagccttcggccgacggctcccctcacccgaggggagccggaggagtcaaaaaattatcgctggttgatggagtcgagccacggatactgctgcaggtaatgctgcagttcgcggatgatgagtccattggaggccactacatcgttatcgtgacgccagtggatgcgttcgccgtcccaacggctcagcgtgccctgtgcctcccagaccactacggtgccggcggcgatgcccgcgatatcccacacgtgcagcatcggctcgaagtaggcgtcataggtgccgtcggccactttgcacaggtcgagcgagacggggcccacgcgcttgatgtcggccgggcgtccggcgagcgaggaggccacgtcgagcgcacgctgcgattcgctggggatgaaggacatgccgtagctcagcacagaaccatccagcgaggaggtcatcgacggcacgaccttgtcgcgcttctcgccgaccgcggttttgtggatgcgcacggcacccgctcccctggcggccaggtaggtcaggccgagggccggggcgtgcacgatgccgatgatcggcttgggctcgttgtccgggccgaattcgaacagggcggcggtcaccgtccattcgctcatgcgacgtacgtagttgatcacaccgtcgatcttgccgatgtaccagtaacgctggccagggcggctttcggcggggcgggtggtccagaagccgtcgaagtgggcgatgtcggcgattctggcgctcatgaagcgcatgatcttgttgtccacttcaagcttgtagcgggggccacggtccgcgttctcggtgctcggctgggcgaggttacgcggattgagttggtcgtggagggcatgctggccggcttcttcgagcaggccggcgactttgagcgcaaggttgcgcaggtcctgtggggtctcttcgcgtgtttcttccatagctaccaagtctatcgttcggcgttgatggccagcgacttcagcagatcgatggcgtgttcggctgaattgagttcggtttcgcagtgcgccttggtgaaggcgagcggatcggagatgtcgagggagaacaggtgatggtcggtagcggccatatggccggcattgccgtagaattcgaccgcctcgccctcgtctgcggcgcgcgggtcgcgaacagtgagtcgggaccagctggcggcggccacctcatcgccgaattgcgccacgagttttgccctgagccaggcgcgggtgtcttccggcggttcggtggtggcgcgtgcgatgtcggcggcgctcaccacccgttcggtgcggggttcgagtttggtgaagatgctgtccgcggggtcgagcgccgcccatttcaggtcgatgaccttcagtcgcggatcattccatccgttggccacgccgggtgcggacgttgtggtgattttgcggcgcagtttttcgagcagctgccatttgagcagccattcgatgcggctggcctcgccggtcatggccagacgttcgtcatcatcggcggcatggcggatggaggcgcagtcgatgagcgcctgctgccacatcgccataatggatgtggtggatttgtccggccaggcgggttcgccggcggtgtcggtgccttcgaccagtgcggcaacctggtagacggcttggcgcagtttgagctggataagccatgcgttggtttcgccgccgttggccagcggcaagattgcccccagcgtcaggtcgcgggaaacggtgtgtatggcctcgactgggtcagacagttcgagttcgtcgaggaaggcgttcaggtcgaatccggcctcgtccgcatgttcgagcagccacagcagcatgctcgtggtgccgagtttcagtgcctgcggcacctccatgcgattggcgtcgccgacgatgacgtgcagacggcggtatgcatcggtggagtgggattcgtcgcgcgtattgatgatcgggcgttcgaaggtggtttgcaggccgactttggcgtggatgtagtcggcgcgctggctgagctggtagcccgggatctcgctgttctcgccaatccctacgcggccggagccggcgtagatctggcgggtgacgaagtggagggtcatcaggcgtgtgaccaagtcgaatggcaccgcgcgggccatcatatagttctcgtgcgtgccccagcaggagcccttgccatccacattgttgcgatgcagggcaatgggagtgccagtctgtttgcgggcgcgttcggtggcggcctgcatgatgaggtctccggcgtggtcgtatcggaccgcttcgaacgggtcggtggtttccggcgccgagtattcggggtgggcgtggtccacatagacgcggccgccgttgggggcgatcacgttggtgatgttgagctgcggggcgtcggtgagcatgtccgggcgggcggcggcgcgttcgagacgggtgccgcgcgcgtcgttgaccgggtcctcctgccggtagtcccagcggatggatttgctgtggctgtccgcggcgccgttcaccacgtcgaaggacagttgcaccggattgtagcggtccggggtgttcagggataccgcgtattcggtttcggtgcccatcactcgtttaacggtcatgtagtgctccttgagcttgagctattcggcggtgcggatgcggcggatcgggtccatgccgttgatgcgcgaccattgttcggggtccacgtcggccatggaatcgcgggtctcgcggtattcgtcttccacggcggcagcgagcagcggcacggtgagtgccacgtccaagccggtttcgatggattccttgaccgctcgggtcttggcccggtccacgatgttcttgagcatcgcgccggagaccacgtcggccaggaacaacgcatgccactggccgttctcctcctgcacgtcgcatagatggcggcgttcggaggttccgtagatgtcatgcaccagcacggcggacaaggcgtgcgcgtcgacgccatcttccagaggcaggtcgtcggtgaggtaatggtccacgatggcgatggcctgattggttttgggccggtcgacgcgaatcttgacgtcgagacgccccggtcgcaacacagccggatcgatcatgtccacgcggttggaggcaccgattaccatcacattgtcgagtgattccacgccgtcgagttcggagaggaactggggcacaatcgtggtctccacatcggaggagacgccggagccgcgggtgcgtagcagcgaatccatctcatcgatgaacacgaccaccggattgccgtccgcggcgcgttcacgggcgcgctggaaaatcaggcgaatcagtcgttcggattcaccgacgtatttgttgagcagttccgggcccttgacggacaggaacacgcccttgacatgggtttcggccggactgattgcgccgtcgccattcgaatcgtaaccaccctcgcatagggcgttcgccacggccttggcaatcatcgtcttgccgttgccgggcggaccgtacagcagcacgccctttggcggcttcaaatcgtagcgctcaaacagcgcacgatgctggaacggcagttggacggcgtccctgatacgaccgatctcactatccaggccgccgatgtcggcgaacgtgacatccggggtctcctccagcaccagatccttgtcgccctcggcgggcagcacttcgatggcgaggcggacggacggatcgacgataatacggtcgccctgattgatgcccgcatacgcgagcgcgccggaacggcggatgagcacgggattgccggaggcgtcggtaacgatcagtcgaccgtcgtcaagtacctgcttgacactgcgaatctggcccacggtgtcagcatcgcgctgctcgaccagcacgagcttctcgttgagcatcacggtggctccggcggtcaggcgggcggcgttgacgttggaggccacaggcaccaccatgcggcgggtgccggaaatgacttcggccgacgcgtgctggatgccgtcttcatcggtgcgggtggaatcgaccttgaccatggtggcgaaggtgagcggcggctgagcgagctgggcgagctgtgacttcgccttggtcagttccttgccggcgcggctcagcgcttcggcgagcgcatggttcttggccatcaggcgatcgttcagcgcggcgagatcttcggtgtcgctcatgcgggttcttcgcttcccttctatccgggattttcggcaacttatggcagtcggcagaccctattcgttgccgtcggcggatttcctgttacgtataacagtacgcacttttcgcaccacgaaccatacgatgaccacaatcacggccgcgatgaccacgtcctcgaacacgccgagcgcgccttgaatcgagcaccactggtcgccgagcaggtaaccggcggaaacgaggatggtgttccacacggccgagccgagcagggtccagccggtgaagtgcaggaagttcatgcggttgaatccggcgggaatcgaaatcagcgagcgtaccacgggaatcacgcggccgatgagcaccgaccatgtgccgtatttggtgaaccagtcgttggctttgctcacgtctttgcggctgacgccggggattttgtctgccgcgagattgatgcgatgcaggcccacccagcgggagatgccgtacaaggtccaggcacccagtacggagccgatggtggcccagatgattgcgcccggcagactcagggtgccgcgtgcggcggtgaagccggcgagcggaagaatgacttcggacgggatgggcgggaagatggattcgagggcgatggccaaggccacgccgataccgccgatggtttccatcagcatgatcagccagtcggtgatggtgccgatcaggccgggttcggtggtggtgcagatgggtgtggggtcggttgcaagaatagtggcggctgccatggaaaaactcatagagggcattgtcccaaggttttcccagaatcagaagcatgacgcaagaagatgtgcattttgttgacaagtccgccgagagcgaagttgggagcccggctgattctgcggtttctgtgccgacgctgagcaagcccggcctgctggttatggatgtggactccacgctcattgacgaagaggttatcgacgagttgggcgtggtggctggctgcggtgaggagattgccggagtgaccgcacgcgccatgcgcggcgaactggagttctgcgatgcgctgcgcgcacgagtggccctgttggagggcctgccgatctccgtgttcgacacggtgcatgacaagctgcatttcaccaagggtgcactggagcttatcgacacgctgcatgaacacggttggaaggtcggcgtggtgtccggcggcttccatgaagtggttgacatgctggcggccgagggccatatcgactattggattgccaaccggcttgaggttgccgatgggtgcttgaccggcaaggtgctcggcgaaatcgtgagcaagaccgtgaagctgcacgccttgcaagcgtgggcggaccgtttgggtattccgatgagccagaccgtggctgtgggcgatggcgccaacgacattccgatgattcaggccgccggtctgggtctcgcgttctgtgccaagccaaagacccagctcgccgccgacaaagccatcaacgaccgcgacctaacccacgtgctcgattatctgcgccggtaaaattttaccgacctcggctccggcacttatagttgagccatgactacttcaggcgcagaacagttgacgcttgcggggctggctccccgcaagcggcgtaaacgtgcgcctgcggagcatacgccggccgagcagcatcccatagcgcaagtcgtgttggatgtgcaggcgctccacctcggccagacattcgattacttcattgatgaaaaagacagcgaggccgcacaaccgggtgtgctggtgcgcgtgcggtttggcggtcaaagggtcagcggcgtgatctgggcacgcaccgataccagcgataccccgcgctcttcgattcgctatatcgaacgggtgttgagccccgatgtgctggttcccgcatcgatgcgtgaggatatcggtctgattgccaaagcctatggcggcacacgggccaatattctgcgtttcgctgtgccaccgcgcgtggccaaggtggaggccgaacagcggttagccgcgtcgttccgccgaccggtcggcggctccctaccagataatacgcaaggcggttttgccgggcgtggcaccaatcccgatgggaccatgcctgctggctctacctttgccgttgccagtaccgtttcggagggggctgcgcaggggtatcgtcgtctgaccgccaattacgccgacgtcaatgtgcttcatgatgcgcttaccggtcagcgtttccaatcttttgtgtttgattcgctgcccggtgcacaggagtggcaacggaacatggcatggatggtggccactgcgctgagtgccggtaaagctgccgtggttgaattgcccaccatgcgcgaggtcgaagacctgatgcctatgctgcgcaattatgggctcaaaccgttcgcccctgctccggccggcggctgggtgggcgacgtcgccgtgcttaacgcggagaccatgcccgcggccgaccggtatcgcacctatctggctgtggcgttgggacaggtgaaggtggtgatcggcacccgtgcggtgatgtatgcgccggttgaaggcccggcgctgttcgccattctggaggatgccgcctatcagaacatggacggtatgatgccatatccacaggcccgtggcgtgatgcggctgcgcgccaagtcccatggcggcgtgttcgtggccatggccaatgcgcgcaccccgcaaagccagtgggaaaacaccggcccggatacggtggagaccccggtgagcggctattccaccacaattcatccgctcgcctcgccgctgaaggacgccactccttgggtgcgttggctcaatcgcgatgaacttgcgcgtcttgccgacccgtccatcggggcgcgcgtgccgcatacggccgtccgcgtgctatctaaggctttggagagcggccccgtgctgctgtccattccgcaagacagcgtcagtgagactctgagttgtgcgaaatgccatcgtcaggcgcgttgtgccaagtgttccggaccattgcaactaccggccgaccgccgggactccacaccgcgatgccgctggtgcggggctgccgccatcaactggaagtgtccgggctgtgggcatgaacgtatgcgcgtggtgcgcgtgggtgctgcaggcactgcggcggagctggccggattgttccgtggcgtgccagtagttttgtccagcaagacgcagggcctggtgcgcgatgtggcttgtcagccgatgatcgtcatcgccactcccggtttcgaaccgcgcgtgcgtccggtcagtgccgagcagggatcggctggccatgagtatcgtgccgtggccgtgctcgacgcttggaccagcttgtatgcgttgggcgtggatgctcgcttggatacattgaccgcgtggatgcgtgcggtgtcgttgtgcgcgccgcgttcccgtggcggccaggcgttgattctcggcgaaaccgacccggccatcgcccaatcgctgatgctctgggattcgaggattcttgcagccaaggatcttgaggagcgtgtggagaccggtatgccgccggccgtggccgccgcctgcgtgtggggccgccgtgatgcggtgatgatgctgatgcagcgtatcggcgccctgggcggcgattggacggcctgcggcgagctgcccggcatgttgggcccggtgccgatcgcgcaaccggacacggtcgacgcccgggagctcgaagccacggccgaccgggtgaaggcagtaatccgtgtgccgcagagtcggcgagccgagctggcggcccgactgcaccgggaaaccgctcgtcatgtggcgtcccgcgaacccggcgagcttcgcttccgagtagatcccaaggacctgatctaatcgtcttcaacacgtgaaacgataattacagaatgaacatcgctagaaggaggacactatgaagggttggcctggagagccggatatggattacgacgtgctggtcgcggatggcgaggccgctgcgaacgccggcaagccgatcaccgacgtgatcttcgatttcggcaacgtgctgatttactgggatccggtcgccgtactcatcccccgctacagccagaagaccatcgacgaattcctcgacaacgacatctccggcttctacgatgtcaacgacctgatggacggcggcaccagcaccgacgaggccatcgccatcatgcgccgtgacaagggcgataagtgggcggacatcctcgactactacatcaagaacttccgcgactccctgaccggcatcgtgccgggcgcgcgcgtgctggtcaatgacctgaaggctgccggcatcggcgtgtggggcctgagcaactgggaatccagtctgttccacgtggccgaggaacagtgcgatattttgcagcagcttgatggcaagctcgtctccggttttgtcaagctgcgcaagccacacaaggaaatctacgaggccgcgttgaaccagttcggcatcaaggccgatggcgcgttgttcatcgacgacaaggccatgaacatcgtcggctcgaatgcggccggcatccgtggcgtacgtttccaggatccggtcaagctgcgtgaactgctcatcgccaatggcgtgaacattccggccgtgcagtgagcatcgacatttcaaggaggaccatgctcaaactcgtgttcgccggcacccccgacgtggcggtgccctcgctcaaggcctttgccaccgatccacgttttgatgtggtcggcgtcattacccgccccgatgcgcctaccggtcgcggccgcaagctcacgcccagcccggtcaaggctacggctctggagctcgggttgcccgtcatcgatctcaaaccccgctcccccgaattcatggaggcgttgaacgacctgcatgcggatatcgccgctgtcatcgcctatggcaatatcctgcccaataacgtgcttgatgcggtgcccatgggctggtacaacctgcatttctccaacctgccgaagtggcgtggcgccgctcccgcccagcgtgcgatttgggcgggcgacccgaccaccggcgccgacgtgttcaaggtgggcgagggtttggatgatggcccgatcgtcgcttccctgaccatcgaactgaccggccgtgagacttccggcgaactgcttgaccgtctggccgaggaaggcgcgcccatgtatgtggatgcgctggccgccgtaggtgaaggcaccgccacattcaccgcgcagccggccgagagcctggaatacgcgcacaagatcacggtgaaggacgcccgcatcagttggacggacgaggccgaggccatcgaccgtcagattcgcgcctgcacgccacatcccggggcatggaccgaactgtttgcggaagggccaatcgccgataatgacgagtcaaccgctaaatccctcgccctgcatattctcgccgcacaaccggccgaccagtccaatcccaacactccggccgagcttcagcccggcgagctgaaggtgggcaagaagaacgtgtgggttggtaccggcagcacgccgctggaactcacccaagtcaaggcgcaaggcaagaaggccatgcgcgccgccgactgggcccgaggcgcacgcctctcccccgccgcctgcgtgcgataacaagcaatatcgctcccgccttcggaagcacagtaaaggcccggcatcttcataaagaagatgccgggcctttcagctatgcaatcggcgatcagttgagaccggagagcttgttgatcagctccgggtcacgcgtcgcacccttgtcggccgagcgggcgaaggcggcgtacgccttcagcgcctgggagacgtggcggttgcggtgagccacgtagccgtcgccagcctcaagctcgcgacgacgctcgtccagctgctcgtcagtcagttcgacgttcacggaacgggcttcgatatcgatatcgatgatgtcgccgttcttgatgagcgccaccgggcccttgttggcagcctcaggcgccatgtggccgatggccagaccggaggaaccgccggagtagcgaccgtcggtgagcatggcgacctgtttgccgatgcccttgcccttgacgaaggaggtcgggtacagcatttcctgcatacccgggccgcccttcgggccctcgtaacgaatcacaagcgccatgccaggcttcagggtgtcgttcagaatgacctcgatggcctgctcctgggagtcgaccaccagagccggtccacggaacttccagatctccggcggaacaccggcggtcttgaccacgcagccgtcgggggccaggttgccgcgcagcacggcgaggccgccttcgtgaatctccgggtggttgatgtcgtggatggcgccgttggtgcggtcgcggtcgagcgagtcgaacagggtggtgtgcgtccacggctccggggagatgatgtggccaggagcggccttgtacatctgctgggcttcctcggtgcaggtcgggcgcatgatgtcccaatcggccagcttggcttccagcgtcgggtagtcgatggaatgcacgttggtgtgcagcttgccggcgcggtcgagctcgccgaggatgccggtgatgccgccggcgcggtgcacgtcggaaatctcccacttgccggacggcgaggccttgcagatgcacggcacggtgtgggaaatacgctcgatgtcgtccagggtgaagtccacgtcggcggactgggccatggcgaggatgtgcagcacggtgttggtggaaccgcccatggccacatccatggtcatggcgttctcgaaggcttccttggtggcgatggagcgcggcagcacggaatcgtcggaatcgtcgtagtactggtgagcgatcttgacgacttgcttggcggcacgcttgaacaggtccttgcggtaggagtgggaggcgaggatggtgccgttgccgggcagagccaggccgatggcctcggtcaggcagttcatcgagttggcggtgaacatgccggcgcaggagccgcaggtcgggcagacggtcttctcatagttgagcagttcctcatcggagacgctgtcgtcagcggtggcgtacatcacgtcgataaggtcggtgctcttgactgtgccgtcggcgagcaccgtggtgccggcctccatcgggccaccggagacgaacacggtcggaatgttgaggcgcagggctgccatcagcatgcccggcacgaccttgtcgcagttcgggatgcagatgagggcgtcggcgcagtgcgcgttgcactgatattcgacggtgtcggcgatgatgtcgcgggaaggcagggagtagagcatgccagtgtggcccatggcgatgccgtcatccacggccatcgtgttgaactcgcgcggaatgccgccggcttccttgatagcctcggaaacgatgcggccgaccttgttgaggtggacatggccgggcaggaactcatcgaacgagttggcgatggcgatgatgggcttcttgcccatgtcgtctccgctgacgcccgcagcacggtagagggctcgggcgcctgcaaagacgcgccctgacataatttttgcagatcgcatttcagtcatggttctattcaagcctttgcgagggacacgccatttgtcaagagtcgaataatggaatttgcaaaaacgtaatgtttctcacacatttttttggaatacattcctctggcgagagtccggtatagggctgacagaagtccccccaaacggctacacttgcttcggttgagatagattttccaatgtttggagataagaacaatggcttttggtactgacccgacacccgacggtcttgcgaacccgccgatcgacgatctgatgaagcacgccgattccaagtacgcgctggccattttcgccgctaagcgcgcacgccagatcaactcctacttcacgcagctcaacgagggcctgctgcagaacgtcggcccactggtcgaataccagaacaacgagaagcctctgtccatcgccttccgcgagatcgacgagggtctgcttgaggagaccttgggcgaggacgacgccaacgagggcaactgatcgattcagacgattcgtttggattgtttggacagttcgtcgccgaatgatggtgtgagagttctctcacaactgattttgagcgacacgcttgcctgagttatcgcaatcagctataactcatcatcaggagcgaacaagacgtaaggctcgagccaccgcgctggttggcacgggcctttatttatgcccgcttccgcagtgacaagtaaaaattgacaccgtatcattgtgcctcgcaccccgcggggcgataagtcctgaagaaagggatgatatgacagaagaacatcggcttatctccgccgaatccgtgaccgaaggccaccctgacaaggtctgcgatcaaatctccgacgccattcttgatgatctgctggcccaggatccgtccagccatgtggccgtggagacctccgccgccaccggcgtgttcctggtcttcggcgaagtcacgtccaaggggtactgcgacgtgcagtccaaggtccgcgaaaccctgcgcaacatcggctatacctcctccgaagtcggccttgacgccgattcctgcggcgttgtggtggccatcaccgagcaaagcgccgaaatcaaccagggcgttgcccgtctgactggcgatcaggagaccgccgccagccgcgaagaacgttacgaagcacagggtgccggcgatcagggcgtgatgttcggctacgccaccgacgagactccgacgctgatgccgcttccgatctatttggcacatcgcctcgccttccgtctgaccgaggtccgcaagtccggtgaagtgccgcacctgcgcccggacggcaagacccaggtaaccattgagtatgacgataacgataagcccgttcgtctggacaccgtgctgatctccacccagcatgatcctgaggttacgcaggattggcttgctgttgagctgaagaagcacgtgattgacccggtgcttgatgaggtgctgggttccaaggtgccgcatgacaactaccgccagctggtcaacccgaccggttcgttcatcctgggcggcccggcggccgacgccggtctgaccggccgcaagatcatcgtcgacacctacggtggcgccgcccaccacggcggtggcgcgttctccggcaaggacccgtccaaggtcgatcgttccgccgcgtacgccacccgttgggttgcgaagaacatcgtagctgccggcttggctcacaaagtcgagatccagatcgcctacgctattggcgttgccgacccggtgtccgtcaacgtggagaccttcggcaccgagcaaggcgtgacgcgcggccagatcgccgccgccgtacgcaaggtcttcgacctgcgccccgccgcaatcatcgacaagctcgacctgaagcgcccgatctacctgaagaccgccgcttacggccacttcggccgtaccgacgttgagttcccgtgggaaaagaccaacaaggtcgaggagctcaaggccgcgattgctgcggagtgaggtgctctaattaggacagagagatcataagaataccataagaatagggtgctttccgctgttgatggcggaaagcaccctatttgtttttcgcagtgtcctacgaatctgttcttatttcaatccacgcaccccagtggggtgcgacctgcacgaaattccgcgagcaacaatctgctaacaatttcaatccacgcaccccagtggggtgcgacttccgttccgccgccgtacatggcgagcttgagctgatttcaatccacgcaccccagtggggtgcgacgattgcgccaattccaacagaatcgtctgcatgtcatttcaatccacgcaccccagtggggtgcga

SEQ ID NO: 376 - DNA, 54045 bp, Unknown
  R42_10m  MAG No. k141_38058
accaagcatcgcaccataggcacctctgtcgagttgatctccaaagtcgtcgttcctgacgaattaatagccatgcgtgtggttggtcgtacgctggcggcggaatatcgcgaagcgcaccgtcgcacagattccactgacaggattcagcggcaaatggctgaatgagtcaaaaaccaatcgtcgtaaggccatttgccgactgctcggtgtcgaaacgttgggtctgtcaaaacggccgaccgaactgcggttccgttatctcgatccgggccacgacgattttggtaccgatcgtactgaacgcagcgcgaagattgctatgcgggagcctaagccgacgcccggccttcaatcggcggagcgacgtctttatgaacgactgtgtgctgacaaaaccatcgcttatcggcgtatcgaacaggaacgcattcccatgcgtgatgcagttgacgaattacgcaagcttggcatccccgtggagtccattgaagattttgtcccggttcgaacatcaatcgtttgacggacgtaccggggcagaatccgttgtcccggtttgtgatttcgggtgtttttcgcgaaccgggacatgttgtgttgccccggtatgggcgtcaatcgtttgatgcgagaatcgggacaacatggcgactctgagattggctttattccgccgtttccgttcgcgttttatgtggttcgtggaaactggaatgtcctggttctcgaaaacaggccaaaatcacgaaccgggacagcgggttttgccccgatgcggacgtcaaacgattgacatgtgaaccggggcaaatcagaggaggagaggtcttcgggatagagcttgactggggctgggcgcacggttgatgtcgcgtgggccggctcttgcgtttcggtccactgatggtccggaattttgcatactatggttcggttttccggcctgacacgccatcgaacaagcgttcgaatttggtcgtgagttcgggtatccttgggacagattcggcgcgcgcataaccgtgcgcgcgggaacggtgagatggaaggtggggtgtggctgtggcggcaacgcggactggcgcaaggcgcgcaacaagcgcaaagggcgcgaaaaccagcaagggcaagaacggtgaggtcatcgtcgaaaaggtgatgaccagcgactccttcctgagccgggaaatcaaaaaggcgccgctgatcgaacacgatggttcgctggtagctgatatctcgcacatcccgaacgatctcaagatcacgattcagggtgcgcgcgaacacaacctcaagaatgtcgacctggcgattccacgcaaccgtatggtcgtgttcaccggcctgtccggttccggcaaatcctcgctcgcgtttgacaccctgttcgccgaaggccagcgacgctacgtcgaatccctgtccgcctacgcccgccagttcctgggtcagatggacaagcccgatgttgacttcatcgagggcctgagcccggccgtctccatcgatcagaagaccaccaaccgcaacccgcgttcgaccgtcggcaccatcaccgaaatctacgattacctgcgactcctcttcgcccgcaccggcatcccgcactgccccgaatgcggcgagcccgtcgcctcccagaccccgcagcagatcgtcgacacgctgctcggctacccggagcgtactcgattccagattctctcgcccgtggtcaagggccgcaagggcgagttcgtggacatgatcgagctgctgcgctccgacggctacgcccgcgcgctcatcgacggcgagatgacacagctgtccgacgacatcaaactcaccaagcagaagaagcacaccatcgaggtcgtggtcgaccgactcgtggtcaaggacggtatccgccaacgtttgactgattcggtggaaaccgccctcaagctcgccaacggcagcatcgtcatcgacttcgtggacgaggaggaaggcagcccggcccgccgccagccgttctccgaacaccgcagctgcccgaacgggcacacgctcgaactcgatgaggtcgagccgcgcaccttctccttcaacgccccctacggtgcctgccccgcctgcaccggtctcggcttcaaactggaaatcgacccggacctcatcatctccgacccggacaagtcactggccgacggcgtcatcgaaccgtggagcggcaccaagatgacctcccagtactacggccacatcctcgaaggcttggccaaggaaatgggcttctccatgaagaccccttggaaggacctgccggacgacgtcaagcacgacatcctctacggccacgacttcaaggtcaacgtctcctaccgcaatcgctggggacgcctgcgtgaatactccaccggcttcgaaggcgtgatccgcacgctcatgcgacgccacgacgaaaccgattcgcagtccatgcgcgaatactacgagtcgtacatgcgcgaagtgccctgccaggtctgccacggacgtcgtctgaagcccgaggtgctctctgtcaccgtggacggcaaatccatcttcgacgtatgtgacatgcccgtcgtacgcgaactcgcctggatcaacggcctgaaactcgaaggctcggcacagctgatcgccggcgaagtgctcaaggagatcaaggcccgactcggcttcctgaacgacgtcggcctcgactacctgaccctctcgcgcgcggccgccaccctgtccggcggagaagcgcagcgcatccgactcgccacgcagatcggctccggcctggtcggcgtcatgtacgtgctcgacgagccgtccatcggcctgcaccagcgcgacaacgaacgcctcatcgaaaccctgcaccacctgcgcgatctcggcaacacgctgatcgtcgtcgaacacgacgaggacacgatacgccgcgccgactgggtggtcgacatcggccccggcgccggcgaacacggcggcgaagtcatctactccggccccgccaagcacctcatcgaagccaagcgctccatcaccggcgactacatcgcccaccggcgagagatcgccgtaccctccaagcgccgcaagatccacaagacccaggtgctcaaagtcgtgggtgcccgcgagaacaacctcaagaacatcgacgtgagcttcccgctcggcgtgctcaccgtggtcaccggcgtctccggctccggcaaatcctcgctggtcaacacgatcctctacccggtgctcgccgacaagctcaacggtgcacgcatcgtacccggccgccacaggcgcgtggaaggcgtggaccaggtgcgcaaggtgatccacgtcgaccagaacccgatcggccgcacgccgcgatccaaccccgccacctacaccggtgtgtgggacaagatccgcacccttttcgccaagactcccgaagcccaggtgcgcggctacggccccggccgcttcagtttcaacgtcaaaggcggccgatgcgaggcctgccacggcgacggcacgctgaagatcgaaatgaacttcctgcccgacgtctacgtggactgcgaggtctgccacggcaaacgatacaaccgcgagacccttgaagtcacgtacaacggcaagaccgtggccgacatcctcaacatgcccatcgaggaggccgccgacttcttcaaggcgtacaccggcatctcccgatacctgaagaccctcgtggacgtcggcctcggctacatccgactcggccagcccgcacccaccctgtccggcggcgaatcgcagcgcgtcaagcttgccaccgagctgcagcgccgatccgacggcaaaaccgtgtacatcctcgacgagccgaccactggcctgcacttcgaagacgtgaacaagctgctcaaggtgctgcagtccctggtggacaagggcaatacggtcatcgtcatcgaacataatctggatgtgatcaaggaggccgactggctgatcgatctcggtccggagggtggcgacggaggcggcaccatcgtcacgcagggcacgcctgaacaggttgccgaatgcgaatcctcatggaccggcaagttcctgaaatccatgctttagccttccattgcagctgacctcgggtgggttggggtggtatgttgctggacacgctccgggccgctcaggccaagtctttacggtccagcagcacataccaacccgcccaatccctgatgattggttttgcttaatagcgaggaggattatgacgaacgatattgagcggcatagtccggatgagtggcggaagaccgcggcggcgttaatgccggaaagcgtagctgtgggcgccggggaaacgacggcgaaggtgaatgcgaatggggcacctttgctgggggattctcgcgacctgttccgacccaagacctcggatattcccgccaaacccggtgtgtacaaatggcgcgacggggaagggcgcgtcatttatgtgggcaaggcgaagaacctgcgcaacaggctcaccaattatttccagccgctgtatctgctgcatccgcgcacgcagaccatggtgctgaccgcacgcagtctggagtggacggttgtcgccaccgaactggaatcactgacgttggaatacacgtggatcaaggaattcgacccacggttcaacgtgcagttccgcgacgacaagacctatccgtatctcgcggtcagcacgggggagcgaattccgcgcgtgtgggtcacgcggtcgcgcaaacggcgggatacccggtatttcggcccctatgccaaagtgtgggaattgcggcacagtcttgaccggttgctgcgcacgttcccggtacgcacctgcaccaccaacgtattccacaaggcgcaactgaccggacggccatgcctgttcgcctccatcggcaaatgctccgcaccctgcgtgaaccgtatcgaagcggacgaacaccggcggctgtgcgaacagctggtcggcgtgatgaccggacgactcggacggccatacatcgcccagttgacccgcgacatgaaagaggccagcgccgaactcgaattcgagaaagccgcccgactgcgcgaccagatccaaatgctggaaaccgtggtgcaacagaacgccgtcgtcttcgaccaggatgtggacgcggacgtgttcggcttcgccagcgacgagctcgaagcctcggtgcacgccttttatgtgcgcgccggctctattcgcggcgaacgcaactggagcgtcgaacgagttgaggacatcgatgacgccgacttgatggccgaccttctggtgcaggtgtattcggactccgccggggacaatcacccccagtcggccgcgaccatctccaccaatcgcgaggccatcggctccacacagaccatcacggccacggacgctgtggcacgcgcccaggccacccgagaacgcaacacccgtcaggagaccaccggacgcgcggacctgctggcacccatcgcaccggtaccgcgcgaaatcatcgtgcccgtcgaaccggcccgccgcgaggaactcgaaggctggctgaccaatctgcgcgggggcgcggtgaccatccgcgtggcctcgcgaggcgacaagaagcagcttatggaccgcgccaacgagaacgccagccaagcactgcaacgcagcaagatgagccgcatctccgacatgggcgcacgcacccaggccatgaacgatgtggccaaggcattgggactcgcgcaagccccgctgcgcatcgaatgctacgacatttcgaacactgtgggcggtgccttccaagtggcctccatggtggtgttcgaagacgcgatcgccaagaaatccgaataccgacgcttcgccgtccgaggcaaggacggcaaaggcgcggtggatgatctgtccgcgctttacgagacgctcacccgccgcttcaggcacggcaacatcgccggcgactccggcgaaagcatcgacgcggaacagcgcgcggcctcggccgccggcaagatgaccactgccgtggcggcggagacaatcgttgcgaacggtaacgacaatggtgagggcggttccgacatcagtggcaaggggcacgcggtgccggtcggagtgcagaacgatgcacgggagtcctcgcccgacatcgtccagcagaacacaaaccggcatcactttgcctacacgccgaacctggtggtggtcgacggcggtaagccacaggtcatggccgccgccaaggcgcttgaggactgtggcgtgatcgacgtggccgtctgcggactggccaaacgcttggaagaggtgtgggtgccggacgacgactatccgatcatcctcaaacgccagtccgaaggcatgtatctgctgcagcgtgtacgcgacgaatcccaccgcttcgccatcacctaccaccgccaacagcggcgcaaaggcgccctgcgcagcgcgctcgacgagattcccggcatcggcgaaagctaccagaagcggctgctcaaccacttcggctcggtcaaagccatgcgcgaagccagtgtcgaggacttcgagaaggtcaaaggcatcggccacgccaaagccaaagcgctgtacaacgcgctgcacgagcagtgagccggcccggtccagcagcccagagtgaattttcggttgcggggcctgtggttgacatattcgaagcaaagtgtcggctagcatggaaacagacatcaaggaggggatatggccaatcatcgttgcgctgtactcggcaaacccgtcgcgcactcattgtcacccgtgctccacaacgcggcttatcgttcgctgaaactcgacgattggctgtacgacaagcacgaggtgggggaagacgacctcgacgctttcctcaaaggccttggctcgacgtgggctggcctgagcctgaccatgccgttgaagaagaccatccaaccgtacggtgttccggaaaatctgtgggccaaggaactgaaggtggcgaataccgcggtattcgactggagtgtggctaccgatgatcccgcttggccgaacggcaagccgggcatcaagctgtacaacaccgatgtcatcggcatccaactcgccttcgaccacgccaatcgcgaactcggcgaacaccacaccgcatcgagaagcggcgccgcgctgatcctcggcaatggcaacaccgccacttcggcgttggccgcatgctgcatgatgcccgaaatcggccatatcatcgtcgccgaccgccaccctgggaaaaacaccgggcttaaaccagtggccgaaaagttcgtcaacgtgcataacccgtacagcgaaatcgaattaggcgacgatcaggccctgctcgaggcagcccgcaacgccacctatgtcatcaacacgattcccggacatgcggccgacaacgtcgcggatgccctcaccaatgccggaaccgagccattctccggactgctgctggacgtggtctacgatccacgccccaccaagctcatggaagcctggcgcgctcatggcggtcacgccatcggcggcgaagaaatgctgctgtaccaagctctcgtacaggtattgctgatgaccggtatctgggatgacgacccgcccagcgatgccgaccagcgtctgcaggacaccaccaccgaagacgaccagctggagatcgcgatgcgcaaagctcttgaggaggcgttgtaatgagtcaacagacaacaatccgcgataccggcgaggcggccgccacgaatgcgccggcgaattccgcgacatccacatcgactccggacaaccagccgaccccgcttgatgccttcgaggtgctgctcatcaccggtatgtccggcgcaggccgctctcatgccgctgactgcgtggaagacatgggatggtatgtggtcgacaacctgcctcccaaactgcttatcccgcttgtcgacatgatgaccacctccggttccggatcggggtcgggcgtccacaagcttgccgccgtcatcgacgtgcgctccagctatttcgacgagctggccgccgtgctcggccatctggatgatctcggcgtcaaaacccatattctgttcctcgacgccagcaacgaagtgctcatcaagcgctatgaatccgtgcgccgcccgcacccgctgcagcacggcaaccgactgatcgacggcatccttgaggaacgtcacctgctggaagacctcaaggagcgagccgactgggtcattgacaccagctccctgagcatccaccagctgtccaccaaactctacgagacgatgctcggttccggccccaccaccgtggcggtacacatcttcagcttcggcttcaaatacggcatgcccatcgacgccgatttcgtggccgatgtgcgttttctgcccaacccgttctgggttcccaacctgcgcgagcttaccgggcacgacaagccggtcgccgactacgtgctttccagcaagggagccaaggaatttctcgacgcttatgagaaagctatcgagattgcgttggaaggatacgcccaggaagacaagcactatgtaaccatcgccgtcggctgcaccggtggtcagcaccggtcggtggcgatgagcgaagagctggctcgccgcttacgcgcacatgggctcaacgtaaccgtttccgcgagagaacagcataagcgtcactcatcgtaagcaggcgtcgagcggtcatcgggcaagcgttcggtgaccacactgcgagaaagcaaagcccataatacgtatcaaacgggttcgcttgtccaccagattaggtatcacagaaagccgatggcttccgaccgtatgacagcagataacggcacgaagcgcctgaagcattgagaagaacgggactgtaggaggtagatcttggctcttctggacgatgtcaaaagcgagttggcggcctttgaaggcgattcgccagccgcgatcaaggcccaagctgcggccatgatccgttttggcggcggtcttcgaccggtacagaatacatacgttatccaagccgtattcacctcgcttgacgttgcagaatggctgaagaacacgttgaggaacacgttcgggcatgaagccgaggtcaaccacctcacccgtcagaccccgaacggccctgtcgagacctacgtggtgctcgtcacccgcaacgtagtggccttggctttgcagaccggactggtcgaccgccgcaagcagcaggtccgtggactgccgtctgaagtggtcaacggatccatcgcccaaatcaaagcagcatggcgcggcgccttcatggcccgtggcttcctatccgatcccggtaaggccagcttcctggaaatcgcttgccccacggaagaggccgccatggccctgtgtggcgtggcccgtcgtctcggcatccaggccaagcatcgcacgctgcgcagctccgagcgcgtgaccctcaaggatcccgacgccatcgaacgcatgctcaagctcatgggcgccacccgttcggcccgcgaatggaccggcaagcgctccgacggcgaggcccgcggcaaggccaaccgtctggccaacttcgatgacgccaatatgcgccgttccgccaaggctgccgccgaagccagcgaaaaagtgcagcatgccttcgaagtgctcggcgataacattccggacaacctccgtcaggccggccagctgcgcatcgatcacgtggacaagagcctcgaggagcttggcaagatcgccgaaccgcaaatcaccaaggatgcgattgccggccgaattcgccgactgcttcagcttgccgagaaaacggagaaggctcgcgcagccgaaggcaagtaacccgacaacgacgtaacgaaacaccgcattcagtcagtaggcgaatgcggtgttttgttccggaatgcctgtaatatgcaaagtggcaaaattggccactttgacgtgcgattcgtcaaggaaaggatattcatgaagacactcaaggaccttggagatctcaagggcaagcgcgttctggttcgcgctgatttcaatgttccgctggacggcaccaccatcaccgatgacggtcgaatcaaggctgctctgccgaccatcaagaccctgcgcgaagaaggcgccaaggtcatcctcatggcccacctcggccgcccgaagggcaaggtcgtccctgagctgagcctggccccggttgccgcccgcctcggcgagctgctcggcaccaacgtgccgctggccaaggacacctacggcgaggacgctcaggccaaggtcgccgccatgaacgatggcgatgttgtgctgcttgagaacgttcgcttcaacccggaggagacctctaaggacgccgacgaacgcgccgcttacgccaagaagatcgccgccctcggcgaggccttcgtttccgatggcttcggcgtggtccaccgcgcccagggctccaactacgacgttgccgccgatctgccggccgccgcaggcctgctggtcgagaaggaagtcaaggccctgtccaaggccaccgagaacccggagcgtccgttcaccgtggtgctcggcggttccaaggtctccgacaagctcggcgtcatcgagaacctgctcgacaaggccaaccgtctggtcatcggcggcggcatggtgttcaccttcctcaaggccaagggctacgaggtcggcacctccctgcttgaagaggaccagcttgagaaggtcaagggctacatcgagaccgccgagaagaacggcgttgagctcgtgctgccgaccgacgtcgccgtgaacgccggcttcccggccggtgacaccccggttgctccggaagtcgttgccgccgacgccatcccggccgacaagatgggtctggacattggcccggagtcccagaagctcttccacgacaagatcgtcgactccaagaccgtcgtgtggaacggcccgatgggcgtgttcgaggttcctgagttcgcctccggcaccaaggccgtggcccagggtctggtcgacgccaccgcagccggtgcgttcaccatcgtcggtggcggcgactccgcctccgccgtgcgtaacctcggcttcccggaggacggcttctcccacatctccaccggtggcggcgcttccctcgagttcctcgaaggcaaggagctccctggtctgaaggtgcttgagtaatccattttctagctcccctccttgaggggagctacgtattttttagaggggaaacatatggcgtccaaacgcattccgttggtggccggcaactggaagatgaatttcgaccatcttgaagccacttacttcgtgcagaagctggtatggctgttgcatgacgctcgctttgacttcaaacgctgcgaagtcgcgcttttcccctcgttcacgtcattgcgcagcgtacaggtgctggtcgaagccgacaagctccatgtcgcctacggcgcacaatccgtttccgtgaccacccaaggtgccttcaccggcgatgtgtccgcggacatgatcgcccatctcggctgctcgtacgtcatcgtcggccactccgaacgccgcaaataccatcctgaagatgacgccaatatcgtcgatcaggtacgtgccgtgctcgccgccggcatgcagccgattttgtgcgtcggcgaaagcttcgaggaacgacgtcaaggcattgaactcgatttcgccgtgggccaggtacgagacgtcacccgcgatctcaacgaagaacaagccgccgaactcatcgtggcctacgaacctgtctgggccattggcaccggcatggtggccactccgcaatccgcccaggatgccgcaaacgccatccgcaacgatttgaagaccacttttggcacgaaggtatccgatagcgtacgtatcctgtacggcggatcggtcacctcgaaaaacgcggcggaactcatttcccaacccgacgtcgacggcttcctgatcggaggggcggccctggatgttgaggaactcgccaaaatcgctcgactggcactgaaatccacgaaatcacggaactaataccacggttttcccgtgtgtgcgctatgctggtcaacagtccaatcaatccggaggtaccctgtgaccgctcttaagatcacgctgcaagtcatcgtcgtgctgctcagcttcgtgctgaccctgctcatccttatgcacaagggcaagggcggcggtttgtccgacatgttcggcggcggtctgacccagaacgccggtacttccggtgtcgccgaaaagaacctgaaccgttggaccgttatcatcgctctcgtgtgggtggcattgatcatcggcctcgacatgatgaccaagttcaacctcggctgatcggcttgcacgccatatagacttgtcgctcgcgacccatgaccgttaccgtcggtcatgggtcgtatgcgttctatcgagtattacgaaaggacatcaccatggtcactatgaaccgcaacaaagtcgttatcgtcggcactggccaggtcggtgccaccgccgccttcggcatcgtcacgcacggcctgtgcaatgagctcgtgctcatcgaccgctccgccgccaaagccctgggggaggcccgcgacctcgatgacggcagcgaattccaggaccgccacgtcaaggtgcgcgccggcgactacgccgactgcaaggacgcggacatcgtcgtcatcaccgtgggccgcaagccgccggccaactccaaccgcatggccgaactcggcttcaccgtgggccttgtgggcgaagtggtcgacaacgtcatggcctccggcttcgacggcgtgatcgtcatggtctccaacccggtcgatgtgatggcctggtatgcctggaaacgttccggcctgccgcgcacccaggtgctgggcaccggcaccgcgctcgacacctcgcgtctcaagaccatcatcggcgaagagaccggcctcgacccgcgtaacgtgggcggcttcgtgatgggcgagcacggcgactcccagttcaccgcatggtccaccgtctcgctcggcggcaagccattcgcccgcttcctggccgacaaccaagaccgtttcgcctccgtgtccaccaccgaaatcgaagagaagacccgcacccgtggcgatgagatcgtcgcggccaagggcggtaccaacttcggcatcgcctccaccgtggccggcatcgtgcagaccatcctgtgggacgaacgccgcatcgtacccgtctccaccctgctgaacggcgaatacggcgaacatgacgtgttcctcggcgtccccactgaactgcgcgccaatggtgccaacgagatcgtcgaactcgatctgagcgaggacgagcaggccaaattgcaccattccgccgaactcgtgcgtgaacactgcgaggggctgctgtgattctcgacgccatcacaccgaaacaaccccgactgctggtcgccgacctcgacggtacgttgctgcacgacgccgaggtattcgaggaccggttcatcacccagcgcagcatcgacaccatcaaccgcgcgcacgatgccggactgaaattcgccatcgccaccgcgcggccggtgagtaccggcctccagttcgccgaaaaactgccggtggacgccgtaatctatctgaacggtgccctcatcgatttcgacccggcccactccgacttcgacctgctcacctcaggtgccacgccggccgatgagaaccatttgatcaagattggcttctcctcacggcgtgcctgcgaagtctgtctgttcctgctcgatcgcatgcccggcctgaagctcggcatcgtgatgaacgacgtgcgctacaccaacttcgatgtgcgcgtgtattggaaaacacaggccttccaatacacgaacttccacgacgtgcccgaaggcgtggcggataagatcaccatcttccccgagcctgaacagtggaacgagctgtgtgcgctgattccgccggacttcgacatctccattagcgaaggcgtgatgtggatgctcatgaacccgcaggccaacaaggagcatgcgctgcacctgctgtgcgaacgactggacgtgccgctcgaacagaccgccgccttcggcgacgacctcatcgatatcaacatgatgagcgaatccggccggggtgtggccgtggccaacgcgaaccccaaggtgttgtctatcgccgacgagatctgcccgcccaacaacgaggacggcgtcgcccaatggattgaagcgcagttgggctgaaccggccgagactcgagaacacgccaaaattgaacttgtgttgaaccgggagtatgctttgaactgttgttcaaaagataaattgaactcccggttggaggcataaggatatgagcgtatcggtgtttgcggaacgtctgcgcaatgcgatgaacagtaggggattgaagcaggtcgatttggtgcacgccgccgaacatcgtggcgtaaagatgggcaagagccatatcagccaatacgtggccggcaagaccatgccccgcgaagacgtgctcgaattcctggccagcgaactggacgtcgacgcgaactggctgcgcggcgaggaatccaccccgcaattgaactcggacgcttccaacagcgtcacggacggcgaacacgccgccacgccgcttgccacgggcaccgccaagcccctgacggacagcgagattcccgtgggccgccgccgtaccttcggcaaatcgcacaagctcgacaacgtgctctacgacgtgcgcggcccggtcgccgacgaggcgatgcgcatggaggccaacggcacccacatcctgaaattgaacatcggcaatccagcacccttcggcttccgcacgccggacgaagtcgtctatgacatggcccaccagctcaccgacaccgaaggctactcgccgtccaagggcctgttctccgcgcgcaaggccatcatgcagtacgcgcagctgaagaacatcccgaacgtcaccatcgacgacatctacaccggcaacggcgtcagcgagctcatcaacctgtccatgtccgcgctgctcgacaccggcgacgaagtgctcgtgccctccccggactacccgctgtggaccgcctgcgtgaacctggccggcggcaccgccgtgcactacctgtgcgacgaacagtccgaatggtatccggacatcgatgacatccgctccaagatcaccagcaacaccaaggcgattgtcatcatcaacccgaacaaccccaccggcgcactttacccaaaggaggtgctccagcagatcgtcgacatcgcgcgtgaacaccagctcatcatcttctccgacgaaatctacgatcgcctcgtcatggacggcctgcagcacatctccatcgcctcgatggccccggacctgttctgcgtgaccttctccggcctgtcgaaatcgcacatgatcgccggctaccgcatcggctggatgatcctgtccggcaacaagcgtatcgccaaggactacatcgagggcctcaacatgctcgccaacatgcgcatgtgctcgaacgtgcccgcccagtccgtggtgcagaccgcgctcggcggccaccagagcgtcaacgactacatcgtgccgggcggccgcgtgcacgaccagcgtgacctcgtttacgacatgctcaaccagattcccggcatcaccgccgtcaagccgaaggccgcgttctacatcttcccgaagatcgacgtcaaacgcttcaacatccactcggacgagcagttcgcgctcgacctgctgcatgacaagcacatcctcatcagccacggcggcgcgttcaactggcatcgccccgaccacttccgcgtggtgtacctgccgcgcatgggcatgctgcacgaaaccatgggggagctcgccgacttcttcagctactactggcagagctgatccttggtacaggcgaacacgatcgatgccgggctgggcaccaaaccggtgccccgtctggccctgaccatgtcggtccccaccatcgtggcgcaggcggcgaacgccccgtacacgatcatcgaccgactgttcatcgggcacatccccgaagtgggcaacgcggccgatgaccggcgtgggcatctgcttcccgattctgctggccgtcaccgccttcgcctcgctgatcggcgcaggcggcgcgccgcgcgcctccattgaacttgggcgcggcaacttcaagaaagccgaacgcatcctcggcaccagcgccgcgttcctcatcgccatagccctgaccctcaccgtgctgctgcagttggcgaaaccactgtggccatggtctccgtactcatcggcaccggcatatccatccttcttgaccccgtgttcattttcgtgttcggatggggcgtcaggggagcgggcgccgcgaacgtgctcgccacattccccggcttcttcgcctcatggttcacctcggaacagacggtcatcgacatcgtgacccgcatgatgccgattttcgtctgcggctggggtatcttcggcatccagatgggcgcgcaatgcgcactcgtcggcatgggccaggccaaacagtcggtgttcttggccatcttccgcaagatcatcctgctcgtgccgctcgcgctgctgctgccgcactggatcggcgtcaacggcatcttcatcgccgaacccatctccgacgccacctccggcatcgtggccggcttcctgttctatgccacctaccgcaagattcggcgagatatggtctagactcctgattcaatggatgtgccgtctcatgcgttgcgaaacacgggacggataggatgcctcgcaaaacgggtgcccgttgtttcgtgatatgaaggagattttatgccggtggtgtcgcgtcgtgcgcagccaacgtgatggccataatcgccgaaagcagggagaacaatggcagcacgcacaacacgacggtcagcagtcccaaagcttcacggccgatgcaataagcgacaagacctgcattgtcagttgccgatagcgctaggcagaaatcggtgtgtctaccagtgttgtagctgtaggtaaagaacgtgagacctgaccagaacagggcaacgggaacagagccgatggcgcgaaaagccctgtactcccgcaacggtcagacagagaatcgcgacaacactcagcgcagtcaccgtcataaaccacagtggtgaggtgacgcagactccataatcgtcagttgcttggcccgagagatagtaggtcattctgccaatcgccggacagttcggatgcagcatcatgccgccccaaatgcgctcatatagtggtgcgaacgatacaccggcaccgctgagcgtcgcaacaaccgccatcaccgaccgaccgccagactccggcacagaccgggaagaactaccgtcgcggagcatcggcgataccaatggcaacaccgaggatagccgggatcacccagccgagctggtattgctgcaagggcagcatggccagcgtcgtgtccagccagccgatggagccgccgaagacggtgatcaggctggagatgcaggtggcgaaggagtcgatgcccaccagcagcacggtccagaagtagacatgcgggaatcgcgcgccgagcgacttgtgggtcagcgccagcagcaccagcacgatggcgatcggatacagtgcggacaacaccggcacggaaaccttgatgatcgcgcttagcccggcgttggacacgatgaaactgaacacggtgaagatgacctgccaggtgcggtagctcaacgttctccctgcaacggtctggaaccgagtgtggaagtaggtggcgcaggtaccgatcagtccggtgcatacgttgaggcaggcgatgacgaagacgataccgaggaacgcggtaccgaacgcgccgaacagggacgaggtgagattggtgagcacggtcgcgcccgtgtctttggcgggatcgatggtggcgatggcgccggacaccacgcccacgtagctcagtgcgccgtagatcacgatcagcagcacaccggtgccgagtccggcatacgcggtctccttctgcacttgcgattcgtcatcgacctgctgggtgcggatattcgcggaaatcacgatgccgaaatagagcgcggcgagcagatccatggtctggtagccgtcgaggaagccacgtgcaatctggtttgtggagtagtcgcccatcggtttggccggggtaccgataccgtggattaggcaggcgatgaacaggacggcaatcagcaccagcagcaacggtcccatgaatcggccgagcactttggagagtttttcgggatgctgggcgaacaggaacgccagtgtgaagaacacgagcgagtagatgagttgggccagccagccgtaggaggacggcacgaaaggcgccaccatcatttcgaacgaggtggtcgccgtacgcggaatcgcaaagcaggggccgatggtgagcatgatcgccaagccgaggaacagggcgaatttgggggagacccggccggcgagtttgtcgaagccaccggcgaaggtgaccgccagcacgccgagaatcggcaggccgaccgcggagacgatgaagccgatggccgccggtatggtcgcggaaccggcctgagctccgacaaacggcgggaagatcaggttgcccgctccgaagaacatcgaaaagaaggtaaaggtcatcaccaaccgctggcgtgcgacaagtttgttcattacggttcggcctttctctcatgtgctcgtactactgtagcaacaaacgtaagaagccccgaccggttggggtcggagcttctgtgagctaatcagttaatgcgcgaaatgcgcatcagctaataatctcaggcgttcacgcggtcgatgccggactggacgtcagccagcacggaatcccaggacttgatgaaggcggcgacaccgtcggcctccagcttgtcagtgacgtccttgaggttgatacccagctcagccagcttgttgatgacggcgtgggactcctcgtaggtgccctcgatggacggagcgccgttgccgtggtcggccagagcgttcagggtcttctccggcatggtgttgacgatgtgcttggcaacgagctcgtcaacgtacttgcagtcggagtaggcggcgttcttggtaccggtggaggcccacagcggacgctgaaccttggcacccttggcagccaggtcggcccaacgcggatcctcggcaaacttcttctcgaagagctcgtaagccaggcgagcgttggccacagcggccttgccctccagagccttggcctcgtcggagccgttggcttccagcagcttgtcgacagcggtgtccacgcgggagacgaagaaggaagcgacggagccgatgtgcttcaggtcgtggccgttggcgtcagcctgggcgatgccctcgatgaaggcgtcgatgacctgctcgtaacgctcgagcgagaagatcagggtgacgttgacggagatgcccttggccagggtggcggtgatggccggcaggccttcgagggttgccggaatcttgatcatggcgttcggacggttgaccttctcccagagttccacagcctgcttggcggtgttctcggtgtcgtgggccagacgcgggtcgacctcgatggagacgcggccgtcgacgaagtcggtagcctcagcgatctcgcggaagatgtcggtggcgttgcgcacgtcggtggtggtgagctcgcggacagcggtctcaacgtcaaccttgccgagctccttgagctgagcgtcgtacgggccgacctggctcagggccttctggaagatggacgggttggtggtaacgccgaccacgttcttgttggcgatgaggtcctgcagggagccggactcaatgcgggagcgggacaggtcgtccagccagatggaaacgccgttgtcggacgtacgctgagttgcttcagtcatttattttctccttggattcaagccctaggctcccctctcctgggagaggggagctgtccgcaacgcggactggggggagtgggctcaagcattgctcccctcagtcaggctttcgcctgacagctcccctcagggaggggagccaacaattattgaattattgcttagttgctcacttggcggcttcgacttcggcgatggaggccttggcggcttccaccacgtgctcggcggtgatgccgaggtcgatcatgttctgagcgccgtcaccctgcaggccgaactgctcgatggagacaggcttgccgtaggaaccgaggtacttgtaccacggcatggcaacgccggcctcgacggagacacgagccttgacagcggccggaagcacagcctccttgtactcggcgtcctgctcctcgaaccattccatggacggcacggacacgacgcgagccttgacgccctcgccggccagggtcttggcggcagccacagcccactggacctcggaaccggaagccatgaggatgacgtccggagtaccctcggtgtcgaccaggatgtaagcgcccttcttgacaccgtccttggccttggcagcggtctcggcaagaaccgggacaccctgacgggtcagaaccatggcgccaggcagggtgttcttcttctcgaagaagtaacggtaagcctcggcggtctcgaaggcgtcggccgggcgaatgacctcaagctgaggaatcgcgcggaaggaagcaaggtgctcaaccggctggtgggtcgggccgtcctcgccgacggcgacggagtcgtgggaccagatgtacaggttcgggatctgcatgagggcggccagacgaacggcggaacgctcgtagtcggagaacatgaagaaggtgccgccgaacggacgggtgtgggaacccagcaggatgccgttggtgatgcagcccatggtgaactcgcgcacgccgaagtgcagctggcgaccgaactcgttgcagttcggccactgcttagtggcgcactcggccggggcgaaggtggcagcgcccttgaggtcggtcttgttggagccaccgaggtcggcggagccgccccagagttccggcatgacggcggcgatggcgttgagcacggagccggaggcgccacgagtggcgacacccttgccgacttcgaaggtggcctcaaggtcgtcaagggccttgtcgaagccttccggcagttcgccggccttcagacggtcgtacagggcggccttgtccgggttggccttgcgccaggtgtcgaacttctcgtcccaggccttgtgggcctccaggccgcgatcggcgaccttgcgggcgtgggccagggcttcttcgtcgacgtggaaggactcctccggatcgtagccgaggagtttcttgaggccggcgacggcctcggcgcccagcttggagccatgggaggacgggtcgttggtcttgcccggtgtcggccaggcgatcagggagtggaccttgatgagcttcggctggtccggggcggcggcttcggccttggcgatgacgtcggccagaccctcgatgtcctccttgtaggagccgtcgggctggatgaagctgaactcgtcggtgtaccagccgtaggcctggaagcgcttgagcacgtcctcggccagcaccaggttggtgtcgccttcgatctggatgcggttggcgtcgaagatcacggtcaggttgccgagcttctggttggcggccagggaagcggcctcgccggagatgccctcctcgatgtcgccttcaccacagatggcccaaatcttgtggtagaacggggaatcttccttcggggtctccgggtcaagcagaccgcgctggaaacgctcgccgtaggcaaagccgatggcggaggcgaagccctggcccagagggccggtggtcatttcgatgcccggggtcaggccgtactccgggtggcccggggtgcgggtggcagcgccgccacggaagttcttaaggtcgtccagggtcacgccgtagccggagaagtacagctggacgtactgggtgagggaggcatggccaccggaaaggatgaagcgatcgcggccttcccagttgggatcattcggatcgtgcttgatgaagtgctggtacagcgtgtaggcgacgggcgccagggagacgggggagccggggtggccggagcctgccttctcaaccgcgtcagccgaaaggaccttcgccatcttgatggcgcgctcgtcgagctcggtctccttgaattcggtcatggattactttccttccaattggtcgggccgcgtatccggcttgtgccgggcgcttgacgccctcacattgcgattaccatgctagcgtcggtttgcgacgttgcggtgcaattttggcgtgttttggtagtttgtgttctgttagcgttcacagtgaacattgctacgctgcaaacgaacgcattagcactcaagcctaaggagtgctaatacaatgttctaaggtgaagtgcgccacctgcacgtggcggagccaagaaagaggcaatatttctgggttcccgcgtgtcgcggcgtggcgaaccgaccgtcggggtacgccctgagtgaaccgtgactgatatgaatatgtatgcatatataaggaggcgcgcatgacgcaatcaagacgcatgctggtgctgcgcgccgtggtggaggattacatccgttctcaggagcccgtgggctccacttcgctgacgcgcgaccatgatctcggcgtcagttcggccaccatccgtaacgacatgtccgctctggaggatgaaggatatctgattcagccgcacacttcggccggtcgtgtgcccaccgaaaagggctatcgatactttgtggaccgacttgctaccgtggtgccgctcagcgaggcgcagcgccgcggcatcaacagcttcctgtccggatcggtgagtctcaaggacgcgctgcagcgttcggcacgactgttgtccgaaatcaccggtcaagtggccatagtcacctcgccatcgctggccaaggccacattgcggcacgtggagatggtgcccgttgccatgaccacgttgctcgcggtggtgattaccgacaccggccgcgtggcccagcacggcctgaccatcgcatccatgcccgccgtggacgagatcaaccggctctccaacaccgtcaacgaacaatgtgtcggactgtccctatcgaaatccgcggagaccgtgcgatccatcgccgccagcgccggctacgagtcggtgcgcggcgtggccgacgcgctggccgacgccttcgaatcgatggcattggacgaacgtgcgaacgaactgtacatgtccggcacctcgcacctggcccactcccggtccctggccgatctggccccgctcttcgacgcgctggaagaacaggtcgtgctgatgaagctcatgagcaacctgagcgaggagacgaatgcatccggcgtgggcgtggccatcggctccgaaatgcacacccccggcctactgcatgcctccgtggtcagcagtggctatgggcgcagcggtgcggcgggcgaaccggcggggaacgatcccgtaggcgaacccgaaaccgaatccgagacggagagccagacgaacgacacggaacccatcgccttcgtcggctccatagggccgacccacatggactatgcggccactatggccgccgtcagggccgtagccagatatttgaccgccttcctctccgagggccggacccaagactgaccgccgtctgtggcacaatgacccgcagaccaaacgaacacaaaggatcaatcaagtggcagattattacgagacgctgggtgtggaacgcggcgccagtgacgacgagatcaagaaggcataccgcaagctcagccgtaagtaccaccccgacatcgcgggccctgaattcgaggacaagttcaaggaagtgaacaacgcctacgatgtgctgtccaatccggacaagcgccgtatgtatgattcgggcgtcgacccgaacgatccgaacgccggtgccggcggcttctccggggcgggcttcggcgatatgagcgacgtgttctccacgttcttcggttccgcgttcggtggtggctcacagggcccggtgccgcgtacccagcccggccgcgacgccctggcctccgcgtccatcgacctgaagaccgccgtgttcggcggcaccgcgcacgtcaagatcagcacgttctccctgtgccaggagtgcggcggctccggcgcccagggcggcgcacagccggtcacctgccccgactgccacggccagggattcatgcagaaggtcgtgcgcaccatgctcggccagatgatgacctccgccccctgcgaacgttgcgagggccacggtaccatcatcaagaacccgtgccccagctgcatgggccacggccgtgtgcgtaccacacgtaccgtgggcgtcaccgtgcccgccggcatcaacgacaacgcgcgtctacgtttggccaaccagggcgaagtgggtgagggcggcggcgctgccggcgacctgtacatcgacattcgcatcaaggcggataagcagttcacccgcgatggcgacgacctgcactgctggattcaggtgccgatgagctgggccgtgctcggccacaatctgtccattgacacgttcgatggtgagaagaccgtgtccatcccggccggctgccagcctgaggacactgtgacgcttaagggactgggcgtcacgaacatccgcaacaaggacgagcgcggcaacctcatcgcccacgtcaatgtactgattcccaccaagctcaacgaaaccgagcgcggcctcatcgaacagttcgccgcctcgcacgattcaggcgccacgcacgtctcccaggcatcccgtccacaggctggccaaaagaaaggcttcttcagcaagttgaaggacgcgctgagctgagagtggatgcgttcttggctcccctcagagaggggagccaagtctgttacttcagcagggagcggcacatggagcggtattcgttgacgtagccgccgccgaagaagacacagtgaccggcgatggggtagagctgccagagcgtgatacgctcctgccatccggccttcaacggatgcacggactggtagccctcggtgatttcgctcagatagctcatgccgaacaggtgcagcatagccagatcctcctcgcgatgaccgccatgtgccgccgggtcgatgagcacagcctcgggctgcccggaatcggcggtccacatcacattgccgctccacagatcaccgtggatgcgcgccggcttgtcggacgcggctcggcccatcagatccggcaacgcttcaatcacgcgctcggtcagttcgacatcgcgcttatccagctcgccacgcctcacaccaaggttgaccatcgggcgcagacgtccatcagcgaaatagctgatcgggtcggtccactcgccggtatccattttcactgggtcctgcaatggtccgaaatagcatgtgccgttatatccgtcaggcgcagacccgaaatattcggcacccacatcatgcatatgggccagagccgcaccaaaagctcgtgccgcctgaggcgtgggggacgcgctgcccacacgttcgatatccagataatccttgccccagccgtatacctgcaccacgcgcgggccgccctgcgcatgagccgcccccaaccattcgagtcctcgaccctcgcattcgaagaatccttccggtgcgaatgccctgcttttgcgatacgtggccataatgctcccttcgtcgcttacgtactatatccactttcattgtagaagccgtagatgttaccgattcttagcgttgttctacacccccttgggtagggtgttcatcgtcataacacatcaaatacttagaaatcacgaggggttatgaattttttccaagcgatcattctcggcatcgttcaggcgctgaccgagtatctcccggtatcctccagcgcgcatatccgtattttcggcgatttgatgctgggctctgatcccggtgcggcgtttaccgccatcatccaaatcggcaccgaacttgcggtgattctgtatttccgtcacgacatcatcaatatccttactcactggttcagctgcctgttcggcaagaacggcaaggattggaaggcccgcatgggccgcggcgacaattacgccacactcggctggaacattatcgtcggctcgattccgattatcatcctcggcttcactctgcagaacgtcatcgagacctcgttgcgcaacctgtggattacggtaaccgtgctgttggtattcggcattctgctgtggatggtggatgccaaggctcgccagaacaaaaccatgaatgatatgacgtatcgtgatgcgttcctcttcggtttgggccagtccatggcgctgattcctggtgtgtcccgctccggcggcaccatcaccgtcggtcgcgcactgggctacacgcgtgaggccgctgtacgtctgagcttcctgatggccatccccgcggtgttcggctcaggtttgctcgaagccatcaaggccgtgaagaactacaaaaccgatgcgatgttccccggctgggggccgaccctcgtagccatggtcatcagcttcgtactcggctacatcgtgatcatcggattcctgaagttcgtatcgaacttctcctataaggccttcgccatctaccgcatcggtttggctgtggtcgtcgccttgctgctgattgtgggcgtgctgccggccatcgatccctccgtggcggctgcggcataagacgggtcgatagacgactccaatataatggtgctcccgctggcgggagccgtcagcgaagctgactgggggtggtcactggaatatgccagcagaaccaccctcagtctcgctacgcgagccagctcccgacattttgtgcgacgtgcacatggtgcactgctatgaacagcccacagggctgttcatccagcgggagcacaccatatatgggctaattgcccatctggcgcagaaacgcttctgcttctttgactagttgttcggcctggggcgctcccaaggaagcctccgcctcggctttctgctgcaagtcgtagtcgtgctccaaatgctccacgtaatcgtgaagctggtcattacaacgaaccagtatcgaggcttgcgccttccactgttcggctttctgcttcagatctgccgtatcgaaggtgaagccgatatgcttgcccaacgcatccagcaatcgcatagtgccggcagaacattcgtcgctgcccaaatattgggggatggacacccacatcgaggaatgagcaaaaccttgctgcgcggcggccacatccaaaacggtaggaatgcctaccgggccgttatacgaccggtctccttcgcattgacagtctccgtcgctgacggcgatgggcaacgggcgggtatgcgggcaatcggagaacatcgaacctaacgtaatgatccgattgacatccagctcatcggcaatggccagactctggctacagtattccttccaccgatagttcggttcgggggcgatctgcgcatagatatgcttgcctgcgtccaacgtgatgtcgtagaacgtggtctgcggccagataagattggtgcgtcccgcaacatggcacagcataggacgggcaacctgatagtcatagaaatcatcacatctaatatgacgaatctcgcgggactcatatcgcttgaccagatggcgcaccgcgttcgtcgccgcctgacaggcatcattccatccctcgaatgcggcgatcaatactgcgccggtgtccttcgctgcttcactcatacctctagagtaactggaattcattgcccgaagcgcacgctttagccataagcgagagtatgcaattacaggcgacacgccgcagctggacgaactacacgcatgtgagtatagtaaacactcgtgcttcggcagggagacctcgccaaggaaacacacgcggacatagcttagttggtaaagcgcaaccttgccaaggttgagaccgcgggttcgagtcccgttgtccgctctaggtccgtgagttgacagaccttacggtgggttagccaagcggttaggcagcggcctgcaaagccgtatagacgagttcgactctcgtacccacctctcagaccagcgaagcaattcaatgggatgaaatatgacccgggcggttggcgcagtggtagcgcacttccctgacacggaaggggtcacaagttcgaatcttgtatcgcccacgaaagtcgaagcaattcgactggatataactgaagaaccgagtattcgggcgattggcgcagcggctagcgcacttcgttcacaccgaaggggtcgtaggttcgattcctacatcgcccactggattccgcttctcacggcggattcctttgcggacatagcttagttggtaaagcgcaaccttgccaaggttgagaccgcgggttcgagtcccgttgtccgctccacaacgaaacctcgcttcggcgaggtttttttcgtattggttcagatgctggtggtatttgtcgcacgcccaacctatcgtgtcctacgttgattaaccagtccaggcctgcacattagtaccgtgggccccgatagcaaaggacaaatcatggcgcaagctaccatctccataaccgtcaacggcgaagcgaaggaggtggaagcaaccaccaccggcgtagaactgttcgcggaagacaagaacatcatcgcggtcaagatcaacggcgagaaccgtgacctgtacacgccgctgaacgatggcgataccgtcgaccccatcgccctcgactccgaagacggcctcgcaatcatgcgtcactcggccacccacgtcatggcccaggccgtgcaggaagtctacccgaacgccaagctcggcgtcggccccgtcatcaaggacggcttctactacgacttccaggtcgaccagcccttcaccccggacgacctcaaggacatcgagaagcgcatgcagcgcatcatcaagtcctcccagtccttccgccgccgttccgtgactgaggaagaggctctgaaggaagaggccgaccagccctttaagatcgaactgatcgaagacaaggaagcacacctcgacccggccgccgccaccgagatctccgaaaaggagctcagcttctacgacaacgtagaccgtgatggcaatgtggtttggaaggacctgtgccgcggtccgcacctgccgaacacccgctacatcaaggccttcaagatcgagcgttccgccgccgcctactggcgtggttccgagaagaacccgaccatgcagcgcatctacggcaccgcgtgggccaccaaggaagacctcaaggcctaccagacccgtctcgaggaggccgccaagcgcgatcaccgcaagctcggcgccgagatggacctgttctccttcccggatgaaattggccccggcctggccgtgttccacccgaagggcgccgccgtgatcaacgcgatggaggactactcccgtgagatgcaccgcaagcaccactacagcttcgtgcagaccccgcacatcaccaagggcggcctgtacgagacctccggccacctgcactggtacaaggacggcatgtacccgcccatgcacctcgacgaggagaaggacgcggacggcaacatcaccaagccgggcgccgactactacctgaagccgatgaactgcccgatgcacaacctgatcttcaagtcccgtcagcgctcctaccgcgagctgccgctgcgcctcttcgagttcggcaccgtgtaccgctacgagaagtccggcgaggtccacggcctgacccgcgtgcgcggcctcacccaggacgactcccacatctactgcacccgcgagcagatgaaagacgagctcaccagcctgctgaccttcgtgctgaacctgctcaaggactttggcctgaccgacttctacctcgagctgtccaccaaggacccgaacaagtacgtcggctccgacgagatctgggaggaggccaccaacacgctcgccgaggtcgccaaggaatccaacctcgagctcgtcgacgatccgtgcggcgccgccttctacggcccgaagatctccgtgcaggcccgcgacgccatcggccgcacctggcaggtctcgaccatccagctcgacttcaacctgcccgagcgtttccagctcgagtacatcgcgcaggacggtacccaccagcgtccggtgatgattcaccgcgccctgttcggctccatcgaacgcttcttcgccgtgctgctcgagcactacgctggcgccttcccggcgtggctggcccccgtgcaggtgctcggcgtgccggttgccgacgagttcgccccgcatctggccggtttcgtcaagtcccttgaggacgagatggtccgttgcgagatcgactactccgacgatcgcttcggcaagaagattcgcaacgcctccaagtccaaggtgccgttcatcctcatcgtcggtgaggaagacatgaacaacaacgcggtcagcttccgcttccgtgacggcagccagctcaacggcgttccggtggacaaggcccgcgagcagatcctcaccgtcatcaagaagcgcgtccaggtgaactccgccgacgacttcaacgccgctgtggctgagtgatgtgaatggtactggctcccttctctgaggggagctggctccgtaggcgactgaggggagtcctgcatggctcgcactcccctcagtccgtttcacggacagctcccctcagagaggggagccaagaaagggtgcgaaaatgactgacgtgcgtgtcgataatccggcggactttccgcctcaggaagacacggtcgaacgactgtggactccgcagcgcatgacctatgtgctgcgcaacagcgaggatcgcccaaccaagcccaagacgaaggaatgcccgttctgcgccggacccaagaaatccgacgaagacggcctcatcgcctggcgtggcacgcacgtgttcgccatcatgaacctctacccatacaatgtcgggcatctcatgatctgcccgtaccgtcacgtcggattcatcaccgaactcgacgatgccgaactgttcgaattcgagaaggccaccaccctcgccatgaaggtgatggaaaccgtctcccgtccgcacggttacaatatcggcattaatcagggcgaagtagcaggcgcaggagtcgccgctcacctccatcagcatgtagtgcctcgctggaatggtgacgcgaacttcatgcccatcgtcgcccagacacgcaccatgcctattctgctgtccgaccagcgagaagcctatgcccgggcattcgaacagctggctccgcagtatcatctgccgcttgcctaacacaggtgcggcaccccgcgtgaccggtcttatcggtacgcataacaagacaatcatcggaaacatcacgggtatgtctgattaacggcctacaatcgtttcgtttgacatcatccgtttcaataattgctaggagcattatgtcaggtcattccaagtgggcgaccaccaagcacaagaaggccgccatcgacgccaagcgcggcaagctcttcgccaagctcatcaagaacatcgaaatcgccgcccgcctcggcggtggcgacccggacggcaacccgtccctgtacgatgccatctacaaggccaagaaggcctccatgccggccgacaacatcgctcgtgccgtcaagcgtggtgccggtgctgaagacggcgccgccaactacgaagacatcgtctacgagggctacgctcctgccggcgttggcctcatcatcgaatgccttaccgacaaccgcaaccgtgcggccgccgaagtccgttccaccctgaccaagggcaacggctccctggccacctccggctccgtgtccttcaacttcgagcgcaagggccagatcgtggtgccgtccgagggcgtggacttcgacaagctgttcgaaaccgccgccgaagccggtgccgaggacgttaccgatgacggtgaggtgttcaccgttgtgaccggtccgtccgacctgttcaccgtgcgcaaggctctgcaggacgccggcttcgactacgattccgccgaccaggtcatgcagccgaagaacgaggtcgagttgagcctcgacgatgcccgcaaggtgtccaagctcatcgacaacctcgatgacctcgacgatgtgcagaacatctactccaactggaccgcttccgacgaggtgatggcccagctcgacgaggagtaatcctcgtgattatccttggcgtcgaccccgggctcacacgttgcggggtcggcgtgatcgaagccggcgagcaccgccggctttcgtttattcacgtggacgtggtgcggtcctcaccggatatcacccaggatctgcgtctactggccatctacaacggcctgtccgagaaaatggatcgcttcgcacccgatgccgtatccatcgaacgagtgttcgcacaatccaaccgcaacaccgtactcggtaccgcacaggccgccggcctcgccatgctcgccgccgcgcaacgcaatattcccgtggcgttgcatacgcctaccgaagccaagctggctatcaccggtaacgggcaggcgcagaagattcaggtggagcgtatggtgacacgtattttgaacctcaccaaaatgccgactcccgccgatgccgccgatgccttggctttggccatttgccatgcgctgcgcccggcaggcgcattgcagggcggcgaacgcgaacaacatctgaccgccgcgcaacgccagtgggctgaggccgcacagaaatccacgcgccgccgcatcaatcacgaccgaggcatgtagtatactttcgaacagttgttcgagtcttgaatcctggagccctgaaggagtacctgtatgatcggcatgctgaccgggcgggttgaatcggtcgaaaccgataccgcattgattgatgttgggggagtgggctacgaagtgcgcatgtccgccaccgacctgagccgtctgcacgccgggcaagacacccgcgtcttcacctatatgaacctctctcaggatgccattaccctgcatggattcctggatcgggacgccaagaaaacctttctgcaactcatcaaggtctccggcattggacctaaagtggcccaatcgttactctccacactgacgccgagtcagctggcccacgccatcgccgacaacgacgccaccgcgctggccaaggctccggggctgggcaagaagggcgcacagaaaatcatcctcgagcttaagggctctattgatttgagtcagatcgagggtgcttccgctcaggcggcaatatccaagtctccggtggataccggtacggaacaggttgtcgaaggactgatttcacttggctggcgtcagcaggacgcccagcaggccgttgccgaggcttgcgccgaaaacgatattcccacgccgcttgccaccgacgatgtgccgcgtgtgctacgtctggctttggcgctgatggataggggccgctgatgagcgagacaacggattacggtacctcaaacaccggtgccaacgaagagtcgttgcgcatggtctcctcccagccgatcggcaacgagccggtcagcgacgaggagctgcgcccccatgttctcgaaggctttatcggacagccacggctcaaggcccagctgcaactgttcctggacgcggcccgcaaacgcgatgtgccaccggaccatattctgcttgccggccctcctggcttgggcaaaaccacgttggccatgatcgttgccaatgagcttgaagtgccgattcgcgtgacttccggccctgcggttcaacatgccggtgatcttgcttcgattctgagctccctcgacgtcggcgaagtgctgttcatcgacgagatccatcgtctgccgcgcgccgccgaagagctgctgtatatcgcgatggaggacttccgcgtcgatgtgatggtcggcaaaggcccgggcgcaagctccatcccgctgaccctgccgcgattcaccgtcatcggtgccaccacgcgcgaaggtatgctgccaagcccgttgcgcgcacgctttggcttcaccgcacatctcgacttctatccgcatgaggagttggaaaagctcatcgaacgttcggccaacgtactgggcgtaaaccttgatgcgggttccgctcatgagcttgcgttgcgttcgcgcggcacgccgcgtatcgccaaccgattgctacgccgtgtacgcgactgggccatcgtccacgacctgatcgtggtgcggccggacgacgtcaaggaggcgctggccctgtaccagatcgactccgaaggcctcgaccggctggacatcgccgtgctcaatgccatcgtgcgcaacttcaacggtggacccgtgggcctgaacaatctggcggccatggtgggcgaggaatcggaaaccgtggaaaccgtgtgcgagccgtatcttgtgcgcgaaggttttatgattcgcacgcccaaaggccgcgtggctaccgagaaggcatggcagcatttgggaattacgcccaaagatgatgtcagcaagctcttctagactttctcctgtttgcacacttggcggcgtttcgtcaatgtcgctcgtttgaaggagttgtttcgtggaacaacagtacattatgctcatcgtgatcgtcgtcgtgttcggcggcatgatgtggtggcagtccaagaaggccaagcagcaacagcaggagaagcaggacttccgtcgcaacctgcagcccggcaccgaggtcatcaccatcggccaggtgatcggcaaggtcgtcgaagtcgacgagcagtatgaggagatcgtcatcgactccgaaggctccaagctgcgtttcggcttcaacgccatcgcccgtgagtacacccgcccggcctatgtgtccgatgatgaggtcgacgagaacggcaacccgctgcccgacgaagacaccgaggctccggctaacgatgaggctggtcaggttccgatcgaggcgtccgtcgtgtccgaggaagacaccgctgacgagaccggtgacgacaacgaaaccaagacgaagtaagctgttcgattcggtagcaccatccgagtatcgcatcgcaaaggcataaaaggggcgagcactatggcacagtcggacatcaccatcgacgcattgagcaaggtagggcaacaggacgccgaatatctggtgtccttggtgcgttccataccggggtttcccaaggaaggcattatcttccgtgatttcatgccagtgctcgccgaccccaagggcttgaagattctgctcaaggcgcttgaaacggctctgccggtgtccccgagcgaattcgactccattgccggtctcgaatcgcgcgggttcctgttcggcccggccatggccgcccatctgggcaagggtttcatcgccgtgcgcaaggccggtaaattgccgcccgaaaccatcggtgaatcctatgacctcgaatacggcacggccagcgtcgaaatcgaaaccgacgccgtacaggcgggggagcgagtgctcattgtcgatgatctcatcgccacaggcggcaccgccaaagccggcgccgaccttatcgaaaaggcgggcggcactgtggtgggcttcagttttgtgatgcggctcgatggtctcgacggtctggataagctcggcggcaagcccagcagctcgctgatcgcgatgccggcctgagattccgtctcacccaacgtacagttagttttcaaggtccggcatgtactgtgtacagttatatgccggaccaattacatagtcagggaaggatcgatggatctttacgaataccaggcgcgtcagctgctcgaggaacaagacattcccaccccggacgccatctttgcccagaactcccatgaagtcgccgaagcggcggacaaaatcggctatccctgcgtaatcaaggcgcaggtcaagatcggtcatcgtggtcaggccggcggcgtcaagatcgcccataaccgcgacgaggcgattcttgaatccgagtccatcctgccgatgaccatccacgggcacaaggtttccggcgtgcttgtggccgaagccaagaacatcctgcacgaatattacgtgtccatctccgtggaccgcacctcgcgcgacttcgacgtgctggccaccgccaacggcggcaccgaagtcgaggaaatcgccaaggaacatccggaggccgtcaagcgcctgcacatcgatgcgctcggcgacttcgacctggccgctgccaccgaaatggcacagagcatcggcttctaccacgcggacgtcgatcaggccgcacagattctgctcaagatgtggcgctgcttcaaagacaacgatgccacgctcgtggaaatcaatccgctcgccaagatcggcgacccggatgacgaatccaccaagcagctgagcgccttggacgccaagatctccttggatgacaacgcctccttccgccatgatggctgggcgcgtttcgtggatctcatcgttcccgaccccttcgaacagcgcgcccgcgaacacggcctgcactacgtgcacctgcacggcgaggtcggtgtgatcggcaacggcgcaggactcgtcatgagttccctggatgccgtctccggcgctggcgaggaacagggcaccaacatcaagcccgccaacttcctggacatcggcggcggcgcctccgcagccgtcatggccgaaagcctggagatcgtactgtccgaccctcaggtcgaatccgtgttcatcaatgtctatggcggcatcacctcctgcgtggaagtcgccaacggcatcctcgaagcggtcgccaagctcggcggttccaagccgatcgtcgtgcgtttcgatggcaacgccgccgccgagggtctgcatatcctcgcttccgccaacaatccgaatatccatgtgtccgaaaccatggaaggcgcggcagccaaggccgcgcagctcgccggtgaggcgacccagtccaaggaggttcgctgatgctgttcatcgaagacggcgctcccgttatcgtccagggcatgaccggccatcagggcatgacccacacggctcgcatgctcaaggccggcaccaatatcgtcggcggcgtgaacccgcgcaaggccggcacatccgtcaccttccccggtgccaagaacggtgccgacgtggacatccccgtgttcgccacctgcggcgaagcacgtgaagccaccggcgccaaggccagcgtggtgttcgtgccgccgaagttcgccaagtccgccgtggtcgaagccgtcgaagccggcatcgaactcatcgtggtcatcactgaaggcattccggtggccgattccgcatacttcgtcgaactggcgctcaagaagggcgtgcgcatcatcggaccgaactgccccggtttcatcacgctcggcaaccctggcgtcaacttgggcatcatccccgacggcattgtcggccgcggcccgctcggactggtctccaaatccggcaccctcacctaccagctcatgggcgaactgtccgatatcggcttcaccgcatgtctcggcgccggcggcgatccgatcgtcggcacgacgctgctggaagccctgcaggcattcgaagccgaccccgacaccaaggctgtcatgatgatcggcgagatcggcggcttcgccgaacaggacgccgccgcatgggccaaggagcacatgaccaagccggttgtcgcctacatcgccggtttcaccgcccccgaaggcaagcagatgggccacgccggcgccatcgtctccggaggcaagggcaccgcccaggacaagaagaacgcgctcgaagcggcgggtatccccgtgggcaagaccccgggccaggccgctgaaatcatgcgcgacatactcgccaaggccaacatcgactgatcggttccaaccaatcgtgatgaaagccgtgattcgccaatgggtgcggggagccatagtcgccctcgcatccatggccatctatgccgttgcattaggttgctatacagcgctgatgttattggttgtctccatggaagagggcggcgacaatctcaccgtcggcacaacctcgctgacacaggccgttgtgcttctgagtgagggatcgggctctagaaccgattcgttcaccctcaccatcacgccattgatgttgaccatactgctgatatggctgatcaatgcactcaccatgcgaatcaaagcatacgggccgcatgcgtatgttgccggattgaatgtttggctcgggttgaacgaggcgttccggcaatccgtacacctaggtcttgtcgatgaccagtggctggtgttgctgaaagcagccatcgtattctcgatcggtttcctatgcgcagccgtaccggaatcagccaagatgcgagcattcagggactggactcgcaagcaggtgccggcggacatacgccactgcctgaaaatcggcgtcgacttggctgtcgcgatactgggcatatacctggcaattggattgattaccgtcatcgtatggtcggtacgcaaccatgccgctgtcgtatcgttgttcgaattgtccgggatggaaaccggttcacgaattctcaccaccgtcgccatgctgatctggctacccaacgtcatgctctgggctgtttcctggctcttcggcggcggattcgccatcggtgatttggccagtttcacgttatggctcggccaatccaaagagcttcctgcaataccggtattcggtattctgcccgaaccggtcagcagcgaactatggcgtaccgttgccttgaacgcgcctctcgccatcgctgcgctcgtgggcctgctggctgtattcctgccgcaaggattcgcctgcagaccgttgaatatacggaatgcgtccacccgcggcccagtactggtttcgctgatctactccgccgggtcattctgcctgagcgcgatgctgatctcactggcatccacattgctgttcgctctgtccaatggatcgcttggcgatcatcgtctcgctcacattggcgtcgacgtcatggcctccaccagagtcgtcggtcattcgaccgcattgggatttaccgcggcatggctgctcgcgctgattggcacagcgctcgttttttcgataggctggttggttgggaggatcaatgattcccgcaccaccgccgcgaccccgaagaccgtcatcgtccgtcaggcgcggtccctggcgtcacaaccacaagaatccaaggaggaacaggatgacaaacacgaaccgaccgatccgtcgggcactggtctcggtctttcataaggaaggcatcgaagtactcgcggaagcgttcgtgaaggccggcaccgaagtcgtttccaccggttcgaccgccaggaagctcgccgagctgggcgtcaaggtaaccgaggtgtccgatgtcaccggattccccgaatgcctcgacggccgcgtcaagacgctgcatccgtacattcacgccggcattctggctgatatgaccaaccccgaacatgccaagcagcttgacggcttcggcatcaagccgttcgatctggtggtcgtcaacctgtacccgttcgccgacaccgttcgctccggcgccaacgaggccgacaccatcgagaagatcgacatcggcggcccctccatggtgcgtggcgcggccaagaaccacgccaccgtggccatcgtcaccgacccggccgattatgcactggtcgcctcccgcgtggccgacggcaccggcttctctctggacgagcgcaagtggcttgcagccaaggccttcgcgcacaccgccgcctatgacgccaccatcaacgagtggaccgccaagcactggcccaagccggcctctctggacgccgtcgaggtggacaaggacgatcagggcactgaagtcgattccgccaagttcccggcccagttcacccgcacctgggatcgtgcgcacaccctgcgctacggtgagaactcccaccagcaggccgccctctacattgacccgctcaaccagaccggtttcgcccacgccgagcagctcggcggcaagccgatgagctacaacaactacgtggacgcggacgccgcctggcgcaccgtatgggatatggctcccgccattgccgtggccgtagtcaagcacaacaatccgtgcggtctggccatcggcgcgaccgcggccgaggcccacaagaaggctcacgcctgcgacccgatgagcgcctacggcggtgtgatcgcctgcaactccaaggtcactcttgagatggccgaaagcgtgcgcccgattttcaccgaagtcatcgtcgcccccgactatgagccggccgcgctcgaactgctgcagaccaagaagaagaacctgcgcatcctcaaggtggccgagccaccgaagggccacgaggccatccgccagatcgatggcggcctgcttgtgcaggacaccgatctgatcaacgccgtcggcgacgatccggacgcctggaagctcgtggccggcgatgccgccgacgccgacacgctgaaggacctcgtgttcgcatggcgtgcaatccgctgcgtgaagtccaacgccatcctgctggcccacgatcaggccacggtcggcatcggcatgggccaagtcaaccgcgtggactcctgccatttggccgtcgagcgcgccaacacgctggccgatggtgccgatcgcgccaccggtgcggtcgcggcatccgatgcgttcttcccgttcgccgatggtgcccaggtgcttatcgacgcgggcgtcaaggccatcgtgcagcccggcggatccatccgcgatgaggaggtcatcgaagcggccaagaaggccggcgtgaccatgtacctcaccggcacccgccacttcttccactgatcgggactctctgaggggagcagctcagccaaaacgcacaaaggtgggattccgcctgacccgtcaacgggtccaagcggaatcccacctttgctattcgcctgctattgtggtcacgtaaccgttcgacagaaggaatcgcaacatgcacaaccatccctatgtatccgaagcgcatgagggcaagccatggtttgaatggtgcgtactcggcgtcgtcgccgtcatcacactgctggttgctttcggatatacgatggccgccacggtcatacttgccgtgacggccatcatcaccgggcttgttcgcctgattcttcaggacaaaagcccatggaaagtgcgctcagtggcgttcgactccttcatcggcatcgccttgggaatcggcctgctgattacctacttcagcttctttggactcttcggcaacatctttttccgctgaatcgccatcagacgaggcggcctgatcgaagaattcgccatcgtcgagcgtgtccgcgttcgcatcggcatccgtctgtggaagatcggcggcagccggcactttgggagtggtcatcatctgcgcgatgatcatgaccaacgccaccacagcggcggccaagaccgggctaatccagaacacccacagctgttgcagcggattttgcgtaagaccctcattcatcgcggccagtgcgataccggtggaacgggcgggattgagaccggcaccggtaaccgggtagctgatggcggcggccagaccataggcaagacccatggcaatgacatgacggtccgaggactcgccgtgatcacccagagaagacatggcggtggcaacgacaatcagagaggcaacgacctcgacgacaatcgccagcgtaatcgagaacgtaatgccatactgggtcagcagcgagtaagacacggagccgttctcgaaaccgttaacggccggagtcagccacactttggcagctacctgctcggatgtgggcagcagcttgaccacggcgaagccggcggcgatggcaccgatgacctgagcgatcacatagaggatgccatccaggattttcgtcttggaaaccagcacggaggctacggtgatggccggattcagctggccaccggacacgcgggagaagatggcggtgactgcggcatatgccaagccggtagccaacgcgaagaacacgatattgatgccatacacggccgaaccccatgtggagaaggcgtaaatggcaaagcacagcaggaagctgccggccaattcggcgcacacgcgcagggccagcggctgttgcttggtttcttccatgattgttcattccttttcatctgttggaagacgggcgaacccgtacaaacggttgccagtctagcagcagtcctacgttgcggtatgatatataggttggaattggctgggattccagtccgccaactctgaagtatgtatacaaatcgacagtctctgcgatgacagagtctgtccggccacgttgggagaacgatgccaaacgcatattcccgcgctgcgaaagcgcaagacgattccaattccattcgactccagaagctgcttgcccaagcgggattcggttcccgccgcaagtgcgaggacatgattaccgaaggccgtgtcgaggtcgacggtgaactggtcaccgagctcggaactcgcgtcgacccccataagcagcaggtgcgcgtagacggttcgcgcgtacgcgtcaatccgaaccacgtcactctggcactgaacaagccccgcaaggtgctctccgccatggacgacccgaagggccgctacacgttgcgcgacatcgtgggcgacaagtacgagcgcatcttccacatgggccgtctcgactacgattccgagggtcttatcctcatgacgaacgacggcgaactctcgcagcacgtcatgcaccccaagtacgaggtcgaaaagacctacgtcgccacactggaaggcaagatctccggcaccgtatgccgtcgactcgtgaccaccggcgtacagctcgacgacggctggatcaagctcgaccactgcgcgatcatcgactcctcacgcgaccacacgatggtcaaggtcgtgctgcactccggcaagaaccgcatcgtgcgccgtatcttcggctcaatcggcttcccggtcaagcgcttggtgcgcacccagatcggcccgatcaaactcggtgatttgaagcccggttcctaccgcgtgctgtcccagacggaagtccgttcgctgtccaaggaggttggcctgtgattcgcgttgccatcgacggccccgccggcgtgggcaagtcgtccacgtccaaggcgctggccaagtatttcggatacgcctaccttgacacgggcgcgatgtatcgtgcctgcgcttggtggtgcctgaagcagggcatcgatctggacgccgaaaccgtggatgagcgtgtcatcaccgaagcggtgggcgagttcttcaccggcgaccatttcgatatctccgtggacccggacaacccctgcgtattcgccgacgacgaggacatctccgaggccattcgttcctccgaagtctccagccatgtctccaaggtgtcgaacgtcatcccggtgcgcaacgtgctcatcgccgcccagcgcgcctacatcgcccgcgaggcgtcggccgactccttctccggggggctgggcatcgtggccgagggccgcgatatcaccaccgtggtgtccccggacgccgaggtgcgcgtgctgctgaccgcccgtgaggaggtccgtcaggcccgtcgcaccggccaggctgtcaagggcgtgggcgctgaggatgtggccgcgcgcgacaaggccgattccaaggtcaccagcttcctgaccgccgccgatggcgttaccaccatcgacaattccgatctggacttcgcccacacgctcgatctgctcatcggtgtggtcgaggacgccatcgagaaccaagaatacgagcagtatgccgccaatctcgaaggctatgagctggacgaaggcgatgaggatctgatttccggccgtggtttcacggaaggcgcgcgcaaggccggtcccaagccggtgggcgtgctggctgttgtaggccgtccgaacgtgggcaaatcatccctggtcaaccgtatcctcggccgccgtgccgccgttgtggaagacacgccgggcgttacacgagaccgtgtgagctatgacgcggaatgggccggcaccgacttcaagctggtggacacaggaggctgggaagccgacgtggaaggcattgaatccgccatcgcctcacaggcacagattgccgtgaccttggccgatgccgtggtattcgtggtcgatgggcaagtgggcatgaccaccaccgatgagcgcatcgtcaagatgctgcgtgccgccggcaagcctgtcgtgctggccgtcaacaagatcgacgaccaggccagcgaataccttgccgccgaattctggaaactcggcctcggcgaaccatactcgatttccgccatgcacggcaggggagtgggcgacctgctggacgtcgcgctcgacaagctcaagcaggccgagaagacttccggctacctcacgccttccggcctgcgccgcgtggctctggtgggccgcccgaacgtgggcaagtcgtctctgctcaatcagctggcgcgcgaagaacgtgccgtcgtcaacgatttggccggcaccacgcgcgaccccgtcgacgaaatcgtcaacatcgatggcgaggactggctgttcatcgacaccgccggcatcaagcgacgccagcacaagctcacaggcgcggaatattattcctctctgcgcacgcaggccgccatcgagcgctgtgaattggcgctgattctgtttgatgcctcgcagccggtatccgatcaggatttgaaggtcatgtccaccgccgtggatgcgggccgtgcaatcgtgctcgtattcaacaagtgggatgcgatggacgagttcgacaagcagcgtctcgaacgcctgtggaacaccgaattcgaccgtgtgatgtgggccgagcgtgtgaacctgtccgccaagaccggctggcacaccaaccgtctgacgcgagccatggataaggccttggaatcctgggatcagcgtattcctacaggcaagctcaacgccttcctcggcaagatccaggccgcccacccgcacccgttgcgtggtggcaagcagccgcgaatcctcttcgccacgcaggcgtccacgcgcccgccgcgtttcgtgatcttcgccaccggcttcctcgagcacggctaccgccgctacatcgagcgttccctgcgcgaggaattcggcttcgaaggcacgccgattcagatctccgtgaacatccgcgagaagaagaagcggaagtgacacgcgcgtaatttgccagatttcatatatctggtagattatctactcggtgcttttgcaccatcgggccgtagcgcagtttggtagcgcacttgactgggggtcaaggggtcgcgggttcaaatcccgccggcccgaccgattagccccggaattccgccacttctgagtggttgacttccggggcttttccgttttcagacaacatgagacaacatgacgacggacttacctttgtaagccattcgtaatggattaaacacggacttcatcttggcgtgttattggaattatcaccgacaattcaccgcctccgccccccgtcgtatgtgtttgccccaaacaggggctagactggttcctattgatttgatgaaagggacccgaattgaccgaaataaacgataaggcccaactggatatcgccgccgctgacgacaccgacgccgtcacctcggatatccccgaagaaaccgtaaacacccccgaagtggatgagactttcgagctttcggccgccaagatgcgcgagcacggcatgagcgaaaccgccatcaaccagttccgccatttgtatgacgtatggcgccatgaagaagcctccagctggattcgtgaggacgacatcgagccgcttggccacgtgcccagcttccacgacgtctatgagaccatcaaccacgacaaggccgtggacgccttcgccaagaccgcattcctcaagctcaatggcggtctgggcacctccatgggattggacaaggccaagtcgctgttgccggtgcgtaggcacaaggccaagcagatgcgcttcatcgacatcatcatcggtcaggtgcttaccgctcgcacccgcctggacgtcgaactgccgctgacgttcatgaattctttccgcacttcggcggacacgatgaaggcgctcaagcatcatcgcaagttcagccagcatgacgtgccgatggaaatcatccagcatcaggaacccaaactcgtggccgccaccggcgaaccggtgagctaccccatgaacccggagctggaatggtgcccgcccggccacggcgacctgttctccaccatctgggagtccggcctgcttgacgtattggaggagcgcggcttcaagtacctgttcatctccaattccgataatctcggtgcacgcccctcgcgtacgttggcccagcacttcgaaaacacaggtgccccgttcatggccgaagtggctatccgcaccaaggccgatcgcaagggaggccatatcgtgcgagacaaggccactggtcgcctgatactgcgtgaaatgagccaggtccatccggatgataaggaagcggcccaagacatcgccaagcatccttacttcaacaccaactcgatctggattcgcatcgacgctttgaaagacaagctcgccgaatgcgatggtgtgttgccgttgccggtgattcgtaacaaaaagaccgtgaatcccacggacccgaactccgaacaggtgattcagctggaaaccgccatgggtgccgcaatcggtctgttcaacggttctatctgcgtccaagtggatcgtatgcgcttccttccggtgaaaaccaccaatgatttgttcattatgcgttccgatcgcttccacctgacggacacgtatgagatggaagacggcaattacatcttcccgaacgtcgaacttgatccgcgatactacaagaacatccgcgatttcgacgaacggttcccctacgccgtgccatctttggccgcagccaactcggtttccattcagggcgactggacattcggacgtgacgtcatgatgttcgccgacgccaaacttgaagataagggtgagccgagctacgtgccgaacggcgaatacgttggcccgcaaggcatcgaaccggacgattgggtgtgatttacaacacggtcgaacgataaaaaagatattatttttgtgaaatggcgctcaactgtggaaaaagcctctaagatagagtgagtgtggggaaactcatacgcacttataacgaaacaataattatacgtgaggactaatggcagagggcacaagcggacgtcggcgtttttccgacaaatggggcaagcacgagctggacgtactggctgtgttgtcatccgcgttcccgcaatggctcacatcccgccaaattgcgcagcgcgtcaaggcttacgccgactcgtatggagagctggctgatcaggccgccaaggccgcgttcgccaagcagttccagcgtgatcgcgccaagctcgctgcgatgggcattgccatcgaatcacggcagcctgagtactcgtccaagtcggaaggccaggacttcgcgtcctatcgtctgcagttgggcgacgaaccgcgcatccgcctgatgttcgagccggaagatatgccggtgcttgccgccgccaactatctggctcgttcgatgtcgatttcttccgagccggatcagtcccagctcacccagcatgtgtcgcgcactacgccgcgtgtgccgcagaccccgattcccgggcttggcttggattcgattgcgcctggcttggggacgcagcccattccggattcactggtcaaggttattgattcgcgtcgtttcgccgccaccgttgacgtggatggcgaacacctgaacgtggcatacaccgattccgacgatttggccatgtttgtgcttgagcatccgggggccacgattgtcagcccgcaagaggctgtggacgcttatcatcgccgtttgcacgccgccagccggttcactctggccgacgaatccgccagtcctgtgagcgcttcggtggtttccccgtcgattagtcgcgatgtgcgagagccgggtgatcccgagtctatcaaggctcagaacaagaagaacggctccgctttccaaacgggcagtgaggttgatcgtcgcctgcgtctgatgctgttcctctccgctcatctgggtgaggaattctcgatgagcgagctgggcgaacgcttcatcggcaagccaaagaacgatgatgaactcaagaaattcgtcaacatcatccataaggacatcaacaccctgaccaccgtttccgacgatggtgagatggccggcagccagttcttcgatattgactggccgctgctggatgccgagggtattgtttccgccaccaattcgctgggccttgaacgtcttgccggcatttcgccgcaatacctcagcatgctcaccgcctcggtcagctacctggcgcattcgccgttgctgccggacaagcagcgtgggcaggccgaatccctgtatgagcgtttgcgccgtcatgtcagtcccggtcagaccccgtggctgagcctgaccggctatgagctggagccccgaagcttctccatcgtcaagcgtgcgatcaacaccgattcgctgttggacatggagtacaccgacggtacaggtcgtacccgccgcaagctggtggcccccgccaagatcttcattgacgaaggcgtgtattatgccgccgtctacacggacgttggttccgccgcgcccaaggacaaaaaggcctacgtctccaaagacaagaccctcgacaaggccaacggcaagccgcgcatctggcaggtactgcgattggcccgtatcgaaaaggcggaactggtcaagcccaccaagcagatcaacatcccgaacatgccggtgagcgaactgcgcaagtggagtttcgacaacggtaccgacgcggtgttcatcaccgatcagcgcgatctggcattcatcaagacattgccgggcgctaccgtcgaacaatgcggtgccggtgaaaaggtgcatctgaccgtttcctccgattcctggttcgtggccttctgcatcgcccacgcgcgtcatatcacggcggtcgccccggaaacgttgcgcaccatgatcgtggcacgcgccgaacgcgaactgagcatcagcgagaacaagtaaggagcctttcatgccttggtggatatggctgattctggccctgttcatgctggccatgattgttgccggactcatctatgcagcccttcatggactccgtgccttgaaagacatgtccgacatcggcggccaactcggtgaacgcgtggccgcgatgggggagcccggcacctctgccgacaccagcgagccgcctctgttcactcagccgctcagcgtggcacagaatcgttatgccgaggcccatgcgaacgtgattcgcggcaaggccgccaagcgcgaacgccacacccaggcatgggcccgctggaagcgattcaacaactaacggaaagcagcaatggcacgtcaccaacaccataagggcaatgccgattcccagacgctgagcccttcgcagcggtacgcatcattccaaaaggtccaacgccatcgggcgtccgcagcagcgcgattcgccgaatccctgcctttcgaactggacgacttccagaccgaagccaatgacgcgctcgaagccggcagcaacgtactggtcgcggccccaaccggtgccggcaaaaccgtagtggcggattttgccatttacctcgcccaggaacgcaacgtcaaagccttctacaccacaccgatcaaggcgttgagcaatcagaaataccatgatctggtcgacgtgtacggcccggacaaggtaggcctgctcaccggcgacacctcgatcaattccgaggcggacatcgtggtcatgaccaccgaagtgctgcgcaacatgctctacgagcgttccaccacgctgaacgcactgcgctacgtgattctcgacgaagtgcactatctggccgaccgattccgcgggcccgtgtgggaggaagtcatcatccacctgcccaagacggtcaagatcgtcggcctgtccgccaccgtgtccaacgtggaggatttctccaactggattgcctcggtgcgaggcgacacaaaactggtgatcagcgaacaccgccccgtgcctttggaacagcacgtcatcgtgcaggcggacgaacacaccgagcccgaggtgctggacctctatcgccgcgacggcaacggcgagcagaccaccaaactcaacgccgaactcatcaaccggctcgaccagttggaccgcaaggccgcacgccggcgcggcgaggaacgccccgataagcgcaagggcttcggcagaggccgcggcggcaaaggcgccaaagaccgtgccccgaaagcggaacgccacaccccgcgccgctgggccgtggtggacgagcttaacttcctgggaatgttgcccggcatctacttcatcttctcgcgcaacggctgtgaccaggccgtggaacagtgtatcaacgctggactggagctcaccaccgatgaggaagtgaccaggattcgccgcatcgtggatgagatggtggaggggcaactcactcaggaagacctgaaagccctgcagttctccaagttccgctttgcattggaagaaggcttcgcttcgcatcatgccggcatgattgccctgttccgtcagatagtcgagcgattgttcgaagaaggtctggtcaaaatggtgttcgccacggaaacactggcattgggcatcaatatgccggcccgctgcgtggtggtagagaaactcgaaaagttcgacggtaccggtcatgtgggcctgacgcccggcgaattcacgcagctcaccggtcgtgccggtcggcgcggcatcgacaccatcggccacgccatcgtggtcgaccatcacggttttgtgcccgccacggccgcctcgctgtcatccaagcgtgtctacccgctgcactcgagcttccgacccacgttcaacatggccgtgaacctgctcaactccagcgactacgagaccgcgcgcgtcaccctggaccagtcgtttgcccagtgggaggccaacgaatcggcctggcagctggaatcgcagattaacacactgaagaacgcgctggccggatacgaacaggcgttcgcatgcgaacacggcgacttcaaacagttcatgaccctgcgtatggagctgagcgacatcgaaaaggaaggccgccgcaaactgaagcacgaagtgttcctgaccgatcaggagcgttcacgcgctttccagaacctcgaccagcgcattcgcgatttgcgcaaggcggaacacgagcatccatgccgcaactgcccggacctccagcaacacctcaaatggggccaccgctgggcccgcgagactcgagaactgcagcgcgtcaccgatcgctacgactcccgcaccgggtccgtggcacgccagttcgattgcatctgcgatattctcaccgggcttggttacctcgaacgtcatgtcaatgcggccggccacattgacatgacgttgactgaaaaaggtctgctgctgcgccgcatctacagtgaacatgacctggaactgtgcgaggcgctgctcgccggcacgttcgacaagctcgacgccaacggactggccgctgtgctctcttcactggtatacgaggccagacgcgggggagacggcgaaccgaggcactacccgggcggcatctccgggcccatcgccatcgcttcgtccaagctcaagggcatttgtgaagacatcgatatcctgtgcgaggatcacggtctggacgagatgcagcggccagatttcggcattctcgacatcatgtatgaatgggcggatggcggttcgctgggatcgtgcctgtacggcaccgacatgaccggcggcgacttcgtgcgcactgccaaacgactggctgacgtgctgcagcagattgctgtcgcccagccgctgccgttcgacgggggagagcggctggcaggcctcgcccacgaagcggccgaccgggtcaatcgtggcgtggtggcctactccggcgtggactgacggggctgtttgacgggagtttgtcagccgacgtcggaagcttggaatagcggccaagtccgaactgttgcgtaaattagtagggttaaagatctttcaaggaggatgccgatatggcagaacgtagcctcaggggcatgagcatcggagcgaaatcgctggagtccgacgacaacgtcgatttcgccgcgcgaaacgatgtggcgtatgtatgcccgaagggccaccgcaccatcctgccgtttgccgagggtgccgaaatcccggacgagtgggagtgccgttgtggttccgtggcccaccgtgagggcgacgccgaccgtgagggcgacgaaatcagcaaacccacccgcacccactgggacatgctgctggaacgccgtagcgaagaggaactggccaccctgctcgaaaagcgcctgcaaatgcaccgtgacggttggattcccgactacgagtgatctcctactgaacaacacgtgaacttgatgcccagtcatcccgactgggcataatcattgttggaacaagtcgcattgtttgacgaccattcaaagcagtcgacatgaacaagggggagtggaatctcaatggcacagcatccgatgaaagtggtcctgttggatctcgacggcacgcttaccaagtccgacggcggcattatcggctccgtcatcaagaccttcgaagagatcggtcgaccggttccggacgccgccgaactgcgacgcttcatcggaccggcgattattgaatctctgcgtcgcaatcatgtgcctgcggaagatctggatcgggccgtggacatctaccgcagctactacggagaccgtgccgtgttcgacgatccgaacgagcccggcaacaaggtgcccggacgactggtgaacgtcgtattcccaggcatccgtgaacagctgctcaaactgcatgccgacggttactacctggcactggccagctgtaagcccgaataccagtgcatgcctatctgcgaccatttccacctgaccgaactgttggacggcatctatggtgcttccaaagacaattcccgtctggacaaagatcaggtgattcggtactgcttcgacaaaatcggttttgatgctgcagcgggggacagggccgtgatgatcggcgaccgctacaccgacattgacggcgcccacgcctgtaatttggacgccatcggctgccgctggggctacgctccggccggtgagatggaggaacacggcgcgtacgagatcctcgagaagcccgagcagatcgaagacgccgtaaaccgttatttccaaacgcactgaaacacaacggcgaggacttcttcatgatgggatgcgatggagcctgcgccgcgggcttcgacctggttttcatcggtttgccattgctgtcgctgtatgagattcccatgctgatatggttcatttggcgagcattccactggaaacgagatgacaaggattggctgaaaggcacggcgattcttgcaattgcggtggtcgctccggtgctcctttggctgtcggccttttggctgtcggcctggtatgcgtggactagttgatacaggcgactgaatcctcgtcaaggataactaatctgacataacgtacattatcggctaactattcgggaatcttagaaacggcttaatttcaacggtcttcatttcgcacaggtaactgtggatgcctctgggtggcccgttgtggctacgcatttggctacgcatttcac

SEQ ID NO: 377 - DNA, 12621 bp, Unknown
  R42_10m  MAG No. k141_38251
gccacgttggcggtgacctgcttcagggcgtcgaccaggccgagggaggtggcgtagttgttgcgccagatgttgcggccgttgatcacgccggcgaagatggcggtgttggaggccacgccatacttggcgacggcttcgaggttctcttcacggccttcgttgaggtccagtccgatgccgtcgaagccgagcaggttgacggtctcgtacacgtcggcgatgtggccgaagtaggtgttgagcagcaccttgacgttgcccttggcggacaggatcttggtgtacagggtcttgaagagctccacatcgcccggctccttgtcgagcacgaggtacggctcatcgagctggacccatgcggcgccgagttcgttgaacttgtcgagcacttcggcgtagacggcggccacggcgttgaccaggcccttgtcgagctcgagttcggtggcttccggggtgcgggcgagcttcaggaacgtgtacgggccgatgaacacgggcttggtgtcgatgcccagcgccttggcctcgttgaactcgtcgaacggcttggtggagttgagcttgatctccgcggccgactcgacttcgggcaccagatagtggtagttggtggtgaaccacttcttcatcggcagggcggtcacgtcgcccttgtcgccctggtagccgcgggccatggcgaagagcgtgtcctcctggttatcgaaggcgagacgctcgtaacgcttcggaatcacgttgaggaggatggcggtgtccagcatctgatcgtagtagctgaagtcgttgctggggatgaggccgatgccggcggcctgctgcagcttccagtgcttggcgcgcagttcggcggcggtggccttaacggcggcgaggtcgttggcacccttccagtagccttcgatgatcttcttcagttcgcggttctgcccgatgcgggggaagccggagacggaagtcagagtggacatgaatcctccaatgtatgcgttcgtaacccgacttagggtagcaaaacatccggattccaccccttataaatggccgcagagtgtcgttatagatggaatttatatccgctttagtcgaagtctttcacattgatgaccgcgagcagttcgccgctgtgcacctgccattcgtcgaacggtttgttcgatcccatgatcacgatggatgcgggcgaaagtcccaagttgagcaggtcgagtcgttcgccgtcggagtcggcggaggcgagccattgggcgctgatcgacacagtcggctcgtggcccactatcatgaacacgcggttcttggccttgacgtgggcgagctcgtcgaacaccgcctgcactcccccgtcatacaggctgatgcggtagtcgacgatcggcttgtcgccaaaggtcttgagcatgcggtccagtgtctggcgcgtgcgggtggcggacgagcaggagatctggtcgggcaccagtcccagcgactcgatgcccttgcccacggccttcgcctgtttcagacctttgtcggtgagctcgcgctccgagtcacccttgtcgccgaacggctcggccttggcatgcctcatgatgatgaggatatggtcgtattttttcgctgctttggcgactttgctcagcttgatgcccatccgtggctcccttcacgaaccgtctgcccggtgtggtgttgcttccagtatagaggtgtgtgagcgttcacaaactcatcgtcgggcggttattcatgcgtgttgccgagttctcccacctgacggtcgaggtcgcgcaacaccttacgtagtttgtggtcggagatgtcgcgcagttccagttcctcgatctgcgcctcacgctgttcgtcggtgagcgagtcgatgtcggtctgcgtgtccttggtcacgcgatcgcgctttctgagcgcctcgaatccggaggccatggcgcgcgagataacaaggaaaccggtatggccgatcatctggtggtcggggcgtacggcgaggccttgggccttccatgtgcgttcgaacgattcctggatctgcggctcggtccagcaaccggccgcgcgcagggcttcggccagtcgactcatctgcgtggtggtagttacgtaactgaccaacacgccgccgggggcaatcacgcggtatgcctgctcgagtctgttccacgggtcgagcatgtcgagcatgatacggtcgaaccagtgttcgggcagttcggcggccacggagtcgaagtcgccggttttgagatcccaccagctgggggcttcaccgtaatacagcgtggcgttggcctgagccactttggcgaattcggggcgcagctcgatcgtggtcagatggccgcgctcgcccacggcgtccagcagattcacgctcatcgcgcccgagccggcaccggactcaagcacgcgcatgccggagcggatgtcgccgagctggacaacctgggcgatgtccttcggatacatgatctgcgcgccgcgcggcatcgacagcacgtaatcggccagtcgcgggcgcatcaccgcatactcccagccgccgatggcgcgcgacgatttccacggcttgttcttgtctttctcggggtagacctggttgacctgcgcctcacgcttggcgtgcacggtgaggatcacggtgccttcggtcttgccgatcacatcgtcatgcagaatcaggccatgctcggtctgcgtggagccgccggccacaagctgatcggtgatcttcttgcccttgcggtcggtgaactgcaccttctcgcctgcggtgagaggcccgcgcctcggctccataacttgctccttgtgtgctcggtgggtcaatcgctacaagtctaatgcatgtaagctcgttggtgaggtgatgacgatgcgaatgcagatgacaagccagatcgatgccggcggcaatgaccccattttcctgatgttccacggttacggcaacgacgaaagcgagatggtgcggattctcgacgccgtatatgcgccgacgcgagccgatgcggccccggccgcaattgccgccgtacccagctatatctcgttccgtgccacctacgcgaggccctatatgggcggcaattactggtatcccgacggctgcggcgtggacgagcgccaacgcgaatgcgcggcggtcggggatgcggtggcttcactgctggatgcctcggcattcgcccatcgcaggaagatattgatcggtttctcccaaggcggttatctgtcgtatcgtctggtcaaggcgcatccgacgttgttcgatgccgcgatcctgctcagtccttcgttcatgggcgaggaacaggcggcgcttgactcccctacccgattcttcctggcgtatggcgcgcaggaccgcacgattccgatgcccgaccagcaaacggcccatcaggtccttgaacgggccgggcatctgacctatcgcgagtattccggcatggcccatgccatctgtgatgaggaaatcgccgatatccgggatttcctacgtgccatatgatgccggaatagcttcaatatggaatatctccgttcaaagaggtaccggtccaagtagaagcggctcaacaatggcggaatggcgttggccacgcccattcatcgcgcgatggttctgcgatcagctcaattcccctgccggctgatgccgcccttatgaccggtggccttgaatggcgtggcgcgtgccgtcaccttcggccccggcagattcgtactggtattggatcgaccgcggagcccggcagccggctgggactcggagcgtcgaccagtacccgtgatgttggtatgccgtttgccgtcgtgcgcccgtttctcaccagcaccttcagcctcgtcaatatcaatgcctttggcgcgcaaagcacgtgcccaccgctcatccatcgaactcctcacacatcccattcgggtttccacgtgtactgcatgtcgtaggcgctgggcgaacggcggcaggtggttcagggtgatcggaccgaatgcggcggcgtcaaaagacatcgtttgcccccttcgatggtgttggccaacaggttccaagggtcaggcacagcgcctttctcaacccgttcgccgccacgatgaccggcagcttgcgttcacgggttcccctgcaatgcgcctcattatggcaacacgaaccgacaggtgccggctgcgcctaggatgggaaatcattgctgcacgccgaaaagggaaggcgactgtcatgaggtatttcacgaccgacacgcatttcgggcatccgctggtcacggtgttgcgagggttcacgacgttcgatccgacgcgctcgcgctatgaggaggtgcgacgcgcatgatcgcaagaccgccgaggattgggccaaggaggagacgttcggcgcgggtctgacgtttcgtcaggtcgccgatacggatgcgcatgacaaggcgattgtggatcatatcaacgctgtggtcggcccggatgatgagctgtggattctgggtgatatcggtttccgcacatcgctgacccatctgaagaactgcctgtgagcgctcaattgcaagcatctgcatggtgtgatcggcaaccatgatgactggtggcgggaagaccgccccgcacttaacctgttcgaaagtttggagccgcacgatacggttgagattgagggactcggtacggtcaatctttcgcattacccgtatcgggaggatctggcatacagttggcccgatgatgtggcgaagttcagcggcaaggcgttgccgtttgacggccgcagactgctgtatggtcatacgcatcagctttcgccagatggtgcacgcccggaggcactgaatgttggcattgacacagcattgaccgccgttgagatgtatgcacgctgaacacgcgcctcaacggcattggtctcgtcatctctcgctcacaccaacggattgccggcaagacgggtcaattcggcgttcagctcggggaaatgctcgttgccgacgaacggaccgtattccgtgccggattggaatgggcaccatgcctgaatggtcatatgcttcagtcgtgaataaggcaggatgtcaccggtgcgatcggctgcgggatcgctcgccatattgaattggatttcagcgtcgagcatctgtgtatgcattccgccgtgtcgaaatagtcgatgccggaatcatgggccacggccacggtacgtgccgcatcggcggcatccaacgcgtccatgcgcatcacgcccagcgccactcgtgacgcaatcatgccgggttgtccgatttcctgagtcttcatagtgtctcatttctgttatcgtgaatcggcgaacgggcactgtccgcttcgttgccgggcagcaatctccattgccgctgcttatgtcaccttatcgcttgaagtgcacttgaaggcaactcgcaggcaggcagcgcgcgctgccgggcgcgtcttcgcgtcttcatgtcctcgctgtgaccgagacatcgttgtgccgtaatcatgcccatttcttgtatgatgacctctatagcaacagagctagggggattccatgaacactaccgattcagccaaagtcaccgatgccaatgccggcgcaaacaatgccatccatatcccgcacaatcccacgcttgccggattggccacgctgacccgcaacgtggcgtacaagaccggggccgatgatctggtgatggatatcatcgccccgcaatccaccggcgatgacgatgaccgccgctaccccaccgtggtattcgtgcaaggcagcgcctggaccacgccgcatcgcgactacgagatcccgcagctctcggctttggcccgcgaaggctttgtggtggccacggtgaatcatcgcgacgcctcgagcgatccccatgacgtgttccccgcatatctcgaggacgtcaaagcagccatccgctatctcagggcaaacgcacgtcaatggcacgtggaccccgaccgtctcggtatctggggcacgtcgtccggcggcaacacgtcgctgctggtggggttgaccgccgacgatccgcggtatgaggacggcaccaatgccgatgagagcgatgcggtgaagtacgtggtcagctgcttcccgcccaccgacatgcttgaagctgtcgacgcattcgacgatgagaccaatccattccggctgtattatttcggcccgttcgcggccgtggtgggcgcgacccatgagaccggcatcaatgccgaggtccgtcagcgcgcggctgacatgagcccctacctgcaggtgcgggatgaccagcagtatccgccgatgctcctgttgcacggtaccgccgacaccgtggtcccctaccatcaatccgtcaagatgcgcgaccggctggtcgagcacggcgtggacgcgcagctggtgctagtcgacggcgccgaacatgagtacgatttctggagccagcaggtcttcgacgtgatcttcgatttcattcgtgagcggagctgaacggtaagggtacacgggcgcgtccttgttataggttgccgagttctcttttagccaattttgttggagcccctatctgcgcgaacataccatgacagttctagactgtgttctaggactgtcaatcggcaatgtgtatgaagcgtgatgtgatgggtcagacggcgattgatggagttgagggacttaatagggccggcgaaatcggcggattcagcggttcgcggtcggtggccttgccgcctataccattctggccgtgcttacttcgcgactgttgcaacggccgactaccacggaactgttgctcatcgtcatgtggatcacgctggaactatgtgcgctgactatgttgcacagttccggagctctcggggcaaccgccgccatcgttttggccatcatcctgctgattttgcttatcgccgacatggcctgctacctcgcctactgccatctgccacccatgcccgccttcatcgacggcaccgcaccactgattgccgtaacggtgttttctgagattgtcgtggcgatgattgtgtaggtccggggattttgtttgctatttcgtgttattcaattgtgtcccgaatatatatgggcactgccaaatttatgattccaatcttttcctgcggatcggcttaagataattgactctgaaggatttccaatcaccaaaaaacttgttgtccgtttcagtttgttccccattccggaatttctcacaggtcaattcaagggtgcatagaaaatccgcaacttgttcaagccggtagtcgcgtggagaagcgtcacgatagacaatggcatcttttgagagtgcatactcaatcccgcctcgcagggcatcagtaactatctgttggccaccgtcgtaatacaccttgacagtgccataagaatggaaatccgaaagatgcgccaaaagtagattaacaatatcgcgtttgagttgcgcttcaaaacgttggcggttatcgtcaaaatcacttttacgatgcacaaacgtccgatatgtaatcggcagccgccgagtcatgataacgaataaacccagaagcctcttacgctccgataggctcatcccttcgtaagcatcatgcccggtaagcagcggcccagcatggaaagggacatcaggaagtccatagtcagccaacgactggcggtaccgctctaaggcaagactaatatccttagactggtcatgaaaaacaagagtaattaaataatattctgatcgtttaccccactcaccgctctcatcagcgaagatgctcaatacagacggcatcgcacccccgtccccgttgacaaaaaatgccgggggagccccccggcgacttggagcctttctcgtttccgagtaaagcaatatatttatagcattttcagcccctagcccgcaagccacaaacggctattccgctgacagctgctcatattgtagccacgccatctactgcaacatcatgtcacggtgcttgtgccaacggaacagacgctcacgatggcggttcagcgtgaaacgatcccacatctggtcctcggcccactcaaccatgccatcatgttcttcatcttcgggattgcccaaggtatcaaggaaccgatcgaacccatacactccgccgacatcctccggaggcgcatcccctgccccatcccaaagctgaggatccgcaacgtgcacgctgcggtaggtacgcagcagcttgatgtcatggatccaatcgtcaccataatcgtagtaatagcgagcggcacgcgccttgggaaacacgtcgcccagctcggtttccgaagcaatgcgaacttccggcaacggctccaccggcatatattgttcgtatttcgcctcatggtatgagggctcttctccccacaattcttccacttgcacctgcttcccatccgggaatgtggcgcagaagcagaacagatgctcgccgtaccacataaagcattcctgcaataccgcatgcaaatcgaagaacgtcaatgatgccggcaccagaatctcccgccagcattcacgcccgtcaaggcgcaaagtgactcggaaacgaaatgccgtgttgccattgcctgccatgaagactcccttatcaacgatgaagttattatcaccgtaacagagtccagggcaaaccactgcgttacgaatctgattcgcgccctcagaaaaggccgaatcatctgttcaatctccgtgtcctgtggaaaagactctaacaataaccggtactgttcatcatcagcaagtccaatatgccatgtgactaggtgcgggacactcatgtgatcagtcgctatggtggggagacgtgtcttcggttcgtactgtcgagcagacgcgaatggggatagccgtgatgctcgtgtccgatatcggctggggcgtgctgccgctgtactggcgcgcgctgtccagtatgaatgccatcagcgtgctcgcgtatcgtttggtcgccacgttggcggccatggtcgcgctgttggtggctttctccggcctgcccaccgcgattccgctggccacgttctcctacggcgtgcagcacagccattacctgaccgtgagtttcatccaatatctcaacccgctgatccagttctgtgtgaccgtgctcctgctgcacgatccggtgcgcgcgcagggctatgcggcgttcatggtgatttgggtcgcgatcgcggtgtattcgttcggcgcgattcgggcgtattgggagcggctgaagccccacgcacgttaagcgcttccttaactcccctccccgaggggagctgtcgccgtaggcgactgaggggaggtcaacacggcaaacagcagaaacctcgctcccgaccaaggccacaaacaccactcacgaagcaagcttgtacaagttctccttaaattcccgctcactccacttaatgggatacgcattgtacttttccaaagcggttattagctgattgtcaatgcgccgatccgaatcattgaggaaaacaacaaccagttcacttggtgtctttcgtgccgcctgcgtatcctcccatgaaaataaggtactggaaatgagtcgctgggaaggccgcgtaatagatgtgcagaatcgttccggctgtttactcgtgaacggcaacacaaagtcatacgggcacagcaaaccagacttgccacggaattgaacgtcttccacataccgtatgttgttcgcattaaagaacatacgaatgtcatctgcaaaatacgtctgcacatgggattggccagcatagacatatcaccaactttgatgatagcttgcaggaaccgattcttggcatcagcaaaatcagcagtatcgctcgtcagagtaagctcgtcgccgttacgttcaataccaaactgattcagaatatctttgagcactgccaaacgtgattccgtcacagtcatcccatgcgacttgtggcacagtcatcagagaacgttacgctgttcttcccgggcttcacatagaactgcgtatagtcgttgtcttcatccagaagcggaacattaacttcataccactcatccagttgcgtataagtcgtgttatcagacagccattttccgtagcttcgaattaatgagtcaaaatcagaactcgtcatactttcttctcgtcgtaaacaccacgattcatttgactacaaacttatctgatgcaattggaattgcttctcgcctttattcagggtgatggacttcggagacaaagcttccttcagcagttccagcatacgacgagcttcagcatctgtcagtacagccattgacgcctcttccccgaatgcgattgcccagtgggaacagcctacatcaggtcagcgggtgccgccaattcccgggatcgttcgatgcgtcttgctgtagaatcgtcgcaacggttctaacagtcggatgccgaagaggcggggaagatcaatgagttgggcgggtagacgacggctggcggcatgcgccgcggcattggcggcgctcgtcgccatcgccgcgggactcaccggatgcgctcctcccgtatggctcacgcatcacgccgatgcggatgcgaacggggcgggcgccggcggtaccggaaatgggacgttttcggactggccgccatacgcgaagaaaggatacgacatggatgccacacccacagcgaggcagatctcgatagcggaggcgctgctgaacgatcgacaggagcgggacgcgaacgtcgccggcatgaaggacggttggcccgactcgcaactgttccgtctggtcacgctggcggagacgctgcttgaccggatgtcggaacggtatggcgtggaattccgtgcatcagaaggatttcaccgtccggaactgcttgacccgacatggtggatcaacgtgacgcccgcatcggggccgttgcaaggcgacgtgttcgaagtggattatgtggaaggcaatggtgccgacgggaacgatctcggtccgtatgtcgcggacacgtatttcacggcgctgcgccgggacgactacaacggtcatcttacggaacggatcgaccggttcctcgcggcgcatcccgatctcgactgcgtctaccggatcagcgaccccaccggtccgaagaacgagacccaatggcggttgtcgccgtccgccgccgtcgacgatctcgcctcgtatttcgttggcagcatggagatctacatctccccggaaaccgtgacggaccgtgagcggttcgccacattcgcatcggcgttcatcaccgccatgcggaaagacgggctggacgtccactacgagatcgcgcagatcacacgcatcgacggcgacggattcaccatcggggccgcacgggacgctatgcgccattcgacggagacgcccgcgtgggactcctggtatacgggaggattcaccgccagcgcggacgcctccgcccccgagatcatcaaggatggtgaatgatcatggccgtggacgcgccgtcatcgcaaccgcatatgtgctcccccaacagagcgaaaacgacgattacgggcgtgtctcatcatcgacgatgttggccttcgcctgtgcgatgaggcggaaccaggcgacgggccgtcccaccatcatcgtgaccatgcatatcatcgtcatcagaatgaggcagaacagaaaggcgaaatccttgaaatacaggtacgccgcaaggagtaccacatccgacagccagaatcctatgatgaacctcatcgccagccaggcgttcctgaccgtcgaacgatagacggctcgtagcgggcgccgaccacccccgctatgcgcttcaccgtcttcgccggccattcgtaggtgacgccgacgctcaccttgccggcggcgcggccctgcgccttcgcgcgtcccatgcgccgtaccagcaggatgatgacggcgaacacgccgcccacgatcgcgaacggaatccacagatcccgctcggccatcggcctgcactcaccgttcacgcacacctcgccgtcgatcgccatatcgagcgcctgcgcgaataccggagtcaccgcggcaccaatcattgcaatcatcgtctattcccttccctgttcaatgcaccgtgacgctctcgatgatcgcatggatccgcttgagaccatccatcgcggtcggcccggtcgccgtccaacgatgagccgatgtcgtgggtctggcggcgagtcgacggcccgcacatgctcccggtgttgctgttcattcggaggaagacgcgaagcagaaaatcatcatgccgtatttgcggtcattgggatactccgaaaacgaaatgcgattcgagaatcccattaccgctcaagctggtagtcgaaaagtcactttattcagtgacatcgaaattcttgtggatgaccgacccgaagtcattatcgatgcaaagaagcccagtcatacgctgaacgacaccgacgtgcttcaagtcacatcctatgccaagctggtcgatacgcaacccggattcaatttgtaagtgcaacacccgtctttgggtggcttgtcttcgagagtaccttgccgagctctcgataccaaacctcgttgggcgtttcccggtccaggaccttcatgggggtgtcgttgatctcgtccacga

SEQ ID NO: 378 - DNA, 3860 bp, Unknown
  R42_10m  MAG No. k141_38780
gagccgcccaacagcgtacgttgcacggcattgccggcttatctgccggtatcggcacagcggtgatggtgattaccgtgctgttgtatggctatatgagcgccgtaggcgtatcggctgtattggttatgcctcaaccgcagttgttttcccttgggtggagggcattgcaggtgctgaccgtgctgttggtcatgctgttcgcgtgggaactggaacgtatgtggcggtatcgcgccagcattatcggcgtgcgtcgtgtcatttgcgtgatggtgacactggctgcacttgtcacattgacgatattgtctttctgggggttgttcagtctgtgatattcacggtcgttaccggctccttcccgaatatgtgccactgagtcgccgtgagcgtcacaaattcgggaaggtggatggggcgtgacggcgtggaggcactgtcgtcagcgctgagcggcttcagcctcatccaaagtgtcgaaaccgccgagctggactgtgtgcaacaaggtttcctcagtgatattgcgttgcgggctggctgcggcgcgctcgctaatcatcacctcgtagagctggaaggtccgttcggaatacgtaccaagctcgccgcgcagataggtttcgaatgaggtggcagatggtgtgtcttcggtggtggtgagtacgcgcatcgcctcgccgagcttggggtagcgctcgcggaaatccttggcccaggcgacttgctgggcgatgacctgttcctgacgggccacgcgctcttcagagggacgcggaatatacggctctatgttcttcgtgaaatcttccggcgcggtggaggccatcatgcggccgtatttttcggtcacgaggttgcggcccacgtggtcggccgcgtcaagatcagcggcatagctggtgagtaatggccgctcccatgtgaggaactgggccagccgcatctggtggaacaccggccagttgccttggcatgccgcgcgtccaccctcattgttggtgcgctggaactgatcccattcatggcgcacaatagcctcgcgcagttcatcatcagtcagttcgttggtcatcgacgttcctttcactaatatctccctctgatgagggagatggcacggcgaagccgtgacagagggagcttgaatctacaaacttttaagcaccggatcatcggagacgatgtggtcctcgacatacgggcgctgccattcgaggaaggtctcgccggacgtggtcaggtgttcgcgtttgagttctctgacgatatccgccgcaatctgctccacgatatcgttgattttctcgattgctgtagccgcgcccttgccgccttcgccgaatccggcccctccatagcaggctgccgaactcaatcgcatcacggtttccaactgttcgcccacgttcggcaacagcgcgaacatcgagccagacagcttgcgcaatgctgcgaactgccacttgtaatacggcatatagcccaccaccatcggcacgttaaccaggaacaccaacgaggcggtggcctgcacgaactcgtggatggacagccatgcggccgcgccgtcgccgcgcttcaacgaacgcggcagattatattgaccggcttgggcgatcatgcccaatcgcttggaaatcaaggcaagccgcacgtcgtcgggcatatccttgaacccttggcgtgttttggagaactgcccagtggggtctgcgaatacttcgccattggtggctgcggccagagtcgattcagccagcatcagccactcgtgcggcgcggtttgcgcgggcgcagtgcgatacccggtgatcgactcaaagaagtcaccgatgcggaacacgccgtcacggcggttggcaccttgtgcgcggggcgtgacggggaagagcggtgcatcaatcggagtcgtcatcgcttccgccacatcagaggacgccgcgcctgacttggcagtggcggcatcgtccgtagcggtaccgggggtgggtgcgtttgtcgcatcgggtatgatggtggagcctgcacctgcggaggggaatgccccggaagcatcggacctggcatgcgcctcgaacgtcacgcggccttgcgcatccacgctgaacttgcgcggcagcgcctcgtaatcggcctcaagttgctcgccgatggccgcgtaatcctcatccgtaagccacaggcagaagcgcgggccgaaatcgtggtcctgcgaatacgcatcatcgaatccgtagcattccgagccatgacccaccagaccggaggcgatacgcccggcatactgcggatacttcgccgcaatcatcggcttgcccatctgcgtccagaacgcgcgggccagcttcagtccggacaccgggcatgcggaaacggcctcggccgcgcccgcagaaccggtcgacaccgaaacggtggatggggaagatgtcgcgtccgcaccggtcttgccctgtgccgggctgtccggcagccgtgatccggactggggcagcgcgcctgcatcgccggcaacacccgcattgtcaaccgtcaccccggccttcgccgcctcttcctcggcctgccgcagattgtcggcggtgatacgccagtagtcggtgtccttgccgtaacattcctcgatcacggccagcgcatgccggtatccagtaaccgcatccgcatgccgtctctcggcaaagcacacctgcgcgaagcccgccagtgcggaggcataatgcgcggaatgttccagatggccggtgcgatagatttccagtgccttggctgcatgccaatgcgcgccctccaacttgtgttcggtcagcagggtcaacgccagattcgtgtgcgagctggccacgtcgatatccgcgtccgggttcacgctcgaggcttcgataatgcgcagcgcttcacgcaactccagttccgccttgtcgggccgattcgtctcgctgtagagcatcgacagattgttgtgcagtgctgcgagcctacggtcggtgggtgccagcgaatgccggcagacactctgcgcctgatgatacaaatcctcggcctgatcgtattgttgggccgcgcgcatcgcggtagcgcaattgattagcgtggtggcccacgcctcggatgtgccggtggtcaagcccatacgagcggccagttccagcgcccgctgcacaatccactgattctccttgtgccggccctgcgagcgatagaagcccatcgtttcgttgagtacggtgagcagtccggcctcgtcgccggcgttttccgcgtccaccatcgcctgttccaagtacggaccggcttcggtggctgccgcgtggcgatcgaaaatcgcgtccagtccgttcaggaattgttgggtatcaaaggttgcgggcgattgatcggcatcgtccgtggcctggttcgcagtagaatcggcaccttgcgctgcggccgccgcatcggtgtcgtcggcatcgtctggaccatgcgcgaattgtgcggcgaattgtttgagcagtgcttcctcgtccataccgccagacctccctgaatcgtgtctgatttcagtctattaatactgtgaacaaacgcgtcagggagtttgctgtgagcttggtctcagtccaccttgatttcgcgcatgcgatgaatggcgtcggtatcggtttcgcagcgccacgagtagaaggccagcagccctacggcaagcagagccagcggcataccgcccagaccggtatagcgatagttcatcgagaaagtggtgagcatcgcgccgccgacaatcgagccgatggcattgccgaagttgaaggccacctgcacggctgcgccggcgatgagctcgccgccgccttggccggcttcggtcatca

SEQ ID NO: 379 - DNA, 30061 bp, Unknown
  R42_10m  MAG No. k141_41427
gctggaacttcatgacggtccacagctgtccgtccaggttcaggacggatccgttcttgctgacgttagtagtctgtgccacgttagtcacctatttcaaattcaaactagcttaggcaaagcccaaaaagtgcctcggctattatgccacaccgggtatacaggaagtgaacgctggggtttcccatgtgcccccggctagactggatgaatatgcgatccttcttcgaagccatatccgtgtcctgcgtcatccccgcgcgatcgccggcggatgacgaacgcacggtgttcgacaacctgtccttcagcatggaacgcggcgacatcatcgacctggtgggcccgtccggctccggcaaatcgagtctgctgaccgcatgcgcccgactcaacccacacgcacacggcacgttcgtcctcgacggcgtgggcagtgacgaattcagcgcacagcagtggcggcgggacgtctcctacctgccgcaaaaaccgatcctgaccggcaaggacgtggccgaggcgatccgcctgccctggacgctcgcgattcgcggcaaggggggcagggccgcacggttgctgcccgacgaacgtatccgcacgaccctggacgcgatgggatgcgaggacatcgacctggcgcgcgcgccccatgacctgtcgggcggtcaggcggcgcgcgtggcgttggcccgcacgctgctcaccgacccgaaggtgctgctggccgatgaggtggacgccggactcgacgacgacaacgcgtccaaagtggccgcgatcatggcggacgcggccgcacacggcatggcgatcatccgcatccgacaccgtccgccggacggacgcgccacccgcacgctgatgctcgatgcgggacggctcaccgatctgacgcgggacaaggaggtgcaaccatgaacggcgcctacgacatcgacacctggggtcttgttctggcgttgggcatggtggccgtggcggccatcgtcagcgaactcatgcacatgggcatcggcaggaccctgatgtggtcggcatgccgcgccctcgtgcagctgtgcgccatgggattcatcatcagctacgtgattcgttcgaacagcgtgtggatggtgttcgccctgatggcggtcatgctggtcgcggcggtgcagatcgtgatatcccgcgcgcgcggcatccccaaaggtcttgccgggccgatcttcctgagcctggtcatcacgatgctgctcatgctggcgttggtcaccgagctcatcgtgcgcccgcacccgtggtatgcgccccagctggtggtgccgctgaccggcatgctgctgggcaacaccgtttccgcgcttgctgtcgggctgagccgattctatgaaagcatggaggaacgccgcgacgaggtggatatgatgctggccttgggggcgacggcatgggagtccgcccgcccatccatcatctcgtcgattcggctgggactgctgcccaccaccgcttcgctggcctccagcggcatcgtgaccatcccgggcatgatggcgggccaggtgatagccggcggagatccgctgaacgccgccaaataccagttcgtggtcttcggtgccatcgccgcgctgaccttgctggccgacggtctgatcatggccatggtctatcgcacctgcttcactaccgacgaccaatatcagacgcctaaagcacgatagcctcagtatcgatctcaggccaagcctcaggcgatggtgaccggcgtgccttccggaatttggttgtagaaccattcggcatcggccacagtgagtcgcacgcaaccatgtgaggccggctgaccgagcttgttgccttcctcttccatatactcgccggagttcgccccggtcggcaccgagtggaagaggaacgggccgttgaatcgcacccaataatcagcacccatgccttctgcgggattgtagaagtgatcgcctctcatcccgataacatagttgccgcgcggggtcgtatcgttgagcccggtgctggcgatcatcgtgtagatggtctcaccgccggattgcacatacacttcctgcttggcgatactgactttcacgctgagatcggagtattgcgacaaatcaggctgcttgccggtgggattcgtccatcgcgcacgttgcgcttccttgtcacgctgctcctgaatcgcctggttaaagaccggtacctgctggcggctcaaggatgaggccgatgcagacactcgcgatgccgactgttgcgcggattgactcaccttctgcgcctgcccctgaacctctgcctgcccctgtgcgaccgactcaccgcggggccacacccgttgggcgtcaatcgtcgagaagacggcaagaacgcagcacaacaatgcgcataccgcaaccacaatgcgccgtacaacgtaaattcgttgacgacgaatcctcatccgtgctcgacgccgctcagtcatgtcttccttctcgttgcaaagacttttgccgtaagtattgtagccgcttttacgatacgtcgcgtaccaatatcacgcgcgctattccgctgtcactattcctattccgttgccgtccacttacgtctcagcaacatccacaggccgatgatcacggccaccacgccgagcccgatgccgaacagtcccgaggattgcgccgcgtgcgcggttccctgggattccaacagcacgtcctgcgtgaccaccagcgacagcatcgcatcgagaaggtcacgaatttgaccgacgagtcgatggggttgtgcgtcttatgcgaaatcaccataccgcgaatcgcaatcaagaagaacccgcaacttacgcagcagacggtcaatcgccttaaggaggcgttctggaagctgtatgaaaccaagccgatcgagaagatctcggtgcgtcagatcaccgaactcgcaggctacaatcacgccacgttctacctgtatttctcgtccgtgcgcgacgtgcgtgaccagatcgaagacgacctcatcgcccagcgagacctcatattgaagcagtgcatgcatgacggcacactccccagcatcgcaccgcatatgcaaatgccatcgcaatcggaagcagcgcagcagccagcggcatcaccgcaagcccagtagcgaggtcaacccacagctggcggcgcgggaaacaggtcgcgccgcccagtacacgaatccggcgagcttctaccgagtcgcgaggaagaagaaacgcgggaaggggaagatgatgctgccgtccgactgtgtggggtattcctcgcggacttgggagaacacttcggcctcgaacttcttgcggccggcgtcgtcaagcgcctgcagatacggacgcatgccggtgccgcgataccagtccataatcgcctcatgcgagggcagcgtgtgctcccgtttgaatcgcagatactgttccgaatcccgggtaaccatgctccccacgctaatcagccgttcacatatcggccgatattatctcacaattcagccaagcagggcgtcgcggcgggcgatgagcccgtcaatcgcggcctcgccttcgatgacggtgaaggtcagggacttacgttcgctggtctgcggggcgatggtgtgcaggtcgccgcgctgctcgtgccagccgcggccgtggacgctggagttcgagggttcgaggccgaccacgtagtcgcccgcacccatcgacttccattccatgaagtatgggaagaggctggcgtcgaagtcgatgacgactccaagtccgagcttgcggttgaccacggcggcgaagctgcggccgttctcgtcggcggcgagctcgtgcaggtacacgctttcggggcggttcgcctcgggtgcttggatttcgttccacggcgtggtgtcggctgcggtggtctcgtcacgcggggtggccttgcggctggggatcacgacttcggcgccttcggcgagcaacggccagccgaagttgcagtggtacatccacatcagcggctcgtcgcggaaggattcgttggtcacctcatcctcgaccgtgatcgacggctggccgtacacgctggtgatcttgcggcgcatcaccagattctcgccgaacagttcggcctcgcgcatttcgccggagacctcgagcacgtagtcgccttcggcggtccagtgggcgtcggagcccacatgctcggccggcgtggtgcggatgcggccgtgcatcgggaagctgccggccgggtacttgccgccctcaggcgtgacgtacggcgcgcagatgttctcgaagccgcaggtgaagaacaggccgcccatgatggagcgctgcgcctccagcccgttggtgtcgaactggttgcggccgttcaggcccggcttggacaggaaggtgaggttctcgccgcggtattcgaactggcagacgtcgagggcgcggtcggccatggatacgaagcgtagcgggccgttcttcacctcgatggccttgagaccgtgggcacggccctcctggtactcgatcgggcgcacgtaggcggcctgctgaaggctgcccatgtgggccaacatgtcggctcgcgtattgtgttctgtggatgtcatcgtcgtcaccgctccttgcaatcatcggcttgttgtccgtgtgcacatcatactgtaagcgttttccgcaattgtcgctatcaacaacgtatacgcatgtcgaaaagttggaccgaagaacaacgcaagcacaacgaaggctccccgaagggagccttccatcgtagcacacgttacgcgagaattcgtcgctcgcgctttacgcttccgcggcatcgtccttcagcgcacgcagcagggccttgttgcgggtttcgatgatgcgcttgccgtcctcgccctgccaagagaagaagccctgaccggtcttggcaccgaggttgccttccttgaccttttcggcgagcagcgggctcgggccggtgccgttgtccatgtcgtcgaacaggtaggtgctgatgttgtagaacacgtcgagtccgccgaggtcgatgctggcgatcgggccgaccaggttccagcggcggccgaggctgtacttcatcacgtcgtccacggtggccgcgtccgctatgccctgctggacgatgtagaacgcctcgcgcaacacggccagctgcaggcggttgcccacaaagcccagcgattccttcttgatctttgccggcttcttgccgatcttggccatgaggtcgaaggtgatgtccaccaccttcggatcggtcttttcacccggcaccacttcgaccagcggcatcaactgcgcggggttccagaagtgcgccaccacgaagcgctcggggtgccccatcaccgactgcagcgcggtggggctcaggccggaggtgttcgtggacagaatcgcgtccttgggggcggcgtgctccacttcggcccagacggacttcttgatgtcaaggttctcggccacggattcgatgacgaagtccacgtccgccacgccgctcgcatagtcggcgtaaccggtgatgcgggccagcaccgtgtccacggtgtcgccggccttgagcagtccggcttcggcgaagtcctcggcatcagaacggatcgccttcatcgccttctccagcgaggcctcgctgcggccgaccagatgcaccggatatccggccagcgcgaactgcaacgtgatcgcatggcccattgttcccgtgccgacgttcgcaatcgtcttgatatcgtccgctgtctcaatcatggagaccccttctttccggcggttcgcctggcgttggcgtacgcaggaacagcaccgtgccgttatgcgtttgctcgcattctatgccgatttcgctacgtgaacatttactgaacatttcgcggattcgactagcacaaatccctatatcagcacaaaagcccgttgtctatttagaagtgcaacatccttgttgttcggttaatgatagcagttcgtcggcgaatgcctcggccggggtgcggtagccgagcacgcgcatgggacggttgtcggtctcgtccacgatggcctgtatctcgtcggccatggacgggtcgacgcgcgtgcgcttgggcaggtagcggcggatcgcgccgttgcagttctcgttgccgccgcgccggcacgacgggtacggggcggtgaagtaggcggccatgccgagccgttcgcgcagttccgcgtggcgggcgaactcggcgccgttgtcgtgcgtgacgccgggcctggcgcggcggcgtccggccttccggtgcgcggggccggcgatgtggcaccggccggtccacggccccgtcttgagacgctccggccggtacggccggtaggattcgttctcgttggacgggaaccatgtgttgcgtttgattccgcggctgaccgtggaggcgtgtctgccgatcaggccggcgatccgccgtatgctcgtcccgttgccgatctctatccggatgatccgccgttcctcttccgacaggtgcgaatacacttgacccaaggcgcgacaccccttcactggttatctggacaatctccaatctaaagggtgtcgcactttcaaatagacaacgggccacattttcatgctttatgcaaaaaatgtgaggcatacgcacatttcccatcaaacgcacaggtgcaagaatggcagcaattcgccattttttgaaatcaccatgtgcgtttgacggcgcgtaagcctcaccttgttctcagcaggaccgaatttctgtgagctccctatagcgctcccctacgcaatatgtccgcaaacgaccacaccacatgggcgatacgcgccaattcggcgtagcggccgatggacagccactgcacacggtaccgttcgaaccacaactccagatcggcggcaagacgggcgcggcgcgaggcacccagcgcacggccggtcacatccttggtgtcacaggcgtcctcgccgccagccagtaccagcagttcctcgcccagtctattgaacaaccgctgcccatccagcatcacccacagcagttccgggttcaatcctcctcgtgccgagccatcgagcaccgcaacaaccgcactgccgcaatcgatcaacgcccggtcgcaatcccggcgtcgttcgagtcgggcatggttccgcaggagcagccggcggcgcgcatcggcgcatcccagcgtacggtcaaacacgagctctcccccgcacgaccgttccacatacgatgccacatccgtattcagcatgccggtgccggaaccgtattccagctccagcacctgcacggcaaggtcccaggggaatgacaccccatcggagtcgatgcggacgaggcaatccatgatgcgaccggactcgtcgccatacaccagaacggagatccgacggttcatctcatgcgcatcgatctcaatcggattccacgcgttctgagcgccataacacaggcccggcacgctcagacgcggatcgttgacgtggccgtaatcgccccaatcggtgaccaccatgccttccgcgccatacttgacacccgccaatgccatgtgatacgtgttcagccaggcacccgcataatcggggaagaaccggctccaagcccgcaccgcgggacacacgaactggcgacggccctgcgcggcgatggtctggatgttgctctcgtcgatctgcggctcgtacatccagttgagcatcgtgatgtcgccgggcagcagatccatcgtgcgcgggctttcgagcgcgatgtccgcccacaacatcggctgccgaccatggcgggcgagcgtttcgcacaaatccctgacgaaaccggcatacagttcatcgcggccggcttccggcgcgtcctgcgcggacctgccacgtcccaagtcgaacgtctcatcgccgccgatattgaaggacttcgaacggaacagcggcgcgtattcctcaatcaggcgcgaggcgaaatcatgggccttgggatcggcggcgttcagcgtgtgatgctccatgcgttcgatgaagctgaacgggcggtcggcgtcttcggggaactcacccagcccgcgatgctcacgggtgcgcagattcatgtacatgtgcccgaacgtggccaacgacggcaccaactcgatgccgcgacgcgcgcagtactcgtccagatacgtgatgtcggcggccgtgagcggatcggtgccacgccacgcctcgctgagctcgacgaacgcgaaggcatgctcgacatacagctggaactgattgtatttatataaggccagctggtcgacgaaccaggtgaggaactccatcgtcggcactcgtccgcgtgtcacgtcgagactgtaggcgcgcaccgcgaacgcgggcttgtcttggatatgcaggcagggaatggcacgcgaggtctgcccgatgatctgccgcagcgtctgcagaccgtaccgcagcccgctttcgccgccgccacgcacggcgatggtatctgaggcgaacacatccagcgtgtattcgtcatgcgccaatcgcgcatccacacacagcgatatgacggtgccgttcatcgccgccgacgcacccgcacgcgcatcttcggcggcattggcgctggcgtcggcttcatctgcggctgcacggacgcggcgcgtacggacggtgacgccacagtaacgctcaagttcgctggacagctgctcaatcggcagcgtttcccaagtcccatcggcaccttcggtggcggcatattcgggaattcgtttctcgatcgtcaccggggacccgattatagccgtgccatgcgtgtattccaatgtcaccggagcgggaatcagggtaagacgccgcgttgcgtcgtcggccttatgttcggaagtgggcacagctactcctttcatgtggttttcgttagcacgccaggggatattgtacgacaccggcgaataggcgcgaagagaaccgttctctattggccgattggcaccgctcctggaccatcaccccttagcaccgctccagcagacgctcggccagtccccgaaagacctgaccgacgccatccgtgcgcaaggcgccatcgacatccagcaccgcgggacggcctgcttcgccgatctcgcgcacttcgggttccagcggcagctgggccatcagcggcacgtcatagccaagcgccgcgcttaactgttcagacacgcgctgaccgccgccggcaccgaaaatctccagcttctcgcccttgtgctcgtagtagctcatgttctccaccacgccacgcaccttcatcggcacctgcagggccacgagtccagagcgcacggcgatgtcggaggcagagggctgcggggtggtgaccaccacgagttcggcgttgggcagcgcctgggccacggaaatcgccatgtcgccggtgccgggagccaagtcgagcaagaggacgtccggctcgccccaccatacgtcagacaggaactgttccaaggagcgctgcagtcgcggcccgcgccacagaatcgcccggtcggcaccggcgaacatgccgatggagatcagtttcacgccccacgcggtgaccggcatgagcataccgttcagattggtgggctgcgtgtgcacgccgaacaggcgcggcagtgagaagccatagatgtccgcgtcgatggcggccgtgtcgaagccgagggccgcaaacgtggcggccaggttcgcggtaaccgaagacttgccgacgccgcccttgcccgaggcgatggcgaagatgcgggtcttgacgcccggcttgctgaaggggttccgcttgcgttcggccttgaggtcggcaaccagatcggccagcttgtcacgactcattgaaccgacttcgatatgaggcagcagctgtacgcccggataggagctgaccgcgccgttgatctggttggtgatggtctcgctcagtgggcatccgggaaccgtcagctcaacgtgcacggtgacgtcgtaagtgccggcgtccgacgatgcgggcgcggcttcgatagcggcaatcatgccgaggtcggtgaccgaacgaccgagctcggggtcgatgaccttgctcaggcgttcgtagatgtcggcttcgatctgacgtgcgtcgctcataaatccgtatcctcctttagggcctgttctaccctagcgtgtgatgcggcggcatgccagagggagtggagtaagtcacactgcgcacgcgctgcggatgtacctctcccattcccgcatccgttttgcggacgaccacttccctcagtcgcgcaaggcgacagctcccctcagagaggggagccaagtcagtcgatgctaccggtttctaggagctgggcgaattgggcttcgcccagcatggggatgccgagttcctcggccttggtggccttggagccggcgtttgcgccgatcaccacgtaatcggtcttcttgctcaccgaaccggccgccttgccgccgcgctcgataatcgcctctttggcggagtcgcgcgaatagccttccaacgaaccggtgaccaccacggttttgccggccagcgtctgcggcagcgaactggtctcggcctcgtcgacgcccacgccggcggcctgccaagcacgcaaagtcgcgccgcgccagtcgccgggctcgcgggcggcggcgaaccagttcaccaccgattcggcgatttccgggcccaccccgtcgatggccgtcagatcttcaatcgtggcgttttcgatggctgccagcgagcccatcgccgaggcgatcaggcgtgcggtaggcggaccgagccggcgaatcgacaacgcgaccagcacacgccacaggtcggcgtgacgggccttgtccatttcgtcgaacatcttgcgcgtgttttcgccgggccgaatgatcaccggcacatccgtgacgccggtgcgcgtggtcttgtggtccacgcgcacgatgaccgcgtcggccggcacgtcatactcgggataggaggctgcggcaaagcccggcatagtaccaagtggagcctcagccccggtaggtgcgccggtcgtctcgctggcggcacctccctgtgttccggcagattcgactgcggcctccctttgcgcgcgttcggccaactgcttggccgtgagcttcttggccggcgtgggcgcggtccagaaggcgggcacctgatgccacaggccagagccaccgacacgcttacgcacctttttcttcttaccgttcgcaccgaccgtctcatgcacttcgacgattgcggcctcacgccacacacgcacgtcgcgcagatcggcggaggtcaggtcgaacaacccggattcgttggacaacaccggcttctgcgcggccggcaattccagcccttccaccggctcatacgggtcaggctcttcgccgggggcgaccagcacctcggtgatgttcggcgcgtaggtcgccaccgaatcaggccggttctcctccgggttggtcagagcgatggccgactgttcacccagatgctcgatgtcgaacgccttgcgtgaggccagcgaaatcacgcgctcggtcaactgggccgggcagctttccacattcgggcagcggatgtccttgtcaccctccttggcgggtgccagtttcgcgccgcatgaagggcagaactcgggcatgacgaattcgcgcagctggccctcacgccctttgcgccgttcaagcaccgggccgaccagttcgggaatcacatcgccggccttgcgcaccaccacggtgtcgccgatcaggatgcccttgcgtttgacttcaaatccgttgtgcagcgtggtacgagccacggtggagccggccacgtagacaggtttgagcacggcgaccggcgtcacacggccggtacgccccacctgcacggtgatgttgagcagttcggtgttgacctcttcgggcgggtatttgtaggcgatggcccagcgcggcgcgcgcgaggtggcaccgagggcgcgctgcaggcccaggtcatcgaccttgacgacaatgccgtcgagcgcgtgctcgatgtcgccgcgatgctcgccgtagtactcgatcatgtccaggatctcctggaatgaggtcaccgcacgattgtgcggggagaccggcacgccccacctggtgtatagatcgtaggcttgcgactggtcggcgaccacatcatgggtgccgcgcggatggtccgccccccaggtgagctgccccagaccatgcgcatagaagctcaggcgacgggtggcggtgatgcgagggtctttttgacgcagcgagccggcggcggcgttgcgcgggttggcgaagggcgctcgtccggcgtcctcctgctcgttgttcagggtgtggaagtcatcccagcgcatgaacacttcgcctcggatttccacgaagtccggaacgtcttccttggggccgccgaggttggcgggaatggagccgatggttcgcacattcagggtgatgtcttcgccggtaacgccgtcgccgcgcgtcaagccctgttcaagcacgccgttgcgatagatgaggttcagggcgaggccgtcgattttgacctcgcagctcatgggcaggggcttggattcgggccaatcgaggtcgcgaatcaccgaatcgtaccaatccttgagctcttcgatggagaagacgtcatcaaggctcatcatgcggctggggtggcgcacggaggcgaagtcgttggagaaggagccgccgacgcgatgggtgggcgactgtggattgtccaatgaggggaacgccgcttcgagtcgttcgaggcaacgcatgcgcgcgtcgtaggcggcgtcggagctgacgggtgagtcgtcgatgtagtaggcgatctgatcggattccacccatgcggccacgcgagcccacaggcgggcggcggcctcagcggtcatcgtgttcacgtcgaaacggtcgaggcgtatcgcgtcgtcgtcagtgggctgcagtgcggctatccattgttcggagccaggggcaaaacgtgcaataccggtatcaggccggacctcggccacatccccatcgtcgaaatcccatgccagttgttcattcgtgctcatggttgtctatcctagcgggctcggctcccctcggccggctataccgtcaactcccctcaggcggctacgcggatagcgagcgcaggaactgggcttggatgatgtcgatgttgtcgccttcatcgtcattcatgcgggccacggccaccgagagcgtgcgggccggcacgaacatgccctcatccacgcacacgcgggcggcgtcacgcacgatgtcggccacttcgatatgcggccagaccggcagatcatgcgtggcaagcacatgggcggccacctccaccgattcaggcaccggtatgcactgcgagtccgcacgggaaaccagttcctgcagttcgctctccagcgaaccaatggccccgggagcgatgtgatcgctcataatgtaggctgcggcggctgtgtcgaaccggtcaagcatccattcggcgtacgcgaaccggtagtaggcgaacgcggcatcgtcgcggtccaaggccacgcgcagagcattcaggcaggcggcgcgtgccgaatcccaatcctcattgcgggccagttggatggcgagcttcagatgtgagagcgggtaggcgggcgcgtacgccaccatacggttgaggtgcgggatggccgcctcggcacccttgatctggctcaacacgtcagccagctccatgtgtgcgtagaacagattgtccgggatgagcaccgtacgctcgtccaatgtggcgaacagtcggttgtagaccacgcgctcggcataggagttgaagtatcgaggtacgccatggcctgccgcatacacctgatccaaatgggccacagccgcttcggccgcttcgatggcccgatcggcttggcccgagaacagcatgtctcgggcgcgcagacgctccttgtcaagatcgtcggcaagcgtgaacgtgaagtccggggtgtccttgccatcgatcaacgcactggtgacctgagaggccaaaccggtcagttcgggatcgcatatcgattcgatgatctgcatggctcgctgggccttttccacggagccgagtgacgtgttcctggcgatatcgtggaattcgttgacgccatgctgcagtaagtccactcgctggatagccagtccggcactattctgtgcgcccagcacgtgagcggtcgccgggctgaattgacggtcggccagttcgggctcctcctgggatccggtgggagagaaccggctgtccgccaagtcgaagtcggcgctgatgggtttcaggccgccttcgccgtccacgtccatcacggcaccgaacatgcggtaggtttcctcgggattgtcaagcccatcggtgtccagtcgcttgaggaaggcatcacgggtgaaggtgacggtgaccatattgcgcacggtgggattgcggcgcagcacgctcatcggatcatcgtccatgccggcggccccatcagcatcgtcagtgccgacgccctcgccgccgataccgcccaggtcgtcgcctgcgccggtatcgtccggcatgccgaacgccatttcgtcgatatcgacgcccttcatcaggtcttcgaactgcgaatcgatggacgcggcgccatcggcgtcagcggattcggccgcggcctgatccgtagcatccgcagacggtccggtaccgttgcctgttcccccggccgtgccgcgttcgtcaccggacgccgcctgcccgaacgtctcctcatgggtgatggggcgggtcgggtcgccatggaaatcaccatctttggggtcggctttggaacccacacgccccaaatcgccactgcgcagatgttcgaaggcgcttagggcctcgctcatcatcgcctcgatggcggaatcctgttcggcaatcgcctcttcaagaccaatggaatcgatgtgcaacgacacctggcgcacggattcgctggtgccgaaactcagcgctgccatcatcaggccgacacgcaggttgtaggcggcgctcatcgacgcgcgttcggcgctgctcagcgcacgccacgtacggcgagtggtgtcataccggctatcgggcatcatcgaggtgccggcagtggtgaagccaatggccacttcacccgaatccaagcgcgaccggaactccacatcaaaccgatacggcaaccgtaaccggcgcaacagtgaggagagggtctgacgatacacccattcgtcgctcctcgccggcgaatacgaaggccgagcggcttgagtgttggtgtcgctcttattggtccgctctacagcgccctcaacactctcagtactttcagcgcccgcagcattcgtcacacccgaatccggcacgttctgctgggtcagcacatctcgaggatcagggaattcactgcgaatctgcccagccgtgcgtgcggcgatatcgaccagactcagcacggcccgacgctcctgctcgccatcatacgggtcaagcgccataatcgcagggttctcaatgagtttcatgtcgatttgcgcggcctcggcacgggtcaccgtatcttccgtagggttgcgccccaaggaagcgttgcgctccagccaagcgctcaccgcagcgaatcggttgaggttgccttcgatcttcaaggatttcagcgcctgcccgaatgccaaggacttatcccacgtaaagaaatagccgctcgaatacgtcgaggtgtacaggtgcaacggttcggcgccatgcaccgcttccagtcccggcgtggtgtcgagggcgccggcttcgcgcatcagatcggcgaagtgatcctccagaccggaggcccgcatgccgtgggctcgtgccgccaaagtgtcacgcaccgaacggcgaatcgcaccgattggcgcctcacggttgagacggcggaagatattgccggaaccgaatccgatgagcagaccattgatctgcggcaacatatacgtggcgaagaacgcgatggtaatggcatcgcggtattccaaatcatgacgcatcacaggcggcagattggcacgcatctgctcaagcgtgtaccggttgccggccttgagccatgaggcgagccacgtcatgcgtccggtgtcgtcacgccccaccacgccaccggtaatggccttcacgccgtcagcaccatgaccaaggccacgccccaaaccacgcccatgatgcagcgcacttcccaggccatggcctgcacgggagaaaccggaacgtgaacgcggctcgtcgctttcgcccagccgctcaccgtccggcagagtcacttccttttccttgccgaacatgaatcgcgcctgcatatcctgcacgtccatgttggggtcggtgcccacgaatacgcggccatgcgtatcggcgaacgccacctgcgcaaaatgatcgcggtcggggaaaatgccaagcgaaaagccacggcctctggtggcgggcagctgcgcccatccaagcaccagcccttccggcacgttctccaattcggggaaggtgcgtcgcttgattacaggactcagcgccactgcatggcgagtcagttcgtcgataatgccgcctttacgctcactggtctcccgcaaggcatcgccgaacggattcgtatcgtgcttcttcggcttggacagtcccagatcggccgcgagcgcgttcatcgaatccttcagcccgcccagcagtggcgtgcggttgtgcttcccatggtccgatgtacgttttggcatgattcacattgtctcttgtttgcccgacatcaagcccgaataaagcctatagaataaatgcgtgcattccatagaccacactcgcgcagaccgtccgatgccgtcgaatcatgaacggcacctgcccagccgcccggatacccggcaccggctgcgtttggtgcgcctgctgatcgccttgctggccgccgtcgccgccatcgccgccatggagtgcatcgtgttcaacctgccgttctggcgtacgctcggagcgagcacggatacgaacgccgtgcataacacgctgggttcgggtctcacgcgccggaatgatggcatgttgaccgtcaccgatccggccaaggcctatcttgaactgaccgcggacggcacgtcggattacctacgcatcgataccgagagcagcaaggtcatcgataaggcccgcgagcaggccgaggccgaatccaaagcgaacgacgataaggaagtcttcaaaccgctggcgaccattcatgtgcgcgcggatgtcgatggcatcaccggcaaggcccagtcgatgaatcccgacgctattcgcagccattatgtcaaggcgccgggtgccggcatcgtgcgtatttggattcaggaagagcgcggcgcgatcgtaccggtcaccgacgcccgcgccaacgtgcgcgtaccgttcgtcatcaattggatgcgcgtgctcgccatggccttggtgttgctgatgattgccgcctggaggccgggatcgcgcctgtggcgtatcacgcttgacccgtccagcactcggcaacgacttgctttcgtggggcttctggcgattcctaccctgcttatcggcgtatccatcatccacgaactgtggtacgcgtcttcgctcgtcttccacgtttccggcgattacacctatgatttcgaccagtatgggcatgtggccgatgcgctggtcgccggccggccctggctcgacttgccggttcccgaacaactggccgccaccgagcacccctatgacgtagccacacgtgcccagctactcgccaatggagccagtccgctctactgggattacgcgtattatgacggtcactggtattcctattttggcgtgttgcccgcagtgctgctgttcgtcccctatcgtctgctggccggtcataatctgccgacatccgccgccgagtatattctcgtgctgctgttcatcatcttcttctccttgctggtgctgcgcgtcatccatcgtgtgatgccgaagacttcggtggcggccgcgtcgttagtagtggtctcatcgttggtgagcgcgcaagtggggtatttgctgtatcgcacgaacttctatcagataccgttcgccgcatcgctgacgttgacgtcgctgggactatggctatggctcggcgcggacacgtcccgccgtccgctgagaccatcggaccgatggcaggcgggcgatgccaagcctctctccctgccacgactggccttgggcgccttgtgcattgcggcgaatttcggatgccgaccgacgttcaccttggccgcattgcttgcgttccccctgttctggccgcagattcgcgcgctgggcaccggtctgcgcacacgccgcatcaagccgttgcaggcgttgcgcgcgccgctggcggtaatcattcccgccattctcgtcgtgacgcctctgatggcgtggaacatggttcggttcgattccccgttcaatttcggcaatgcgtatcagttctccatatccgatatgacccggtataccaccccgtccgcggatatgcccgccaacatctggtattacctgttcctgccgctgcgcttcatggatcgtttcccgtggctggcgggctctcccgccccgatgccgcaatggggttattacgaggtgatggtcggcgcgattttcacggccacgccactgaccttgatggctttggcgctgcccctgctgcgcagattggaaacacacggcatgcggccatggctgatgtcttgcttggccgtggcggcggtgctggtcgtattcgacagccgcgtcggcggtttgggatggcggtattccgccgatttcggctggctgatctcgctggcgtccataccggggctactgtggctggtcaatgggcgcgaaccgagccggtcattggcgggggccaacgacgccgcttcaggcgatggcatcgcccgcgtcactccgtggcgttggctgatgcgctgggtcgtggtgctggccgtattgtgggcgctgggcatagccatactgagctgcttcgtgcagtcgcgcagcgatgcgatgatcgacaacaatccgacgctctggcatcaggttcagtcttggttcacgatgctctagtctcgtatcggcgtcggatcagatcctcataaaacgccacagcctcagccggcgctccgtcaaacacgaccgcgtgctcgtccagcaccagtatgcggtcgatggcgtattcgggccggcggatcatatccgtgtcatgcgtggcgaaaatcacctgcttgttgtagctgaacaacgccttggccacatgcgcggtgccaatctcatccaatcccttgctcggctcatccgccacaatcgcactcggctcaaagctcagcgcggccgcaatagccagcaggtgccgtttctcggagtccaattcgccggccttggccttggagacctgcaccaaatcaaaatgcgcgaacagattaccgatgcgcgcatgacgttctgactcgggcaccttgtgctttttcaacgcttcggaaacagcctcggaaatattcgccgcttggtagaaactgttcggaatctcctcgcggcgaactttgccgaccagattatcgatgcgcttcgcgtccttcttcacagccgggtcaagacgttcctcaccgcccgcaatggtcaccgtgccggcgttggccttcaacgaaccgtccagcagacccagcaatgtggatttgcctgcgccgttcagtccgatcacggccacccgccgctcgctgatggtgatgtccgtgggagcaagtcccacgtgcccatcatcatacgtatgcccggcctgttccaaagtgaacgtcagcgatgccgggtgtggcagttctttcggtctaaacaagaatcccatgccgccattgtacgtggagtacaggtgtggtgccggcaaacaccggcctatcgcagcaaagcggcgacggtattgagcacggcgcggatgccacgctcgaattcgtccggttcgggcagcagggaaacggccaggtatccattggaggtcatgtcgaagaagtagccgggctgtccggtgagttggtgctcgtcaatcagccgcaacaccagttcgttctcatcgatgacggaaggcactcgtaacagcacgttccagccgccttcggcccgtagcacgctgaccagcccgttgggatcggcgtcaagcaactcgtgcaacttggccaggttattgcgcacgcgctcccccacccgtctggtctgtgcgggcgcggcgttcaataatgcgggaatccgttcggcgatgatgtcgcccatcggcagataatcgtcggcgatgacgtccagtcgacgctgggcctcggcaacgtcctcggcaggtccggacacctgaatccacccgactttggcgtgcggcgcggccagcattttggagaatccgtctagggcgaaggtgagcacgccgcgctcccccgcgagccgtgcgtcgccggggaaaggttcgagagagtaatcgaagaacacttcatcggcgataagggcgatgccgtgctcacggcacaatgtcacgatacgtgcacgctcggttggttttacgtacgaaccggtcggattgttcgggttgatgagtaccaatgctctgacgcgttcgccaccgggctcgctgagtagccgctcgagttcggcgatgtcgatgaaccaggagccgtcgaattgtaactggtattcgaccgtatcgacgcattcaagccgtgcaatcgactcaatcagcggatagccgggtttgggtgccagcaccgcgtcgccggcatcgcaaagtaacttaatcagccacgaatacgcctcggacgtggagctcagcaggtacagggcgtccgggtcggcgccctcgatggcggtattcacattggtgaaagcggcatggcgctcgttcctgccctcgccggcggcgggcgaagccaactgagggctgcttgcgtctaccacgtttgccgtattgaggaatgcggccaatgattctcgtgccgcacgcggtccacgcgggtcggccgtatacacgctcggcaccaattcgggtgccaacccgtggcgggtcggattggaatcgttgagtttgctgagtgcgatgccgtttgccttggctgccgcctcggccgccgcaatgggattcggcgcagaaatatccacacgagaagagaaatgcacgctcataccctccacgataaaaccacccctgccgagccaggtatatcgaggcctcatatccaccagcatccagcactacgacaatcgtgcggcacggcagcggagtcgtcagacatactatgacttcaatccacatcgaataacggcctagctacattcattaggtcattttcgcgctcattaggtcactactagtcgagcctcacaattgttgatgcttgaaacgccgccattccgagcccattgcaattcaggtttggaatgggagtgacctaatgaacacataatcgacctaatgaacgaattactcattaaaaaaaggccgcccgaaatacttggacggccttacatatggtcaatacggctcctgcgccagcagaaataactcagctcactgctgcttggtgctggcgtagtaggcggcaccgacgatgccagcctggttacgcagcttggcgggcacaatcggggtcttgatatccacgtacggcaggaacttttcgctctgacggctcacgccgccgccgacggtgaacaggtccgggttgaagtacttttccataaggccgtagtacttggtcagacgcttggcccacttcttgtagcccagttcctcgttctcgcgaatcgcggaggaggcatacttctcggcgtccagatgcttggcgctcaggatgatgtgtccgagttcggtgttcgggatgagcacgccgttgtagatcaaggcggtgccgatgccggtgcccagtgtggtggcgatgaccagaccatcctggcccttggcggcaccgaactggacttcggccaggccggcggcgtcggcgtcgttcaccacgacgaccgggcggccgcaggcttcggagaacacttcagtaacgtccacgccaatccaagactggtcgaggttggccatgaagtcgagcttctggccgggcttgatcggcgcggggaaggcgatgccaacgggtgcggattcaggcacttcgaagtggtcgagctgctgcttgacgattttggccacggcctgaggcgtggagacctcgggagtgagaatcttcaatcgcggctcggcgaaatcgcccttggtcagatcgacaggtgcggccttgatgccggaaccgccaatgtcaacaccgaaagcctgtgcagtttcaatcatcgttgaccttcctttccatacgttttcatcagttcgtagggttgcgcccagtctaacgcgaattgtgctcaacacgaaaccattacacaccaattgtgcaaacgtgtgcatcgccgccggtcactacgtaccctatccgtatcgtttttcaagccccccaatgggcaatgcgcgcgatttcgatactaggaaaattcggcgtctgtggcggcctgactctgtgtcgcgcgcgatgaaccgtcagccgatcaccttctcgtataatccggccgacgataccgccgccgcgcatatcgaccagagtgcgggagacgcgcaccacgcgttcaatgacatgggcatcgccaagctgcacttccagatcggtgccggccaaggccagtgggcctggggcgacggtggcctgttcattcataagtgaccgtaaataagctccctctgatgagggagccactactacggctacttcagcgacggcatgggcttccaggtggggtcgtgcatcagcttgcgcgagtcccaccagcccttggcaatctgcaccaaaccggtcttgaggtgctcgcgatccaccatcaccaggcgaatgacttccttggccgcggtgagcacggtacccagtccaaacaccagcggacggaagtcaccataggtcatgaagtaccgggccatgtatccgcggttgcgcatgatgtgataccggttcatgtcggacgtggagttgagctggcgcacgccggcgatatcccaattgccgatttcgcgcgtacggcgcaggatcacgtcgggcaccacaatcgggttggtgaccttgctggcgcggtagccatacatcgtgtcatcccagtagatgaagaagcgcgggtccggcagaccgatttccgtgaccacacggcggttgaacaggccgccttcgaagcacagcgtgtccatcactcgatacccggccgggccaaatgcggcgggcgcgatcgggttcggaatgcccagcggcacaatgaagtcgtactgccagtagaacgggccgccatcgtaatcgaatcgggatccctgaatcacctcgtgcttgtcggtccacttggacagcttggcaatggcgtccggcagcacggccacatcgtcatccatcacccagaaccatgcggcgcccagatcatacgccttggccacgccggcggagaaaccgcccgcaccacccatgttctcggtctgcggcgcatagaccacgcgctcttcgttgccggactggtcggccacggtggtgccccactggccggtcaccttgccggcaaacgcagcgaccatgtccgccgtctgatcggactgctcattgtccacgatgacaatgcgccacggtgcctgctcaagcgccagaatcgaatcgaacagtacctcgagcagctgctgacgtttgtaggtggtgacgatcagggcaagcttgtcaatggtgttgttgggtttcttcacttcagccatggctcccattgttgcacttgaccggcacaagacgaatttctgcacagtgaaacgcgggttgcgtacgtccggcgcatggcgtatgaataagcctgtcagtttcagggaaggtgcaattccttactggcggtaacctgtaccccgggtttcataacggggatgacgggaagcccgcgacctgcgcaagcggctgatccggtgagattccggagccaacggtatagtccggatgaaagaaacgagggctcattatgagcgtatcttcgcgtatccgcatgcaagttgttcgttctgtggcgcccgaggccgagggttcggccagcgcgtccaccgccagcaccaacgccaaacttggctcacacaccactggcgtggccgattccggccgctggtccacgcgccgtatcgccatgtatgcactgttcgtggcgctggcgatggtcaccagcttcattgaattcccgattacgccggtcacttggctgaagtacgacccgtccggcatcgtctgcctgatcgccggctttgcgtacggtccggccgccgccgcaatcgtgtctgtgctcggctttgtgccgcacatgttcgccgacccgtggggttcgctgatggctgtgctggtggcgctgttcctgtctgtgccggccgcgttcatctaccgtaagatccgtacgcgcaagggtgccgccatcggcattctggtgggtgcggtgctggccatcgtggtggcgctggtgggcaacctcatcatcacgccgatttacgcgcacatgccctaccaggctgtggccgcgatgattctgccgattctgctgccgttcaacgtggctaagatggcgattcacgccgtgatcaccttcctgatctacaagccggtctccaacctgctgtccaagcagcagtgaccggcctgagacgggcctatgcccgccacgactaacgaccactcaacgaccactcaaagaacaagaacgcagaactccggcccttgccgggattctgcgttttcgcctatcagttacggattgctgtttcatgaccgttgcaccccattccttcgacgccgacgagttccacgattccgccgagcccgctccccccgccgccgtactcaaggacattcgtttcagctatgaccgcggcacttcatgggctttggatggcgtttcgctcacggtccatgccggcgagcgcctatgcttggtcggtccgaatggatcgggcaagtccacgttggcccgtctaattgcgggattgaccgcgccggacggtggcgaagtgacgctactggaacagcgcgtgtacgcagccggcccgaatgccaacgcctatcgcgctgcccgccgcggcatcggtatggtgtttcagaatcccgaggatcagctggtcaccaccgtgttggaggatgacgtggcttttggcccggagaatctcgggctggagcgcgggctcatcggcgagcgcatcgttgattcattgcaggccgtggggttggcgaacttgcgtcagtccgacccgacccgtatgagcggcggacagcagcagcgcgccgccatcgccggcatgctggccatgaacccggcgatgctggtattggacgaaccgaccgccatgctggacgaatccgcacgcgccgaagttatgcgcattttggatgatttgcaggcgcgcggcaccactattgtgcatgtcacgcatcatccggatgagaccgttcatgccgatcgcatcgtgcacatggaggccgggcgaatcgttggtgtcactgcagccgccgataatcgacccccgctagcggaggctgtctcgcaaagcgagactgagggtggtatcggcacagaagccgcccccagtcgtcctacgaacgacagaccccgccagcggaagcgcgaagacggctccgaactgccgctgctctccgacggcatcggtgatatgacgaaccccattattcgcgtctcgcatctgacctatcgctatccttcggccaaacgggcggttatcgatgacctgtcgttcaccatcgcgcgcggtgaaaccgtggcactgatgggcgtgaacggttcgggcaagtcgacgctggtgcgcatgctgtgcgcgctggccgcgccgaccgccggcagcatcgaggtggccggcgttccggtggcctcgaccggcaaacgcggtagcaacgcacggccggagccggcgaatcgcaggcaattggcgcaattgcgccggcatgtgggttacgtgatgcagcatccggagcaccagttgttcgcggacacggtggccgaggacgtggcgtacggcccgcgcaaccaggggctcgccgaggccgaggtggccgaccgtgtgcgcgaatcactggacctgttgcatatcgggcatcttgccgaccgctcccctttcgacctgtccggcggacagcagcgattggtggccatcgccggcgtgctggcctgcaatcctgacgtgctcatcatggacgagccgaccgcgagcctggacgtccaggccaaggagcgcatccatgagctgttgcgcacgctcaaatcgcgcggcgtgaccgtgcttatcatcacccatgaccgagcggaggccaagcatatcgccgatcgcgtggtacgtatgccgattgccggcgcggctggtgctgagagcatctcggcaaccgagactgccttccccgccgagtccgtctcccctgacaaacccgcgcactcggtgatccaccgacttgacccgcgcgtgaagatggtgggcttcctggccgccatgttcacgatgttcgcggtgaacacacccctccagcttgcgctgggcatcgccatcaccctggccgttatcgcggcggcacgcctgaacccgttacgggtgctcgaatccattcatccgattctgattctgctggtgctgatgggcgtggtcaatctgtttgtggtgcgcaccggcacgccggtggtggcgctgggcccgctgagcatcaccgatcagggcgtggccatagccgtgctgtacgcctgccgtttcgcgttggtgatcatcttgggcgcggtgttcctcaccaccaccacgccgaccgccatgaccgacgccttcgccaccctgatcagcccgctcaaccggctcggcatccacgcccaggagatcgcgttggtcatgagtctggcattgcgattcattccaacgctgaccgacgagacccgtgccatcgtcgacgcccaatccgcgcgtggcggttccatcgaaaccggttcgctggcccagcgcatcaaggcgatgagcgcgattatcgtgccgattttcgccggcacgttgcgtcacgcggacaacctgagcctcgcacttgacgcccgctgctacgaggagagcatccgccgcacccactggcgtgccctgaccatcgccgcgcaagatctcgtgttcgccgtcgccgtcatcgcctacatcgccgccatcatcgcgctgtagggcggcaaacagcacagacagcaccggttgctatgctggtgtggttatacgaaagatgtaaggaaattcccatggcattgaccaagaagcaaatcaagcagctgcgcgcgatggcaaactcgctgaagcccctgttctatgtgggcaagaacgatttgaccgagtcggccgtcaatcaggccgatgaaaccattgagaagcacgagctcatcaagtgcgccgtgcaggacggttctggcctgaccgccaaggaagccgccgccgagcttgccgagcagctgaacgccgaagtggtgcagtccatcggcaatcgtttcgtgctgttccgtcgctcccggcgcgacgatgtggagcatatccgcttggtgcgcgagtagcgttcgctctgctcgatcccgtagcttgatatgagtaatggcggttggaatcagtccgattccaaccgccattattcatattcgcccagcgagcaccgtcactgatccaagatggacccgacgattcccgcaacaatggtcagaaccaaggaccccagtaccgaccaccagaaaccgtgtacgaagacgcccacgccgaacagactgaccgccagccagctggcgagtcgcatgaacagccaattgataatcaaggtgaccagcccgagagacagaatcgcaaacggcagtgcgatcagatgcacaatcggcttgattgacgcattaatcagcgccatgaataaagcgaacgcggcgatgccgagaatcggaggctcccccaccggggtcatgccgggagtcaccgcgaccatgacggcggcggcgatagtcataatcaaccagctggtcaggaaacttttcatggcccaatcgtagcgcggcaggttttactattaggcaaaacgtgagatgatgttgtgcagaaacggtaagaaggtactgccgttcccgattgagaagggatagacccacatgactgataatcaacaacaaccgtacggttcggacagtgttccgcagccggcacaacctgcacagccggcacagccgtcgtacggccaagatgccgcacggcagccgcagggctatggcgccccacagcccaccgcatacgctcaacccgccgccggaagctacggccagcagcagccgcaatacggccagcccgccggcgcatacgctcagtctcagtacgctcagccgcagtatggccagccgcagtatggccagcccgcacagcccgcagcgggctacggccagcagcccggctatggacaggcctaccagcagccgaatgcctacgcacagccgcaatacaccgccgctccgtatgccgccgccccggtgtggcaatcatccaagtccaagttggctgccggcctgttgggcatcttcctcggcggacttggtgtgcacaacttctatctcggcaacactggcaaggccgtggcccagctgctgctgacgcttgtcggctggattctgctcggacttggcccaatcgcagccgccatctggggctttgttgaaggcatcatcattctgtgcagcaagcccggctcgccgtggcataaagacgccaacggctacgaactatcagactgagactgacctcgggccacgttcattgggcctctgatcaaccacgcctctgcaggtatcatctcgatgccgcagtcgtagcgggatgcgacacgccggccgtgtacatgagttcatgtacacccgatacaggcgaatcagtatcgcacgagattcaacagttcctgctgtttggcatagcgggaaacgttggtcagggcgatgcggatgatgtgttcggaagtcttttccaaatgattgccgccggccacatgcggggtgatcaggcaatgcggctcatcccacaacggactttccgccggcaacggctcaggctcagtgacgtccaatccggcaccgtggagccgtccattgtgcaaggcgtcggccaaggcctcgggatcgatggcgtcgccacgcccggcattgatcacgatggctgtggatttcagacgacccagacgatccgcattcagcagatgatgggtctgcggcgagcgcggcaccgccatcgccaccacgtccgccaatggcagcagtgcttccagccgctcgaagccatacatcttttcaatgcccttggccggcacgtccgcatgacggcgcacgccgaaggtacgcatacctacggattgggcaagctgagcgaaatgcgacccgatgtcgccgacgccgataatcagcgcgatgccaccttccgggctcaataccgggccttcatcctgccactgatgatcacgctgattggaggcataccggttgaggttcttcatcaatgcccacatggtggcgaacatgtgttccgacacgctttggccatacgcgccgctcgcattggtgaccatggtgccgcgaggcagcacacccgggcagatgtacgcatccacaccggcgctgaaggtctgcaaccattcaagacgggtgtattgagcggcctgcgagaccgggaagttgccgatgactgcggtagcttgggagcgaagctcctcgggaacagcggccgaccagaccatgtcgccgcggtgcgcttcgtcgcccacgaattcctgcggcacatcgcgggccgccttggcgaaagcgcgccgttctccttcgttgagtggcaggcagttgacaatcagcttatgcgtgttctcaatacccatggttcaccaaactaggcggcagggcggatattatcgcgtgtttcctcatgctgaaccaatgccgaacccgccccgcc

SEQ ID NO: 380 - DNA, 7298 bp, Unknown
  R42_10m  MAG No. k141_41697
ccgaactacggcctgtggtacgtgcacctgcccaaagcatgggacggcatgcgttatggctaccgcgtggacggcgcatgggacccgaaacacggcgtgcgcttcaatccatacaaattcctgcttgacccgtatggcaagggcatcgacggctccatggagctcacccccgccgccttctcctatgaatgcgatgtcgtggaccacaaggtaaccggctcggcatacggtgccatgagcaccgtagactcgctcggccatgtgccggtatccgtggccatcgacgatcgcgatatccataagcatgagggcgacccgcagcacccgcatgtgccgtggcgcaaaaccgtcatctacgagatgcatgtcaaaggcttcaccgccaacgcgccgtggctgcccaaagcgttgcgtggcacctacgccggactcgcccaccccacaacgctcgcctatctgcagggattgggcatcacctccatcgaactgctgccgattatggccaagcaggacgagctcttcctgcaagaacacggccacaagaactactggggctactccaccctcagctacttcgcccccgaaccctcctatgccaccaaagcagcccaagagaagggcgcggccgccgtgcgccaagaagtcatagacatggtgcgcgcgctgcacgaggccggcttcgaagtcatcatggacgtggtctacaaccacacatgcgaaggcggcgtcgaaggcccgacggtctgctggcgcggcctcgacgacctggcctactatcgccatcaaaaatccaataccggtcgactcgaagacaccaccggttgcggcaatacgctggacttcaccaacacgcatgtggtcacctttgccatcgactcattacgatactgggccaagcgtatcggcatagacggtttccgtttcgaccttggcgtcacgctggcccgcctggaaggcgaattcacccatcatcacccgttcctctacgccctgcgttccgatctgctgctgggcaacctgaagctcattatggagccgtgggatctgggcaacctcggctggcgcaccggccaattctccgtgccgttcgccgaatggaatgaccgcttccgcgacacggcccgcaccttctggcttgaggatgtggatggcggctccgatttcggtcgtatcagtttgcaggagatggccacgcgactctgcggctcggccgatctgttcgccaccgaacccgggcgcggcgctccggcctccatcaatttcgtgtcctgccacgacggtttcacgctgacggacctcaccagataccgctccaagcacaatgaagccaacggcgagaacaataatgatggctcgtcggtgaaccattccgccaatttcggcgtcgaaggcgtcaccgatgatccagacgtcatcacggcacgcgaacaggcggccatgaacatgatcggcatgctgctgctctcgctgggtacgccgatgatgctcgccggcgacgaattccgcaacacacaggacggcaacaacaacgcctactgccaagacaacgacatcacgtggctgaagtgggattggatgtattccaccaacaagacacgcgaaatgcgtcgcctgaaaaccgtgtctcgactggtggcgctacgtaaatcactggacctgtatcaccacgaggacttcttcacccgactgacccaactcggcctactcaagccctcaagccgcgtgcagtggttcctgcccgacggcaccacgccgatggagcgtgactggttcgatctgggcgtacgtagcttcaccatgcgattgctgtccaacagtgaggtggacgtgtgcattgtggtcaacggcaccgcagacgaccgcacattccgcctgccgccagacactcactggacgcctaaatggtgctcggccgaaatcaacggccgccgagccgggcatggcattcaggtcgaggaatgcgatttgaacgatgacaccaccgtttggacgcagcatgtaccggacgccagcgagacggtacgcacgctggtcgaagaagtggccatgcagcgcacggaatcctcgactgaggatgaagcggataccatcgaattcgcgatgccagcaacggatcacgccgcaaacggcacctcgtccgcgcctcgggatgaggtatcagctgatatgcctgatgcccctgtggatgatacgccggacactcccgtcgacgacaatgtctggaccatgccggcgctgagcatcacgctgatgaaacaggtgtgagtcacactcaaaacagcacgacacaaacacaaaggctctccgcggaattccacggagagcctttgcatgctcggtacaggacaagcgaaattaacgcttggagaactgcggggcgcgacgtgccttgtgcagaccagccttcttgcgctccacgacgcgagcgtcgcgggtcaggaagccagccttcttcagggcggcgcggttggcatcacgatcgatggcgttcagagcgcgggcaacgccgaggcggatagcgccggcctggccggtggtgccgccgccgtcaacgaggacgatagcgtcgaacttgccttcgagcttgagcagaacaatcggagagttgacctcacgctgcagcagcttggaggggaagtactcctccagggtgcggccgttgatggtccacttgccgtcacccggaaccagacggacacgggcgacagcctccttgcggcgaccggtgccgtagcccggctcgatcgcggaggtgccggtgccagcgccagcgttggtctcggtggtgtagttggtgagctcctcttcggtctcgacaacctgggagtcgttggtgttttcagccatgattcttatctcctctcaggtttcacttggcctgctgcgagacctgggcgatctcgaagacctggggcttctgcggggtgtgcgggtgctcggcgccgcggaagacacgcagacggtcgagctgcaccttggccagacggttcttcggcagcatgcccttgacagcgttcttgatgatgcgctcggggttcttctcgagcagctcggcgtaggagtcacgacgcagaccaccgggacgaccggagtgcgagtagagttccttgcccatcttgttgccagtcagagcaatcttgtcggcattgatgatgatcacgtggttgccggaatcggcgtgcggagcgtaggtcggcttgttcttgccgcgcagcaggattgcagcctgggtggcgagacggccgagcaccacgtcggtggcgtcgatgacataccagtcatgagtcagatcagctggcttcggagtgaaagttttcactggattaccttttctatattgtgttccgggtctcagctgcttggcgtggcttggtcagggccgcatccaagaggcatcgaacctcattatccgtgggctccctgaaagtcctcgatggcgagtgggatagcgctttgaaggaccccttagggaaacacaacaatccactagtatatcgccgggcttgacatagggcaactggggacactccattgggtttatggcttctcttcccctatttatggtttctcttccacccacttcggctaaccgactcgcctacggtgaggcaattccctgccttctctcagctatcgcttcgttcaggcctcgtctacggacagcccactggactgtccgcttaacgactcggctcgtcagagggaggtaaagtgggtcaggaattgaagatttgggcgaagcgttggacgccgggggtgtcgaagagggtttcgagcggtaccatgttgcccttggcgtcggccagcgggatgcgccagttcgggtattcgttgttggtgcccggctggttctgcgcgcgcttctcccccaccgcgtcggtgatcgaggcggcgagcagcttgcacggcgaacccttcagtgcgcggtacagcgcgtcgatgatatccgcctcgtgatcctcacgatgttcggcgaagtcggcatcaagatagccctgctcgaccagcatggccagcatcgcatcctgctcggcctttgcggaggcttcgaattcctcagccgggccggtcagcaagcccagacgctcacgaatcttgacgtgctcgtattccaggtaaccggcggtcggcggcaaatcgtgcgtattcacggaggccaatgcgtacggacgccactgggagggggcgcggaacacgccgtcgcactgttcgaaccattcaacggcgcaaccgagaataccgtggctcgacagggaatcggccacatggtccggcaccacgccgaggtcctcacctacgaccacgccgccggcgcgagaggcctcgatggccagaacgcccagcatgatgtctgagtcgtagtacacataagcgccatccatagccgaccggttctcgggaatccaccacaggcggaacaggccgagaatgtggtcgatgcgcaccgcaccggcacgggcgaacatgccatgcaccatattgcggtaggtctcgtagccggtggcctccagattgatcgggctcagcggcggctggctccagttctggccttgctggttgaacatgtccggcggtgcaccgaccgtggctcccttggcgaagcgctcgggattccaccacacgtcagcgccggaggggtgcacgccgacggccatatcggacatgatgccgatatgcatgccggcgtccttggctgcctgctgggcggaggacagctgctcggcggcaatccattccagccagcggtagaagtccaaagtgtccgggtactgcttgcgcagattggcgatttccggggagttgcggttgaacttgcgctcccagttgctctcctcgccgttgggtgctccccacttgtcgtagcacaggcaccacgtggcatacgcctccaagtcggaaccgcagtccgccttgaattggtcgaacgcgctttggcgttcggcggtacggccggccttgaagataatccacagggcgtgcatcttgctgcgccacatggcgtcacggtcgatgagctgggaatcaccgttcagcggttcggtgtcggcatgcagtccgtcgacggcgttcttgtcgcccgcgctgagcgtggcatattcggcgatcgcctcggggcggatgtacgtgaagttgatcaggcgacggcttaccggcagatacggcgacggggtgagcggggacaccggctcggcggcatgtaccggattgatgagcacgaagtcggcaccggtcttctgcttggcgtccaccagcatggtcttcagatcctcgtaatcgcccacgccccaggagttggaggagcgaatcgagtacagctgggccatccagccccacagactgccgcccttcatcgggtcaagcagatcgacgcgatcaggtgcactgatcaaagtggcgtcttgcacacggtcggcgaccttgacgtgcagcgtatggtagccaatcggcagatcggcgggaatgaccacagccgcattcgaaatgaacgtgccatccaagtcgtaggcctgggatccatctccaggaccaacttcaacggtgccctgatatggctcgccgttctccagcgtgatgctcgccgaaggcacgtccagaatgccggtgttcaccagcacccggtcctcgctaccggcgatatgcagcacggtgggtgccaccaatcgggagtaacgctcgttcagaatgcgtcggatggcgatgagttgggcgttctcgctggaggcgtcgatgcccagcgctgccagcacctcgatcaggacgtcatcgtctatctcgtggtagtcatggctcatgcccacataactcgtgccgacaccgaccaacttggccagtcgaatcaacggacgggccagacgctcttcactctcggtaatctcactcatagccccagtctaacgccgtttgattgcgccacaccgtaagcaaaatgccgtgattccgccaaattatgtactttttaccctcacatagtgagatgtgagcgctcacaatagtggatagagggtgattgccggccaaatttgcacggcaaaacacagcaatagtgtgcttagcggcggctttccacggcgtgccgcacctcggccgaggggtcgttggccaatttggcaagcatcgcttcggacgtattggggttcagcgccacggcacggcggaccatcgaggaaagcactgccggtgctccctcttcggattcggtgccaagtacgcccaagaaatccaatgtctccgcatccgcagtggggtcctgcgcaccctcaagccgcatcttccagctggtgcgcttgtttttcaacgccgtatcccggaccgcaggtaccggatccttggtcaggcggccgaccagccaattcttgtcatccccgttggcggccacggcttggcgcacggacggttcggggtcttcggagagtttgaccaatacgttcgggaacggcatggtgtcggcgaggaacacgcgatcggccaccggggtgtgcgggttgccggccacagcctccaaaagtgcggtggcgcgggagaacgccgcctgatcggcacggtcaggcaacggccgacgggcgaattcggacagttcggccgggtcggtggaatgacgcagacgttcgtatgtagcggtcagcggttcgaaatccaccggagcggcggactcggctgcggcctgcgcgccttggtcccgctgctgggcgcccgtgtcgattgcagcctcagttgcggcctcggtgggctgggtccgctggctggtggtgttctcgtcggtcatgatgcccagcttagtcatacaggcgtcacgcgagcggaaccggaatgttgaccacgtcaatcggatccggcaccaccgcggcattgaacgcttcccgcacacgctcctcgaatcgcacgcaatcatcttgcggcaccaccgcggtcagttcgacgttcaccgcatacgattcatcctcctggttgccaccgagctgcgccaggatctgctggaatcgggccaactgcgggtattcgagacggacccggtatcgcttggcggtcatgatgcgggcggcgcgggcggctttcatcgccaatgatgcagcggatgagtacgcgcggaccagaccaccggagcccagcagaataccaccgaaatatctggtgacggcaaccacgcaatcggtggtgccggactgcttgagtacgtcgagaatcggcttgccggcggtaccggacggctcgccgtcatcgctcatgcgttcggacagtcgcccatccgcgcctccgcacacggcggcatacgccacgtgtcgggctttcggatgctgctc

SEQ ID NO: 381 - DNA, 37319 bp, Unknown
  R42_10m  MAG No. k141_42230
cgcacggcaagcaggacgccgggcatgaagctggtgcggtcgaagctgtcggcccgaatggtcagctgctcgccggcgttgccgaagagcacttcctcgtgggcgttgaggccgcgcagacgcacggcgtgcacgtggatgccgtcgaccacctggccgcgtgagccgccatcggtttcggtggcgtccggcacgggggcgagtcctgcggccttgcgcgcttcggcgatgccgtgggcggtgtgaatggcggtgccggagggggcgtccaccttggtggggtggtgcagttcgatgacttcgacggattcgaagtatttcgcggccttggttgcaaagtagtcggccagtacggcggagatcgcgaaattaggtgcgatgaagaccttctgggtttcgggcttcgggccgttggcgatggcggatttgacctgggcgagtttctcgtcggtccaaccggtggtgccgaccaccacgtccacgccttggccgatcagggtcagcacgttgttcaggctgacggacggcacggtgaattcgacgaccacatcggtgttgtcggtggtgacctgggtcaggtcgtcgccggcatccaatgcgagcgccagctgcgtatcctcggcgttgttcaccgcttcgaccacgtgcgagcccatgcggccctttgctccgaccaccgaaaccttgatcatgtcttcttccctgtctacccgtacctgcccggcaatgtacccggaacgttttccaatcggcaatcagcctatcaccgccaagccctcacgccaatatcccgtccacagaatcgagctccctctgacaagccgaaccgtgaagtcgagctccctctgatgagccgaaccgtgaagaaaacgccggaggcgtttttaggtgagggcgaacgacagtgagcaataattcagttggctgaaagccatcatctaattgcgttcgagctggccgcgaagcggactgagggagagacccccggcgaagccgccaaccatccatcaggcgtagcccgattccgtttcacccacgccgcttggccaaggcccatccggccaacgccaatggcacggacgccagcgtgaagatgaatggcagcatcatgcccacatgagggttggaggcgtcaagcacaatgccggccacggacgagccgatcgatgtgccgaccgtgcctgcggtggttacccagctcagtccttcggtcagggattccgccggcaccagatccttgacgatgaggttgccggtggcgaacgtcggcgagacggtcaggccggcgaggatttcgaagacgcccagcaggatgagattgtccattgacagccggaagaacacgtagccgacggtcagcagcgacaggaacatcaccatatgcgcccaatgggagcctttgagtcggcaagagccgaacaccagcgcgccgatgcacgagccgaccgcgaacatcgccaattgcagaccgaggaagggctcaagtcccatggatttcatggtggcggtgatggacacgtcgaaggacgtgaagctcatattgaacacgatgaacacggcgagcaacggcagtacgccggcatagagcaatacgctcttgggcttggcaccgctacgtttgagctggcgcagggtcagctggtcggcatcttcgcttgcagcgtggctgccgtcatcatgcgcggccacggtgacctgttccacgataaccggcggctgggtggatttcagcgagaagaatatggtgccgccgataccgcatgccacggtgggcacgaacagttgggataccgggtgcacggaggtggccagccaagccgccagaatcggccccagaataaagacgatctcgtcaatggcggcttccatggcgtaggccgtgttgagcagctgttcaccatcttccacaccgcgcaacgcataggaccagcgtgttcggaccaatgcgccgaatgagaactgcgtcagacccatgatgatggccaggacgaacagcagcggaatcggcacgcgcaccaacgccgcgaaggcgaaggcgagcatggccacgatctgcacggcgagcgcaagccggcccacgcgggcttggccgaaacggtcgaaggcgcgggcgtagaacggggtgacgcagctcatggccagcacataggcggcgctcatggtgccggcgatggtccaattgtcgtagagatggttgagcgccagaacgatgccgagactcatcatggagatcggcaatcgtgccaccgcgccggacaggcagaacgccttggctccgggcagcatgaacaggcgctggtagggcgagtgggcagcggacgacttcgaaaccgcgcgagtcgtggacacaataactccttactggtgcgttgtccggcacgtgcgcccgcccacacgtgccatccgagggtagcggttcccgagcaacgtcacgcggtgcgtttcaaccgcggaccggtacgtggccagtcgtcttcatcgtcggagatgccttgcgatgcataaggtctctccaccggtgaaggccgtccgatgctgtacaggtcatgagcctttgggctcagtcgttgtcagattgttcgggaatgccggagctcaactcggtaaggatttcctgtttggttttcgcgcgggcgtgaagctcgcgcaagccctcgtcgggctcactgacatagtagagagtggcgtcgatactgtccaattccacaccttcgaccgctgccagcagcagtcggtacatgtcgagctgggcgagtttgcgggtgatgtcgtctggcttggtgggccgacgaccggttttccagtcgaccacggtaaagcgtgcggtggtgctggacgggtcaagtccaccgatgaataccgcatcgagtttgccattgaccaggcccacgcccggcacgtccacgacgatggcacgctccgtccacgccgggatgcgcttggcccacgatgattcggccagtctgcgctgccacgccaccagcttggactcggtggcattgtcgctacttatggaagtggcggaggcggcggatgcggattgttgagccgtggactgtgggacagcgggctgccgtgtggatggcttgcggcattgccgctcccgttcggccaaatcggccaacatggcttcccgggaaacgaatcccgcatcctgacctgtatgcggcatgcttggttcggcttcatatgccagtaccgcttcatccggcttaccggcattgatgaattgctcggcccacgcatggaactgcgtgccggcctcggccgccggagacgatatgcgcggaatcgggcggataatgctacgccagtagaggcgctcctcccgttcgttcatgccacctacgcgggcttgcaggcttgtcacgttctggcgtccggcggccagaatgcgttgcgccttggctttgactgcctcatcaagcgactggccgctggcggcatcggccatcaaatcggcgtcgtccaccagcaattgtgcccgttgcaggagtgggccggcgtcttggtgctgctcaagtgacgaggaatctgcggcgatgacatcgatgccgcgtgacagctgttcatgcaccgcgtcgctgagggtagccggccacggcaattcggcggcggcattcgtctgcgtaatcggcgtttgccacgcctcccccaccacggcgtcaccgtatgccgcggcatgctctccgataaagaacccttcgggagtggcaatcgcttcgccttgcgccgagatcagcatgggcttcccggcattggcggcttgcagccgttccacacagtcctgagccgatatcgcatgctcatgggtttggagcgcgtcatgcacttcaagccagaaattggatggctgagcggcgtgagagcctttgggcaccactgatgggtcccgcccggattcgcccgtataggcgcaataggtcatcagggcatcttcccgtgcacgggtaagcgccacatacatcaatcgacgttcgtcggcatgcagccggcgcccatattcctccgcctgcgtcaaataccagccggatgcatccacttcttccacgccatcgccgaattcgcgcatggagccgaacacttcatcatcgataagctccacatcatccaaagccgccaacgatgcgatggggtcggcttccacatcggcatcatgggggaatcgcggcaaaatgccggcatcggcgcgcataggcacgggcacggcggtggggttggtgagccaggagtcggcggtctcgtgatattcgggtgcggtccagtgaccttgctcggtgcctcccgtatggtgttcgtccagcacgatcttgagatggtcgccctgattgctggggaatccgccggcggtaagccccactaccgcaacggcatcccattccaaccctttggactggtgtacggtcatcagttccacatccaccggagcgtcggggagactggcggcttcatcctccaccgaagccagatgatccacccatgtgatgaacccatgcaacgagggagtttgctcagcggcaatctcttgcgtgtacgtatccaccaaatccacaatcgcatccataggcatatgcgccaaagcgggattggcgcggtgctgcggattatgcagcacaccggccaatacggtgtcgatgtcaagatccaacgcttctatgccggcgcgaatcacgtcgcccagtggccgcccgacggcatcatgcacctgacggagcatcaccgcggcccgggttatggcgttgcgcccgtgtgcgctcaaccgttcaagcagttttaccaggtcgccgcgtagcaatacgtctggcaggaataccgcattggccacctgatcgcggtactcacgcaccacagccgcccattcattcgctggtgtatccggttgggcaaggccggcctgcaccaatgcttggaagcgttgttccatgttctgttcttcagcaaaacgggacaacatggtcaaatccgctgcggacatggtgaatcgtggcgtggccagcaagcgcatcagcgatcccgtatcggtgtggtcggcggccacgtgcagcaacgccatcagatcgcggatttccggacgttccagcagcgcggaatagccgaccacgaatgtggtcaatccggcctgttccaatgccgactgatattcgggcatatgtgatttggaccgaaacagcacggcgaccggcgctttctgttcgcccggcatctgttcctgttgttcggctgcggaacggtgccgtgcgatggccgtcttgcagaaacgcactacggcgtcgatctcctgcccggccgtggcgaagcccagtactcccaatgttccttcgggggcatcaggcatggggtcgagcgatgagacatcgacctcacgcatcaatgagctggagggacgcgacggattggagcgcaacggcagcgtgagattattggcggcttcgagcactatacggctgttgcgcctggtgacggacaacgggaatggcttgtatccggcaggcaggtggaaatcttgctggaacatacggaatgcaccagggctggcaccacgccatgcgtaaatcgactggaacggatcacccaccgcgttgacggcggacctccgtgacgcatccacatggaacagtgctgccagcagagcggcctgcgtggtggaggtgtcctgatattcgtcgagcagcacatggctgtacctgcggcgcgtgcgctctccgatggaggggaagcgctcgataagctgatacgcggcaatggtgaagtcggagaattcggccatattgcgttcccgcttggcttgggcataggcctccaccagctggagcagaatatcgcgtttgcgtgtggtctccagcagcgcaccgcaatgataggcgcagcgggcgtgcaaatgttcggcacggtcatcgagcttggcttgccagctggcgtcggtatctttcttcagtcgtttgatcttggggattttcggctcgtcctcgggcatgggttcgtctgcgacggcttgctgcaatcgattgatgaatgccgaatcccattgccgtacttgattgatcgcatcatcgaagctggtgcagccggcaccgatcatggcactgccaatggcatccgacaacgccagaacacggttcgccaaactggagaaggcgccaaaatcctcactgaacgccagatccatgtgactgtcgatgacttcggtggccagttgaagcgctccggctgcgctcaatggttgcgtgttctgatcgaatccgacaagcagtccatattggcgcacgatggtctggaagaaggcgtcatacgtgaaaatggccggcttgaggaatgcccgatcagacaccgtggcggtcgtagagcccgccatatcaccggccactgcggcggagacgcgttccagcagttcgcctgcggccttgcgtgtgaaggtcaggccaaggatgcgttcaggcgccacacctcgattgataagcgcgatgatgcgttgggtcatcgtaaaggttttgccggaaccggcaccggcaaccaccagtacgtcagcatcgactggcgcatcgatgatggcggcctgttccgcactgggagtgaacgtgctcatgcttgcctcgtttcgaaaatcgtgtcgatctggcccgcacaggcagggcagacgttcttcatacggcagaatccgatatgggtgtcttgcggatgggcctcgatggtggccgacctgctggccgccgcggcatagaatacgcgggcgatcatggtcagcgaccataacgtctgcgtaccggcgagcgcggcgaattgcgcccacgcttcggcactcacaccttcgggaggagtagccggatctatggcgggtatgtcgaagaaacggttggggtctttataccagtatcgtggcgtgaacggttcggcattcaacgaaccatcagtgaacagcggcggctggaaggcaccttccggggcgtagcttctggctggtgccgcattctgcccgacatggaacagcgcgctttggctgatatgcggcattgcggcaagtgccttggcaccgcgcggcccgtcttcggggaacacgaggccaagctgatagcacacgagctgcagatcattgaaaatctgtttgaccgtgggcgttctgcctgttttgtagtcaatgaggcgaatgcattcgccgccgtctgcgagtacgcgggtttccatacggtcgatgcgcccggacagtctcacggtcagatgctcgtccatgccttccggccaccctccgaccagtgctcccatcagacggaccagcatgttccgatcgatcgggtgcatgccgggcacggcattgtatgcgtcgagtatgtcacgcacatcgaatcgtgcggcaaactcccgttcgcattcggcaccggccaatgcgccaatgctgaagttgctggagttcttgccaagatacgtttccggatcggcgtcgctgcgcacaaagtaatcggcgatgttgcgcagggcatctgccgcggactcgtccttacgggtggcctcatagcggttccgggtgtcggctatggcattcggatcggggcgtttgctctgatagatggcattaagccgtgccgtgacagcctcgatgcggcgttccgtgccggccgtggagtccaagcccagtatggccaacgtctgggcattgtgggaaagatggtccagcccttcctcgctgccttgctgtgcaaccgcatggatgagggttccgaagctggtggccacggagctggggcgaggaccggcgaaccggttctccagcatccagcacaccggacatgcccataggctgtcgaccgccgatggagacagggtgaccatgggtgcggcctgcgcatccgtcttgcctttccccgtttggataccgccagatgacgcaccgccagatgacgcgctatccgattgggccggcgattccacgaacgcccagctctgcggatttgcggcgcgcacaccatgctccgacaggagtgtcaacgcaaccgcggcgtcctttgcggcagcctgctgcggttgagcagtggccagaaccgcgcgggcggcgctgaccaacccacgtgggtcggcgtccaatccggccagatcatattcggcggatcctgtatgcgcccccactgtggtgaaaggcgcctgttgccggttgcgcggatagtattccggcagatacccgaaaagaaagtccgaggggctcatgctgtcgttccataccgcgctgatcatgattcgccgtgcacgggtcagcgcgaccaggaaacccttcttctcgcccgacagcacagccgcgaactgcggatcatgcccggttttgtcactttcttcaagcgctcccctcagcacgagctcggcaaggtcttcaccaccgaacatggtgttgcgcccggcgaggttcggccacacgtcttgctggaccaccggtatccacgcatatccccagtggcgtccggccgcgcctgccggcgtggtcaatgtcacagcgtcttccaccggccctatgtgggccaaggaatcggcctgcacttccatgccccgaacctgtgccatgaatgacgtgatgtctcggctggcggtggaatcatcggcgaactggaacaggcgcattgccgcgtccagccggtcattggccgtgcgcccctctgccgtgttgaataatgccgcacgctgccagaccggtgccagaccggtggcgttccaggcaacagacagtgcataacgcggctgtacgcgctggcttgccggcagccgctccaagccggaagcaacgctgcccaccagatgccacaggttcgcaaaagcgcgggcctgagggtcgttgccaagcaccgcatggatggatgcgagcgcagcctgcgccggcgcggcggcatcatcaacggcaagcatcacgtacagcgcgtcaacgccaaaggccaagtcatcgtcggacggttcaccgagtatttcgacagacactggcgacggaaccactgatgaggatgtttcacgacctgtttcacgccgtgtttcatggtatgtttcacgcaatgtttcccatgccgtcgtcagagaggtcagcatggcatcatccgtggcgagatgcgccagcgactccaacgaccccatggccgattcgatcggcgcaagccttgcgggacgcccttgaccgggtctgcccccggcactcaccaacgggccgttcatcaacgtgaccactctagtccttatatatgccgcgcaggaagccaacgtcatctggcattccgccattccctcggcacgcaatcgggcaagctccacaagcgcgaacaatccctgcacgaaagtctcgtccttcaaaggacgggtgaccgacgaataccgcaccggcacgccatctcggcgcagtcgttcgccgaacagccgcacggcggcattgtcgtgggtgatgaccgccatgtcgttccaccgaatatgccggtcgagatgcgcccgcttgatgcgccagaccacatcatccagctcctcacgtgaggatcggtacaggccggcggtcaccgtgccgtccgactgataattcgctgcatcgactccgcccagcatggcggtcagcttgccgggacgctcggccggaggcagcggctcgtcttccggcgagggaatcgacagcgaaatacgagacgcgatcacatcagccatcgtcatgtgcgactgatcagcgccggtactgccgccaaccagctgttcttccttggctttcagccacccttccacggcacggcgcatcagatattccggatacgatccacggaaggtctgcaccgattcatccgggttgccgaccagcaccaacttgacgccggcattccccaactcctccaagaagcgcatgccggccagcgtggtgtcttgaacatcatccacaaccagcagccggggcaagcccaacgcctccatacgcataggccggtcggaatcatccgcgtgatcggcggcgaatgcctcatgcaccacacgagctcctgccaccagcaaatacgaggcatccaaacggtattgccccggatatgccgcgctttgggctgcaatatattcacggcgcaatgcgaaagccaaacgccattgcaccgacaatcgcgcgtcctccgtcacggcgtccaagagacgtggctcttcgtgaacgcctacaccgagctcgtccaatcgggccagcatatcgcgcaactggccgataaacgcatctgaaataccgcgagtgaacctatccgcgctggtcgagccgcctgccgacgtcggagacagcgaatccgacccttgttgcgagaggcttgattgtgcggaagcggccgagccgggcatctcgccggcaccggcatcgcgtatgagtttcgcccagtcatcctgggcaaagtagacgcgtagcaaatcacaggtgccgcaatcatctcccgctacggcatggcgcagatgcacggccatgacttgacgcagcaaagcatcctgttccgcaccgttcaacaatcgaggcgacggcaatccagttccctcgcgcgaagctgatatggcccggaatgccacggcacccagcgtggtgaccggcctggcctgcacggaaaacccgagctcacgaatcacccgattgcccaatgcgtcggcggccacacggccggatacggccatcaccacctgcgcgccaccgtagcggcgcagccccgccatcaacaccgataaggcgaattcagttttgccgcttccaggcgtgccgacaatcagcctcgccgctccatcacggtcgatgccgtccagcactgttccaggttcaagtctcgtcatcatggctccagcctaaacccgaccgtcacagagggaaaaattttaccgaacccgacgaagaatcgtacccttgacggtatcctgtagaacgaatgcagggagagcgcattttccaaggagggagggaacagatggccaatattccgatgaggccgccgaagctgcccggatatgatttcgtccagatgttgggaagcggtgccaccgccacggtgtacctatataaccagcgtatgcccgcacgcccggtggcggtaaaggtcagcgccaaaacccttgacccacgggccgctgccctgttcaaccgcgaggccaacttcatggccaagctgtcatcccacccgtacattctgccggtatatggtgccggcgtcacctccgatggccatggctacattgtcatcgaatatgcgccgggcggcacctacaacagcatcatgaaggcccggtccatgacctgcgagcaggtactcgacctcggcatcaagctgtcaagcgcgctgttcaccgcgcatcgcagcaatatcatccatcacgacatcaagcccagcaacattctcatcacctcgaagggcttgcctgttctgggtgatttcggtatctccaccgatgtgtatgaccgtaccgaaaccggattctcgccgccgtgggcaccgcctgaagtgcttcagcatctgaccaatggttcggaagccgccgacatctattcactggcggccaccctgtacgccatgttcgtcggctgctcgccattccagcacgaatatcatccacgttcgcaatcggaactgatttcgctgatcgtcaatcagccattgcctcgcctcaaccgccccgacgtaccggccgatgtggaagcggtgctgcgccgggccctgaacaaggaccccgaccagcggtactactccgcgttggagttcgcacgcgccatgcagcgtgtgcaattcgcatatttcgggcatgccactcccgttaccgtggaagggatgccggcctaccccaaagacatcgagcgtcggcgccgggccacggaccagcgagatcagaccacccgttcgtcacggcgatgggtcaaaccggtgggtattaccgtcggtatacttgcggcgatcaccgcagcggcactgatattcgccttcgtggtcgttccccgcatggacagcgccaccggatcagataccaaacaggtggcgacgcccggcaccaaggatgatgacaacaaccgcaataatcaggatgacgtgattaccgataccgcgaacgcccagattccttccccggagaatctgaacggcacctatgcggcggatgggtcatccgtgacgttcacctggacgaatccagacccgcaaagcggtgatacctatgcgtgggccatagtgcagggcagcaataccgaccagagcgcgcaaaccgtcacaacgtcagatcccacggtgaccgtcaacgcgcaggaaggctcgcagacctgcattcaggtgtccattgtgcgcaagaaccgccagatgtccgtcagccccgccatcgcctgtgcggccaagccgcaagagtgatccgctcgccactgccgggcataccaccttggcattgcgtatcgcatcaggcatgcgaccggcagtggcgaattcaccaaatggacaacaggaacggcaggtattggaaccgtaaagcgttgtcattacactagcaaccagagaaaccagggttcagggagttcagatggccacatcgtcccagtcatacgatcgtcgccgacgcatcagcgcggctttgcgccgccttatgccctccggagggcatacgtggacggttcccgtaatcacgctcctgctgcttctgggacttgttgccggcgcggtgatcatgagcaccgtcacgcgccgccatgtgcaactggacgatggcaccgtgtgggtcacttcgctgaagaaccagaaggccgcacgattcaacgtaaagaacaaggaggccgacgccggcgtctcctcctccgccccacgattcgacatcgcgcagcataatggcgacaccatcctgaccgaaacgaccaaagcctccaccatcaaggcatccacggtcagcaccggtgtcaagaccgacatcaaagccaacaccaccactgtggtcggcggggataccgtagccctgatcaacgagaagaccggcaatgtgtggaccggcttgtcggaaaaccttgattccgtggcccccaccacttccgatccgaaaatgaagctgggcgagggcgggcgcatcgtagtaacccacgatggcaaggtctacggataccgtccatccgacggtatggtgctgcgtcttgacaatcccagcagcgccaaggccaaaaccctcgaatcgctgaccgacggcaagcagcagaccgttgaaagctttaccgtcatcgggagcacgccggtaatcgcaaccggcaaaaccgtcatattcaagggcggccgcgtcgatgtcgacacgaccggcaccctcacccttcaggagcctcccaccgatgacgtacagtccgattgggtggccgcggcatcaccgagaggccttacgcttatcccgttgaggtccaatgccaaggcgaatttcatagccaacgggggcaaggcgaatccggcacgaccggtatcgtccaagggctgcgtgtactcggcttggagccagaaggccagcaactacattcgcgcctgctcccccgcggataccagcgtcaagccgcaaaccctcgaatccgtcaatactacttccgaattggtgttccgcaccaaccatcgccttgtggtgctcaacgacacggttaacggcaatgtgtggaaccctgaggattccaccaaagtcatcaaaatacagtggaacaaaatacaggccgagcagaccgagaaagaacagcagaacaacgactcggccaacaaccaccacgacttctccaagacctgttccgcacaatccggccaaatcaaagccgaggatgatgaaatcggcgcacgagccggttcggaacagattctcgacgtgctgcgcaatgacgagcagaccgattgttccgtgctgaaaatcaccaaggttggcgcaccaaacaacaaagacgtcaccatttcgccgatttacgacggccggtatctgcaactcgatgcctccgccacatccgcaggcaccgttacctttacttacgatatttccgatggccgcggccagacctcttccgccacggtgaccgtaaccctgaatgatggaggcaaccacgctcccgtacagttcgacactcctcccgagatcgatgtggagcagggagccagttataccgccaatgcgctgagcagcttcaacgatccggatggagacccgctcactctggtctccgctgtggcccagaacaccgaccaggtgcaggtgtccacccgagccgacggccagcttacgttcaacaccggtgcgctggcgtcgggacgcgtgggcgtcgaggtcaccgtctccgacggcacggcgaccggcaccggcatggtgtatttctcggtcaagcccgcgaacaccttggccgcggtcatcgacccggtagcgaaaaccaccgttcccaacacggataccgtcgtcaagctgtcctcttacgtgcatggcacttccttgcagccggcacagctgactcaggtggatacgcccaacggcgcttcgacgaccaccaatgcggcggatatgtcgttgacgttcaaggccaccaatcccggcacctattatgtgccctacaccattactcaaggctcgattccggccaccggattggctcgcgtcgaggtacagcccgccaccggcgaggccgccaaaccggttgccgccaacgatgtcgccctgcttggcgcggataataccgccattgtggagccgctcaccaatgacgtcgatccgatgggcggcgtgctgtccgtcaccacggtgagcgcaccggccgactccggcatcaaggttggtctcgtcagccataagcgcgtgtatatcactgcgcgtcaggtgcccacgaaacccgtcgcccttacctacaccgtggccaacgcctccggaaccgccaagggcaccatcgtgttgcagccaccggctctgaccacctcgaattcagtgcccaaggccagcaatatcaatgcccaggtgcgcaccggcggcatcgtgtccgtggatgtgcttgaccatgtggcctactcggatggcaccacggtcaagctcaagaacaacctgcaatacgacaaggagacgttcaagggtctggccttcgtctctggagacacggtccgctaccaagcatccagcgagaccggcaacttccccatcacctatacggttgaagacaatctgggtaatgtggcttccgccaatatcaccattaccgtgcataagagcgacgcagcgagcaaggccgcgccaaccccgcatgacgccgaagcgcaggttgccgccggacagaaggtccgcatccccatcacactgaccggcatagacacggatggcgacgacgatcagctgttgggtctgggcaacaaggcacccacgctgggccgcatatccgaagtcggttccgactacttggtctatgaagcgtatccggattcgtccggcaccgacaccttctcctatgccgtggaggattggaccggtcagcgcgcacaggcgcagatccgcgtgggcgtattccaaggatcgtccgactccggcgtatacgccagggatgacgaaatcacgttgaggcccaatacggccgcaaccgtgccggtcgcgcagaacgacatctccggcgacaacaccaatctgaccgtcgacaagcatgtcgaggtccaaggtctcgacggggtgagcgtgaaagacaacatgatctccttcaccacgcccggcagcgccaccaccgcctatatcgcctacacggtcaaagacaaggccggcttgtccgatacggccaccctcacggtaaacgtggatccgaatgccgccatcgagccgcctaccgcctacgactatcgtgtgccgtccgccgccaccatcgataagaagtccgtggatgtggatgtttcccagtggatcgccaatccttccggcacagccaatgagctcaaggtcggcgttcatccctccgccagcgctcacgctcacgtcaagggcggtgagcattcgaccaccatcaccgtcgacctgacgtcacaggcgcgagccgtgccttacacggtgaccaatacgaaatacaacatcacctccaccgcgttcatccaggtaccggcctatggtgtctttccgcccacgttgcgtcccaaggcaccggaattgaaggtcaattcgcgtgagaccattgaaatcaacatcaatgactatgttcgcgtcggtgccggcaaggaaccgtatatcgaaagcgctgattccgtcagcgccaccaaggcttccaactccgatttctacgtgaacgacaagaccctgaagttcactgcggcaaaagactacgcaggccccgcctccattacctttaccgctgtggatggcaagcagggatcggataagaccaagattatcaattccgcagtgatcactctccagatcacggtgataggccgcgatgtgccgccgcccacgttctcgtcctccactattgatgtcgaggcgggcgcgaaccccaagaccgttgatctgacggcgctcacccatgcaccgtccggcgtgtatgacgacgagaagcaatacacgtattccggcggaagctcatcgtccgggcgaatcaccgctaacctgtcccgttccggcagcttgcaggtttccgccaccaaggatgccgctcctggcaccaccgcgtccattcccgtgcaaatcgcatacggcgcgggcaccgtgaatgccggtgtgaccgtgcgcgtagtgtcttccacccgtccgctggcacgcgtcggcgacaagacgctgaagatcaaggccggtgccagcgatgccgtgaacgtgcttaccggcgcgtacaatccgttccccgattcctcgctgaccgtcatcagctgcaaggcggatgacgccgccaaactcactatcgccggatgcgatgcctccggaaacgtcaccatcgccgtcgcatccgatccgggtgcttccacgaacaccgtgctcgtcaccgtgcaagacggcagcaagtccaaggatcgtgaagtcaccgcatcgattaccgtgtccgtgatcgacaagcccgagccgccactgctctcccccgtagccggggaaccgcaggacagcgcggtcagcctcacatggacgcccggtgccgccaatggcagcccgatcaccaactacaaggtcagttggaccggcgccgccaccggagagaaggattgcggtgccgtcacctcatgccaggtcacgggtctgaagaacggcaaaacctattccttcaccgtcgccgcgcgaaatgacgtcggttggtccaaaccgtccaccgccgtcgaagccacaccggacaaggtgccgtccgctcccaccgatgttacggtcacaggtggcaataaaaccgccaaagtgacgtggaaagcgccgagcggtgatttcagcgccgtcgacaactattcagtgaccgtcaccggtgcaggtgctccgcagaccaaggaaaccggcaatacggccaccgagctgtcgtttacgttcaacaacaacgacatttccgatggcaccgccattacggcgaccgtcaaagcccataacaaaatcaattggagtgccgagtccgcctcatcacagccaaaggacatctggggagacccggatgcgccgaccattgcgctgtcgaacgacgacaccacaggaacggcgaaagtcactctcggcaacaaccgcaatgccggctgccggcgaatttccttgggaggagacatcaaggacaccatcgattgcagtgacagtggcgctacgttcgatatcaatgagaacgatttgaacacccgggaaatcaccgtaacggccaccgtggtgccgcagcgcgatgcttccgccggcacaggcaagagcaggtttgtcccgcagtacaatgtccagccgcccactgacgtctacaccaccggatccggcagtacatgcaccgtgcattggaccaagcaggggcatgcgcagtcctacaacgtgactgccgatggcatcgattccggtacagctactaaccggaactcactcgacttccgaatgagtccttgggccaaatgcaataccgcatcggtgcaacaggtgttcaacggcgctaccagcgatgccgccaccggaggcccgtacaatggcgctccttacacctatgagaagaaggctgtaatcaacaaaccgcaggagctgcgctggtcagacaacgctcacgtcattaacgtcaccggcggttcggttgaggtctatggcaagcaggccaccgtacaaatcatcatcaatggccaaccgttcacgtggaaccccggccagccattggacgtcaccgacttggccgtggccgccgatggcaactacacgtggagcgtcaaagtcaccggcgggccgggatactccggtctcgacaatacggcggacggcagcagcgtcgcgggcacacgcccctctgattcctcggaggggaccgagtcgctcaaatccggtaccgatgtcaccactttggccaagaacccttggattcttggtttcggtaataccccaatatcgtcaaccaccattcacaagcagtaggagaacatccatgagcgagaacatcgacgacgcgacgcagctgtctgacagcacgcagctatccgacgccacgcacttgtccgatgccacacatctggcatcggaaccgcacactggcaccaccccgaacaccgagacggcacagcaacccgttgcgttgcctaacctgccgcagcggccgtcacaagcgtcgtcagaaaagccgtctcctactactgatgccgcctccattcctgcgggcgatgacagcaccgtgctcaagccgcgcaaggacgcgacgccagccatcccgcagcaggtcggcatgccggcaaagaccagcacgcccaaagtcgcgcttccgcacttcggacgtaaatccggcaagcaggccgctactgcgaatgctgcccccgccacccagacctcccgtcaatggacgaccacaaccgccggcaagaccgcagcatccaacgccgaaaccgtggctggtcgcgggccggtagccaatcagcaggccgccgcgcaatcccagccgcaatcccagccgcagcgtcagtcgagcaaagccgcgcaagcagcagcatcggcactgcccgccagcatcaattccggactactgccccagcccacggctcaggtccgggatttccagcagtccttcaatgcgctggtcgagaatgtctccaaggtggttatcggcaagaccattcccatcaagcaatgcgtcaccgcactgatggtcggtggccatattctgcttgaagacaaccccggcaccggtaagacccagttggcccgaggcttggccaactccatttccaccggtttcaagcgtattcagttcacgcctgatctgctgccttcggatgtggtgggtgtgactttctacgatcagaagcgcggagaattcgagttccgcgagggcccgattttcgcctccatcgtgctggccgatgaaatcaaccgtgcatcgccgaagacgcagtccgcacttctggaggttatggaagagcagaaagtcaccgttgacggcgtcacccatgatgtaccgcagccgttcatcgtgatcgcaactcagaaccccatcgagcagctcggtacctataagctgcctgaggcgcagatggaccgcttccttatcaagacgtcgattggctacccgggccatgatgtgtccgtcgatatcctcaagcaggtcgatatcaccgaccgtgcgcagaccgtttccccggtgctgagcggtgacgatgtcatgcggctgcgtcaggtggccaccgaaatctatgtggatgatgcgattcgtgaatacatcgtcaggctcgtcgaggcgacccgccacaacgagaagatcacagtcggctcctccatgcgtggcgctttggcgctgacccgatgcgcccgtatctgggccgcggccgatggccgtgcctacgtggtgccggatgacgtcaaggaccttgcagtggccgtgctcgcacaccgtatcacgctgactccggaagccaccttcgatggcgcgactccggaaagcctgatcgcacaggtgctcgaagacgttccctcccccaccatcggttcctgatagggcctggaaaggtatccgaccatggcatctacatccgccgcattacgccgtcgccggcgcgctgaacgcatgttcaagcgcgcggtaagacgcatcagacggttcttcgcatcctacgtctcgcccttgggctgggcggtaacgggcgcaggcatcgcatgtcttattgcgttcctgcctctgggctggtatgagctgctcgtattcggcatcgtggcgatggtgatgatgctcgcggcaatcgcgctttccctcggcaacacacgcttccacgcgtccatcgccgtatccgatcatcgcgtgaccgtgggagacaccatatccgttatcgtcggcatcgacaacaccggcagaacgccgacaaccacggcacgcggatatctgccaatcggcgatgcgcatgaacgattcaacatccccatgctggctcccgggcaatccaagcaaaccgatgtggagttccgtacggtatcgcgcgcaatactgcccatcggaccgttgcgcatccgcaagggagacccgttcggcctggtgcgtcacgaaaaggagctggccgaccgcatcatcgtattcatccaccctcgtaccgtgcgtctcgataccctgaatgccggcgtgccccgcgatctggaaggccaaccatccggccagatcgtggatgatgatctcgacttctacggattgcgcgaatacgagccgggcgacgacgtgcgtaacgtccactggctgagctccgcgaaaaccggcacgttgatgattcgccaatatgaagccacgcgccgcaccgacacctcggtgaccatcagcgtgaacccggatgagtacgtcaacggcgaggaattcgagatggcggtgtccatccactcctccatcggcgtcaaatgcctgctgcaggatcgcccgctgttctgtcacgcgggcaacgcgcacggccagccgcgcaacgccatggagttcctcgacaacgccagtgccatagagcctgatcgtgaggacaatccgaatctcgccgagggcacgctgaagcacagtcctgatgcttcgttctattttttcactgttggatcgctgaaagacatcgagcaaatcaagcgcatgaccttggccttgccccgatcggccagctgcgtggtattgcaggccagcgccggcgccaatcgcggcatcagaagattcgccaacttcacattggccaccatcggcgaactcgatgatctcccactgatcatgggggtgctcgcatgaccttcgaccagtccagtatcaccaatgccaataccgctgcgtacgccggatcgagcggcacatacaccggcacttcctccggcacgtacaccggaacctccaccaccaccggctcctgggccgactccacacattcggttatctggatgaccagaggcaatgtgcttcgcggcatgggcctcagtcgccagccgtggggcaaacgaatcaccagcctcgtactcatagcggcgatgatgttgctggcgcaagccaatctcatcgacgtgtacggcggcgtggccacttgggcgatcgccgccgtaccggccaccttgctgggcgcgatcatcgctctggcgggcatgttgccggcgttgcgactgtggtggcaaatcgtgtttctggcgtttgcccaattcatcatcggtccggtggtaacgctgagttccaccacgtcccattacgtgattcccaccttgaagaccttgagttcaggttgggaaatgacgtttggctcgttcaagtacattatttccgtcgatccgcctctgggcacgcaagacggcgtgctgctggcggtatggaccatcggcctgtggcttacgttcctcaccggcgtgtttgccattaatgccaacgcatggttgtctctggtgggagtgctgcctcttgcggcggccgtggccgtatgtgctctgctgggtacggacagcggctggcaacgtgccatctgcggcattgcctttgccttgctgctgattatctggctgtcttggcgtcttgaactgctggaatgggggcgctggatatccgcgctgatcatcgtcgtgctcgctgccggccttgctttcggaggcacgttgctggtgccgcaggaccgtttcgtgctgcgtgaccgctacgatccgccgttaagcccctacgattacaccagcccgctcagcggcatgcgatcctatatcaaggaccacaaaaaagacgtgttgctgaccgtccataatctgccggccggaacaccagtcaaacttgcggtgatggaccgattcgacggcacagtatggaacctgtccgattcttccgaagccacggactcctcgaattatcatcgcgtgggcaccacgatcaaggcggatgagcagggcgaatccttcactgcgaccttcaccgtcgatcagggattgaccgacacctggctgccgctggcgggagcggccactggcgtgagcttcgccaacgatgccgacaacggcaatgacacgttctactacaacacggataccgattccgccattattcccgccggcacgcgtaaaagcctcacctataccgaatccggcattatcgcccgcaagcccaccgataagcagatcagcagtgcggccgcggcccgcatcacccaaccggaagcccaggatgttcccgattcggccagcaaactggccacgtccattgccggcggacagtcctcgggcggtgccgcagccacggcgttggccgacacattgaaagactccggatggttctctcatggactcgaaggcgattatccctccgatgccggccatggcaactaccgtatcaacaagctgctggcaggcacggccatggtgggcgactccgagcaatatgcctccgccatggcactgatggctcgtgagctgggactgccctcccgtgtggtcctgggcttcctgccgaaaaacaaggatggcgaaatcaccgatgcccgcacggagaagacctcgggcaatggcaccaaaatcgaattcaccggcaacgatgtcaccgcttgggtggaaatcaaattgcagggcctgggatgggtggcgttctatccgacgcccaaggagaccaaggtgcctgatgaaaaccagaacctgacgccgccgaatccgcagacgctggtccggcaaccaccggtgccgttgaccgatccgctgcgcgatcagacgcaagccaggggccaaagctcattggccggcgccgacgccgatgattcgccgaccaacctgttctgggtgcggttctggcgagtgacccgcaaggtggccctgtacggcagcccattgtggaccctactcatcgtctgcggtctgattctgatgttcaaggccatgctgctggcgcgagcgcggcggcatggcagtccgaaagcccgtgtggcagcaggttggaatgccatacgcatgcttgccgagcaaagcggcatcacagccaagggcactcgtcgagatcaggccggtgccatcgcccgtcaactcggcacagatgaccaggctttgatccagcttggccgggaagccgactacgtcacgttctcggggcaagacattgaatcgggccaagccaccacatattggacaggagtcgaccaattgcgcaaggcaatgctcacttctttgccgcgtttcaggaggatacgtacacgactttccctgaaaagcgtggctatactgtcaaatagacacgcagccaagtcgcacacgacgcatgtcaagcgcgcgcgtaagaaggggaagacgtcatgaccacaggctccatccgtatcgcgatgaccagtgacgtgggtcttaggcgcaagaacaaccaagacaccggattcgcccaacagggcgtgttcatggtctgcgacggcatgggtggcggcaaaggcggcgagcaagcaagccagttggctgcccagcatttcgcgcagctggcttccatgccctcgcgcacccgccatgacatcgacgacaccctggcacaggctcagcacgacattctcgatttgggtgaccgtctcggcggcgtggccggtacgacctgctccggcctggttttgccccagccttacgcagatgccatcaatgcccacagcgcagctccgtttgacgacgccgactccccggatttctcggaccagacctatgtggtcaatgtcggcgattcccgaacctaccatctcagcccgctgccggatgccgatgcccccgccacggatatcatccccgtgtgggacgcctcctcgctgacccgcatcacgcgggatcattcccaacgccaggaggctatcgattccggtcagatgctgccggaagaggcggaggcgaccattccacgcaacatcatcacccaatgcctgggcgatccagacggcatagtgcccgacgtatatgttgccgatctgaccggccgtttcatcatctgttcggatggattgcacggtgaagtgtcagacgaacagattgcggccatcgccgcagcgcattccagtccgcaggaagccgtggacgccttggtggcggccgcgctcgatgcgggcggaaccgacaatatcactgtgattgtggccgatatgccactgaccgaacccgaacatcacgcgttcagcgcttttaaactggacgagggcgaggacattggcgccattgaagacgcaacactacaaacactacggaccatacgttcggcataaccgagcgaacataaggaggtaatcccatggttgattatgatgctgcggtcgctgccgtacaggatccgaacgcggacccgattctgttggcaaaaatcgcctacgagaatccggaattcggcgcaaacgtcgccgtaaatccgcgttgctaccccggcttgaagcgttggatcgccgagttcggcgatgagcgcgcccgcgagaccctggcgcaatacgggttcaccgccgaggcattcggcggcccggtccaggatcaggaagccccgtcacaggcggccctgcaggctgccgagcagcagcctgcagacgcttacgccgccgaccagtacgccgcagctcagcccgctgccgaccagtacgcagcccagcagcccgcaactgaccagtatgctgccgctgcccagcccgctgccgaccagtacgcagcccagcagcccgcggctcaggcggcattcgaggagcctgtggccaccaatccttatggcttcaccgccgaacaggccctgaccaccaccgaccagatgcaaatcgcccagattgcccaatacgcgcctgaactacgcgcctgcatcgcccgtaatcccaacacctatccggcactgatcgaatggctgggccagctcggcgacccggcgatcaacgccgctttggcttcccgtcagtgaaaggacggcatcatcatggccaaacttccctaccctccagcacctgaactgggttggtattctgacgatccggtggaaggcaccccggattccgcagttggcacagccgaaccgcagaacgactacgggcagcccagcaccgcggaagcggcaaccaatgccgcttttaccgcagagcccgccgccactgccgccgctgagcccactgccgctccggtagacaccacaccgcacgccgccgaaaacgacatcgaggattgggacagcaccgtgctctcctcgtcgttcacttccaaggcaccgaagaagacgtacctgctgcataacgatgtcaccggccagaccattgtgatcgacaagagcacactgttgggccgcaagccatccatggatgtgccgcagggtgccaaggccgagcgtatcgaagacccgacccgcaccacgtcccgtaatcacgccgccatcagcatcgataccgatggcgcgttgtggatcgaggactatggctcgttgaacggcacctacatcatcgccgacggccaggagacccaagtcaccaagggcacaccgctcaagctcagcgcgcctgccacggtgcgtatcggagaccagttcttccagttctccgaacagcagtgacctctggactgtacaggccagcgatacccccccccagatatcaataaaccgcaggtaacgtaccaagcaagctgtgagaacaacttgtacccgtacggtacctgcggtttattgttgccgttggcgggcggtcagtgacggttgctcggctatgcctataccgggctgggcggtcactgaccgctgaacgcagtagttacttcttcgagtctgacttgttatcgctggatgagctcgacgaacttgacgagtccgactccgagtccgacgaatccgaatcactctcgctttgcgacgaactgttgctcagatccggtgcggggtcgcccggggcctgaccgatggtcacaatcacgtctccgctggattccgggctccacgccatccattccatagcggcatggtcgcacaccgtggaatcatcacccaatggcaattgcgtgtacttgcccacggacttgccttgcgcatcaacgatgatctgctcatccgtggtcttcacgtatatggtcttggtcagatagttgatgcccttgaaactgccgtcggtcaacaacagacgaccccactgcgacccatccaacacttccgtgggcttcagatcggacgacagcaggaacacgcgtttgctttcgttgccgttaccatccgtctgcacgtagagggtgccgtcggagaattggtcaatggccttgacgtcctcatccttgctcagtcccagcacgtcttccaacgattgccgtttgccggtcgtgctatcgatgacaaacttgccgctatacgaatcatcggtcacatacatgttcttgccgagataccgcattcggctcaaatcacaacttgagtagtccgtatcgcagtaattcaacgggaaactcatgatttccttgttgtcttcgaccgaatacaggtggtacgaattgtctcgcaccatatatgcgtcgtacaagctcacgccgctcgcggaggcattgacctgtttcgcatactggtacccgccagaatcagtggtaagcacgattttgtcttggaaggtctgcaataccttggcggtatcactgtcatgagttacgcccatcacctgcgtgtggttgatggtcgctgagcgctcgtccttgttagcggtgtatttttcatcgctatgccacgttttcttgatggccaccatgttgcgggactcggcgagcaacgagtattcgtaaccctgctcatagtcgataaggttgtcttcctcggttcgcaggtcgatgcggtcagacagttcgccggtatcgagatcgacctcgtgagcgaacagatgcacgctttccggcgtggtgcccactgccttggtttttaccgcatagaacacgaataccgccggattatcgccgtacgtggcggcgacctggggctcggaatactccttctcccccgattcgagcatggatacgtggatttccttcgattcatccagcgccggcgtccagacgccgaaggcatactcgccgctgccgtccagggaatcacttgaggatttggacgacgaatccgaatcgaccgaggaatccccatcccagcagtggatgacgttcgagaccatcgcgccgccagtccacttccagtcactggcggagttgccgtcgcatgagaaatcggtcatcgtcacttcggtggctgccggcttggcgggctcggacttggtcttctgctggtctttggttgttgtcttagtctttgtcttaggtttcgatttggtggtgctggaggtagttgttggcttggcctcggccttctgatgcgcgttacgccagaatataaagcccgtgatgccgccggctatcagcgccactaccacaataatcgctatgatgattggcacgattttacggggctttttgccgttgttgccggcaccattgccgttgttgggcacgcctgcaccagttggcatgccattgttcgaggtcgggattcctgccggaggaacggcaccggcggcaccggcatacgctccgggtaccgggctgcccggcacctggccgccgggcattggaccgttcggactggaaatgcccggttgcggaatattcgtttgaggcgcattcggccgaggtacgctcggctgcggctgcggcacacccggctgcggaatcccgcgcgatgccactaccgtagcgtccgccggtaccggggctccgcaccgcgtgcagaacatcatattgtcaggaaccgcattgccgcattgtgcacatcgtttcatagttcttctcccccgctatcagcgtcatcgcttcggttcttctctgccttctattgtaggagagagatcacgaatgtgtcgtcggccagcgtgaaatcgccgccagatgccgcatattcgcatccgccgcttgccagttcgcggccacctaccgcagtgccgttggccgaatgattgtcggtgatgcaaaaacgtccgtcatccagcatgtcaatcaccgcatggatacggctgacgttggtattgccgcccatgtgaatgtccgcggttttcgatcgcccgatggtggctcgtgtggcgtgcactgttattgctttaccgtcgcgcaatcgtgtgacggtaaagcctctggacttgtccgtgtagaggcgcagcatcgtctcgccttcgctgtcgttctcatcggcgcgcagtgctgtgctgacggcgctgacagggaggatagggcgaacgacgttgctagtggcgggaacgcgagcagcatcaacgttgttgacggtgtgagcaacgtgagcggcggcagcagcgttacccgtgttagtctcggccacggcagcagtagcggtatcacccgcggcagcggcagccgccacattggatgccacatcgcgggcggaatcttcacggatatattgttcgcgaacgagattctcacgagcgggctgcgtttcctgcttgcggggaagatttacggcaatcggcattgcaggagccggctgtgtcacgggcgaggccgacgttacaggagtcggctgtgccggtgccgcgtgtgctgccggcattgcaggagccgccggcgttgcatgcgttgacggtgccgcggaagtcgtcggcattgcggcctgttgcggcgtcgtctgaagtttaggcttggagctcaatactgtggcgccaaatcgcgtggcaccgaccatggtgccgtcagacactacggtcgcgccgaattgcgtctccgaaccattatcttcatgagtcgactgcgctgactgcgcttgacgcggctgaacagtgccgggcagcaaatacgccataaaatcatgcagagcatctgcattaaccagtgaattgcgccccaggaactcggcgagcgcacgctgatagccttgcacaacggcatcctcaagccgggtccggcgtgcatcggccaatgtctgcagcaaagtggtggcggtgttgcgatcgggttccagtcccagcgccggcaccaccacgaacagcggatacccctgtgcggagatatacacgcttttggggtcccactgcacgtacgacagcggcacgcgatgctcctcgcattgctccataacggacaataccgccacgagtatgcccacatattggccgccaggcactaccgacctcaacacgccatgcatggtctcgcaatgagtcacgtcgtaatagaagaggatttccgcgccattactttcaaaccggaacggcagcatataccaatggccttcagcaagccattgtgcctgcccaagatccaacgactcgcctcgcgtggtatgtatggtcagcgtctgagcccccgtacgccgatccttaacagtcttcgctctcatagcacttaagtctagtcctgtaccaaggccaacgctttgcggagacgcaaaactcgtcaacacagtaacacaactccggctaagtaactttaccaaaaaactaaaaattggtaagataaggttaccagttttcctcaatattggtaaggtagcattaccgttttcttgaaaggcacattatggcaaatccgatcatcgccgaaaagctgcgcgattttagaatcgaagatttccacccgattgtgccgcgcgacttggatctaggtaagccactgaccccgagagtaggcaatctggtgaaggtcatcgtaggcatgcgccgcagcgggaaaagctaccgcctattccaagagatagaggccctacatacatccggtgtcagctggaaccaaatctgctatatcaattttgaagatgacaggctcggcgacatcactccaagtgtgggcgatgaagtaatcgaaaccttttgctccatgcatcccgaaagcctagacaccggcttgtacctgttttttgacgaattacaggaaatgcagaactggggcgcttggctacgtcgcatcgtagacaccacaaaagcaacgatctatgtcaccggctcttcctcgaaaatgctctcaaaagaaatttccaccgaatttcgaggccgagcattggacttcgagcttttgcctttctcattccgtgagtttgtccgcgcgcgcggtatcgccgaatcagaattgctcagccggaacgaagcagctggatattccaccaaagaacgattaatgctgtcggccgcattgatctcctacctggaagagggcggattcccagcaatcgagggactgccaacgcctcaacgtgtgaccctgctccagtcatatgtgcagcgtgtcgtatcccgcgatgtagtggaacgttatgacatcgcgcgtccaagagttgcctccgcattggcacgacgcttgcttggcagcaacggcaagccattgtctattcgcaggatagaaaacgaattgcgttcagccggactagccaccagccgtgtgctactgggagatttattggaatattttgaagacgcctatctggtgtttcgaatgaaagacttctctatgtcgctcaaagagagcaccacttccacatcaaaaatatacgccatagatcccgggctggccgcagcctcaagcatggcaagcgccagagatgatggccaacgattggaaaacgccgtttatctcgaactacgccgccgaaccgcaggttatcgtcgcgacggcatatcgtcatgccataccaaggaacatggctatgaagttgattttgtgatgggcgatgcactcgaacatgaacaatatgagctatatcaggtcacggcacgcatggatgataatcggaccatcgagagagaaacccgcgcgctctgggaactcatggccgaacaaaagctccatgaaggaaccatcatcgtcggcgatggaatcgagcgcgaataccgcaacagcaattatgtcatcaaacaagtgcccgcttggaaatggttcgttgcgcatgagccccggtaagcttcaccggccatgtcagattcctgagatggcaaccatgatggcaaggaatatgaacagagtctcgacccagatgagttcggcggaataccacatccagaacggttcgacccgcttgctggcgcattgacgggcaatcgccacttcgcttggcagcaccgcccaagccataaacagggcgaccaacaacagcacaaaagaaatgggcacccaaccgcattccaccagcactatcgaaaagcccacccaataagccacacctgccacttgctcttagccctccattgacctgacgcccatctccgcggaaccattcaagaactggtcggcgagacgcacgtatccgggcatatcaccactgagcaacgccaatcccatgttgcgagccgccttcacgtccgcgatccatgtcaacgccaccaccgcagccgccgcactcatatccagcgcctccggcgacgaaccatcgtcacgccggccaccacgacgagccgtcatatcctgccccatgccggccagcatgatgggcaacgccggaaccccgtacccacgcacgcaatcccgacaatccgacaacacccccaacgcctcatgcagcgcctccccatcacgctcgtccaccgcacgcatcaacaacgacgccaaacgcgcgccaacaagcccacgcgccttggaatccacgaaattcctatccagccacggaccggccacaacgttagaacacgcatccccggattccacaccagccagaaccccgcacgccgcttccacatgctcgctatcgaacacatactggcgggacgcacgcaccactccggcatctaatccgatcgccgcatccgacagagcggcatcccatgcagcatcagcaacatccgcatccacagaatccgtggaaacaccaacagcatcggcaaccgaaacagaagaacccgatgacgagccaagaccagcaccggattcacggaaggccagcacctccttcatccgctccacaccccgagaatcgaacgacaccgacacatacggcatcatgccatccaacacctccagataccgcccctgcaacaacaaatccgcccacacccgcgtcacatcatcatcaagagaccaacgcaacaacacccacgcacccatacggcacaccgcatcaacatacccctccaactcgtcagcactctcctcacccggcaacggcatccgcccctcggcaacacgaccatacgcatccaacaacgaaccatccgcccgccacaacacacgaaacagccaaccgaccattccgcttttccccacgacggatatcaccccatcaagaaaacgcatcgcctccgcacgcgctgcgcccgcccctggcgagaccgtacaggataacgcgaccatatccccgaacgccccctgcccgaacacgtcatagccacgcgccacaaccccatgagccgcacgactcgacggcaacaagccaaccacaacaggcaaaccagccaacgcatccctcaaaccacggacacacccgacaaaaccctcaccgtcaacaaccacagcaacaccctccataccaacatccgaacagcaaacacgccgcacccacatcacacacccgtggcggccgcgtaggcaagcagcatcaacatgacgaaatcaagcaccaggaaaccagcagccacaggctgccacgaggcatcacgcccctccaagacacaacgccggatcgcacgaagctcaccgggaatccagaacaacaccatgccgaccgccatcacggaattcacccagaacaactgattcgcatcggccgggccgacccacaacatgcccattaatcccaaaccggcaaccacattgccacccacacgcacacgcggggaaacacccaccccacgcaacaccacaagcaccacggcaaccaccacggcaaccccagccacaaccaaaccaggcaccaccacagcaggagaactgtcgtaatacagtctgtccggacgtccagtcgtggagtcaatcaaactttcgacatggggaccatacatcgcatacataacggtctttccaatctccgcgcccacggcaccggcgacacactgaacaatcagaacgtccccggcaacagcaatccacggcttgcgcataacatgagcagccagccacagcaatagtcccggaacaacacccacgtcgaaaaagaccgccacaggccaccaatcgctcgacaacgagataccggccatctgcaggaaccacacaccacctctagcggaatcacgttcgaagaacgcataccgggcttgcaaacctacctgcgcaaggaacagcacaaaccacatgatagtccacaaggcaacccccaaacgagtgaacacacgcctgccacccacaggaatgcacatgtcgatgaactcgcccaacgcgccattcgccagaacacgattctcaccgccgacatcagaaccgccagcctcggcatcaccgcccacaccagcggctccacgctcccacggtggccgaccaccacttctcaccatatcaatcacctctccaccataaaggaacgaatcgcggaacccgcataaacaaatccttcaccggcattgttcaccgcatccgccgcatcattcaactgggcaagccccggaatgaacattttcgccacatcccatggacccgatgtctgccgcccgtatcactctcataggccaagcggatatcacgtacacgacgtttcgcatctgcccactcatcgcccgcggtctcgacatggtcgctgtacccgtccagcatctgctgtgcggcttccttcgcctcacgcgcattcctgcgctgcacatccgtggcggcatcgggcaactcgtcaaacaccgcccccgcctgcgtcaatgccgagcgcgccccacaagacagccgctcataccgctccttctcgtcgcgtgcggcgatggcacgttccaactgggttttggcatccgactggaacccgtccaaagactgcatccagccacgcagctgacaggacacctcaccaaagctgtcagcaaatcggccgaaatccctaggaagatcctgcagcttctcctcgaacttgacaacccactcgccctgcatgccggcctttgtgtccagattcttcaatgcggacgccatttcggagaaatcccgcgacaaacacttgtacttccatgccatacgcgcgattccctcggtatcacccgacatcggattgtccggctggcccactacggcccagtccaaataatcgagattcttcataattccccaactcccctattgatccgattcgtccgattcggtttccaccgagactcgcaatgtcgccgtaattctggtaaacagctcgaacaacgtgtcagacaattccacctgaggcgtaatgccggtagcaagaattacctttcccgcacaggggatgaacgtacgcaacatcgccaacctacctacgggcttaccttgttggccatgaacggtttctacagaagatgcctgtaccgcaggaccgagtttattgaatgacgttttgctcatgtgcagttcatcaccttcgggcaggccttcccgctccgtgagcagcgactccacgatggcatccaattcctcatccgctgtaccatacggcacagcggatggaagcactgagaccatgaatgtagccattaccaatatggggctggcatcatcaagttccgtggttatggcgtatcgtacaccagctttccatgattgctcgtaagagttcgccagatatttgcgtaatgccggataaacttctcgccagtcggcgatgacgtgtttcatcggttcaagagcctgccgaatctgccgttcccggtcagcaggatccaacaggatttctctccatccctgtggaggtatcaatgaaatatgtaagaattcagccaacggattctccccatcgccggtcgataatgctcatagcaggcagtcaagattggtgcacggcatcggaaatggccttggcaatcgcctcatcggcctcatcggacccggttttcacgttttccaagaagccacgaagattctccgtcttcttcttgtacttgttcttcgtatcactgacctgatggttgaatgcgaaaaccgcatcgaccagctcggaacagccgacattgtcagaactcggctcggtaatctgctcatccagatttagccgatcacgaatactgttgaaacccctgcatcagcgtgcttactgattcttccacaatcgtcaggttttcggccacccagcaacctccttgttgttcgtgcaatccttcatacagttttctcggcaacaccaatcaaaccgattctattggcatccaacccgatacggcaagaccttccgaagcgaatgctcacgactcggctagctcgcgaacgtgccgcacatacgactccatatcggcgttcaggagatccatggccagtctgcggctccatgagggatcgggaatgcgcgcgagcagcatggccgccatgctcgagcacaggtcacgcgaggactccaggtaccgcatacgttggtcgagatccgcatcgggccgcagcccgtccgaatcccgcaacgtgcgcgcggcgatgatgggcaacgccagtatgccgtcatcacaaacgattccccggtatatggtaagcagattcaacgcagcctcgagccggtctccatcaccctgctccaacgcggtggaaaccaaaggctccacgattcccgctcccgccaaggtcagcagcttgtcctgcacgaaatccggcctgcgccagggattgccattatcaagctcgccatcaccatccgcatcgccatcggcatggtcgaggaaatagcgatacgcctcgatgacgtggtccgcatcgaacaggtacagtacatcggattgcgggaacggacggccatcatccgcgacgtcaagcccctccccgtcgtcagacgcggtagaatcctcgcctgacgaataatgaggaccgtcttccgccttatgcagcttcatctccatcgcggcggtctcgccacgccgcatcgccgcggctatggcgcgatcgcgcaaatccgacaccaccaattcggtttcgttcgcgttcaacgacacattggagtacggaagaatgcaattgagcgcctcatcgtactgttcgatgaggaacaacctcgcgatatacgcgctggaagcgtccccttcgccccagccaagaagaatatgggccgccaaccgacatgccgaagtcaggaaatcaaaagtggcgtccagattctccacatccgcatcggctatctgctggcgaagctgcaactccttgccccaaatcatgcggaacagccagccgaacacatcctcatcatcaatcatggagactgaatcagatataaatccctcgccctgggcaaccaaatcctcatcacgggtgcggacggccaaagcgatgatatcggcgggactcgtctgcccaaacacacgataggacctccacaccagatcgtcctcgaagccatccggcaacggaaccagcggattcttccacatccggaaatccgcaaccagccacttcaactcctcggcataccgtcgctcatccaaccgaatggacatccccactcaccctcctttgcactaccatcccagcacacaaccagccgtcacgccatgggcagcgccgtacacacgccaatgacgaacaacgcctcggcggtgagccagaacgcggccggccactcgccacacgactcacgacgattatccacacaaaaatacacggcagccaaatccaacgggaaccacaggaacccaacgaacaacgcaaccagcggggccgccaccaacgcgaaaccgctcacatgacgggtcaacgcgatgccgatggccgcgaccagaccaaccacgccgccaccatacgatata

SEQ ID NO: 382 - DNA, 9597 bp, Unknown
  R42_10m  MAG No. k141_42391
gccgattccgcaccacacttacctcagcacgccctcaatcaatcgcgtgatgagttcggtgtagctcactccggtggcatcccaagccttgggatacatagaaatcggcgtgaagccgggcatggtgttgatttcgttgaccatcaccgtgccatcaggcgtcacgaaggtgtccacacggctcaagccggcaccatccacggccttgaacgcacgccgggccacgtcacgcacgtcctcaagcacgctgaccggcagattggccggcacttccacgtggctggcggaggcatccatgtacttggagtcgaaatcgtagaactggtcgtcgttctgatgatcgagcacgatttcgccgggccagctggcctcgggctcgtcaccggccttcgggcacagcacggcacattcgatttcgcgaccatcaatcccctgttcgacgagcaccttccaatcgtgctcgccggcggtggcaatggcggcggccagacgatcctgctgggtctcgcggtcatcggctttctcgaccttggtcacaccgaagctggagcctgcgcgcgaaggcttgatgaacagcggataggtaagaccggcgtcctcgatcttggcaagcacatcggcggcggtgaagttgcgcgcatcgaccgtcacacccggcgcggtgggaatgccggcggcacccagcaccaccttggtgtaatgcttatccatgcaggcggcggaagcaaacactccgcaccccacgtacggcacacccatcatttccagcaggccttgaaccgtgccgtcctcgccataggggccgtgcagcaccggcagtaccgcgtccacatggccaagggaggtcagcgcatggtgcatttccgggtcggacatgctgacgaagctggtgccgaagccggaatcggcggaattgatgcggctgggctcgccgatgaagaaaccgtcctggccgcgagaggggtcaagcatcaccgggcgcgattccggggtgatctttacggtcggcagctcgccgccatccagattccagccacgaggatcttcgccgttgatgatccacttgccgtccttggtgatgccgaccggaatcggctcgaaccgttcagtgtccatggcccccagcacaccggcagtggagatgcaggaaatcgaatgctcgtctgcacgcccaccatagagcaccacaacacgcttcttggccataaccatccttttattgaaactacaaccgttttcaagcctatgctttgcaccgccaaccggaccgaaccgcgctcggaccgccgcgcacaagagacgcacaccagtctactcgcgcacgtcaacgacgtatacgccacacgactttgcacgtacaacgtatacgccacgtatacgtcgcttctctcgttattcgccggtaacctcgtgcccgaacagtccggcaagcatctccgagcaggaaatgccttcgttcagcacgcggctcatctgatacgccaacggggtcggcacatcaagctgctcgccaagagccaccaccgcatccgtggtgggcacgccttcggccaccccgttgctgaccttggtggcctcctcgaccgtcaatcccttgccgagattcgcgccgaacgtatagttacgagacagcggagagccacaggtggcgatgagatcacccacaccggccaagccgaagaaggtcttgggatcggcgccagcggctgcgcccagcgcggtcagttcggccagtccacgagtttcgatcatggctgcggtgttctcaccgtagccggcaccacgggccatgcccacggccagcgcggtcacgttcttcaggctgccgcacatttccaggccgatgacgtcggtggtcacgaacggcttgaaataggaggtggtacatgcctcggccaccttcgtggcattatcgaggttcgtacaagccaccacggtggcggcaggatgacgatcggcgatttccttggacaggttcggtccggaaatggcggcgaaccggtcggccggcaggtcaagggattcgcggacgacttcgtccatacgcttgttggtgccacgctcgatgcccttcatcaggctgacgacgatggcgtgatcgggaatcagtcccttgaattcgacgagtgccactcgcgcgaactgcgcggcgatggccacaaccacgatgtccgcgttcttgacggcttcggcgcgatccccggtggcggtcatgttgtccggcaacttttcgacggacggcaggcgcacggcgttgtggtggtgatcgcgaatgccctcgacaatccgctgctccttggcccacatggtcaccgtgttgccggcgtccgccagcacttggccgaaagcagtaccccatgctcctgcgccgagaaccgttatatttttacccatatcagattcctaccttcgcttgtcgcgcaacttcatcggcacaatcttgtgccatgctactcgcctaggctccccgtacgggaaccggtgcggctacttctcagccgggaacgggccgccggcttccggccaaggcttgcgactcatgctgcggtagtcccagtagccttcagcggggaactgctcgccacgaatttcctccagtactgtgttcatgcgtttgagcacgcgccacatcagctcgttcacggcctcggcaggcggttcttcaccccatgagtccatgtcggcaagcagatcggagtaatcgagcgcatggtcatagcacatcaccacgtttttgcgcggccatggccaccagtggttgatggaggcggcaccccacgtcaccgccgggtacagcggcacctgatgccccagtctgcgcgaggattcaagggcgatgtatcccacgccctccttaatgctcatcacccactttttcgggtcgcgggtcacggtgccttccggccagaccgtcagcgggcggccggacgtcagaatatcaatcgaggtctcttcgatctgcttggccttgcccgaatgacgctgcaccggctgcatgccgaccaaccggaaccacttgccgatcaatggccacttcgccatctcggccttggccatgtaccgggggcggcggcccatgtggaacaggctcatcatcggcacgaacacatcgaacatggtgatatgactggcggcggtgatgaacggtccggtttccggcacctgttccaggccccaggccttggtcttgcagctggcgcggaacacaatggacacccctcccagcagtcgtttggtggccttgggattctgggcgtcgatttccggctgattgggcgtgcgagggccggtcgggtaatactgtgtcgagtccacaagcgtgtggcgggcggccagacgcttgacctgctcatcactcagcgggcttacggccgaacgcggcgacggttttcctttggatgccatggtctctattgtggcacggaccaccgcccaacgattccagcgcaacattcccgggaatgtgccgcggaaccacacctcgcaccccgcctagcgcgacattccccggaatgcgtcgcacaatacgcggcggcccgtctgcacacaccatgcgcgcagacgggccgccggggaaacgttcgaatcactccaccgcgatggcgtcgatctccacgagcgcgcccttgggaatcatgttgttgccaaaggccacgcgggcgggcttgacggagccgatgaacgcctcagcgtaacgtgcgtccacttccttgaagtcctcgacgttcttcaggtagatggtggcgcggcacacatgctcaatgccggtaccggcagtgtcgagaatgtgcttaatattcttcagcgcctgtgcagcctgctctccagcggtctcgcccgccagttcgccggtggccggatcaatgcccagctggccggatacgaacacgaagccattggccttcaccgcctggctgtatgcgcccagcgcggccggcgcctcggaagtggctacggcttccatcttttcgctcatattgtgctccttctcatcttgggggcgcccacctgctgcggccggcgccggtacacatcaccaccggctacgaccaatcgcacgatcagcaacgattggcaatgccgattacgtagcagtctactgagcgaagtcgcgtttagcgcgcatgatgcccggcatacggccatcaacagactattccttgctattccagacgattccagacgattcgactaccgttctcgccaaaccgggcggtttttccacgacccaagcgagccggcatcaccgaccccgacaccagcaccagcaccagcactagcaccagcaccagcaccagctttgcacgcgcttaatatcacgcgccgaatatgcaaaaggcttccggcggctagccgaaagccatgctggtgggcttgatggggatcgaacccacgaccttctgttccggagacagacgctctatccactgagctacaaacccgagcaacttctttactgtacaccacatcacgctgcatgaggcacatacgtcgccaaaataacgagaaaatcgccatcatcggctctacaatggggttatgtcggaacctacagatgacttcgaatacgaacgccgcttcttctgccgcgagctgccggcggaatacgacgacggcgacgccccgaccctcattattcagagctactacgtgcatgccgacaattacgccttgcgcgtgcggctggtctcgcacaaggttcacgtcgacatgacgcccgacgtaaatccggtggccgtgctggacgagtaccgcgaccggttctcggaagcgtatgtcaccgtcaaaggtccgtccgtgggtggcacgcgctacgaggtcgagcgcgagatcgacacgcgcatcgccgccgaactcatcaagcgcggcggctcggtaatcatcaagaaccggtattccgtgtggattgcggaagacggctggagcgtggacgtgttcggcgggccgaacgcgccgctgatcgtagccgaggccgaacgatccgggccggttaccaatctgacgattccgaaattctgcatcaccgaaatcaccgatcaggcgcgattcaataacgatggtctcgccaaccgtccgttctgcaagtgggcggatgatttcgaggaggaactggcgctggaggggccaaggttccagcaatatttcgggaagaatcggatggtttaggggaagcaatcaagtacgttcgcgcgcttccctcagtcatctacgcctgacagctcccctcaaagaggggagccaaaaccaatcagtacatgagggtggctaggcgacggcgggcgcgagccagacgcgggtcggtgggttcggggatggcgaagtattcgagcagacgcttgcgaaccggctcgatatcggccttgtgcccggcggccaaaaagtccagcaaacggtcgaaagcgtcttgaatctggccaccgatcatgtcgatatcagccacagccaactgcgcttccacatcgtccggcgctgcggcggcagcggcacgcacgtcacgtacatcagcggacccggagcgggccagcaacagcgccttcgcacgttcgcgggcggccagtgcatcggacgggtcggattcgagcacgcgctcgtattcggcggcggcaccggcgtaatcgccctcctcggccaaacgatgggcttcggcatgctccggcggcacctgctcagcacccgcgccggcaccggtggcaccagcgctcttggcggcatcggaatcaggatcacccgagtacggcgcggtaccgttcacaccagactgcgcggcggcctgaatgatcttcggaatcacctcgtcggtaagttgcttgagctcgtcgtcacccggaaggccctgcaacagtggcatcggacggccggcaatcaacgcgaacagtgcgggcgcgccctgcacctgcaacgcttgggcaatcgaaggattggacgagatatcgatacgggagagctgaatctggccgttcagggcgttcaccgcgtcgcccaacgcacgggccatcgggaacaggcggtcatcggtcggtatccacaggagcagcaggatcgggaaggtcgcagaagtctgcaccattgcctggaaggtgttttcggtggtgtcgatcacgtacccaccagcggcaggagcgccacccgcctggccgggctcggccttgacctgatgcttcagcgcctccaaatcgacggcgcccgccaatgagactcccggattgaactgctgctctgccataatgcctcccgattccacgcgattcgcgtacaacaacaatcacatttgctgacattgattgtaatgccgattcccaccacgtagggattcttccactacgcggtgaaattcccaccacgtagcaaaacgcccaccacgatgtgactcaaaacggcaccattgtgcgaaaggtaaaacttaccgacatcgtggtggatgaatcatatcgtggtggggcgttaaccgcgcggtgggtggcggcaacaattacagcgcttcgacctttaccggctgacggtcggcgcccacggcggtgatttgctcaccggagcttgccaacggaatgtacaaggccaccacgttcacatacgtgaccttcatggtgctggtgtacttgtcgctattgaacagcgccttctcgtcgtcggaagccggctgcgattcgcggccatcccccgccttgcgagtccattcgccgttaatacggccaaccaccaaatcaccggcaccgtctgcagcacgcatcacccacatctgttcaggcacaacggtgaatttctgctcctgcgtaccgttgttgcgttgcataccttcctgcaccttggccgtggtattggccagttcctggcgcagcaaatcgtctgcgaacttggaagcgtattggctcttggagccgttctgcagcacatcggcgtattgggtcaaggcatcggcgggagtggccaccagcttctcatcctttgcagtgcccatctgcgagccaatagtcggaatctcgaacttcggcagcttggccccctcaaacagtcgagccatggccatcagcttgtaattctgctgggcggattcctgatcgaagaccagcaaacgcttggactgctgatcttcggtggtggtcgtgatggtgaacaccgagcgaggccatccgtcgtccatgggaatcaccgtctgggcgatgtccttgggaatggtcgcgtatttggacataccgccgccgcgctggttgatcgtggtctggctgatgcgaatgtccagctggggcccgcccataacggccgcatatccatcgggattcttggcctgatcggcttcatcgatcgtcttgagaatcttcaggcgaatcttcttctcctgtgcctcggtcaaatccggcgcaaccttggtggaggtatcagcagccggcgtcggcagccggccttcacaggcggtcaacggcacgaccaacgccacgcaggcgagggcggccacacacagtttgttccatcgcttgttcatcagctttcctcctgtccgtcatcggccgagtcgtctccggtattgacctcttgggccaagcgggagaagtaggcctgcagttcgtcaggggtgattaccgaagtcgattcgttatcgccggcgctgaagccggtctcagcgccgctctcggcaccagtctgctggtcggcgaccaggttacgtgaacttgggtcgatgataaccggtgtttcggtggcttcagattgcgaggacgcacggcccgaacgccgatttgtggcgtggcggcgacgattacgtcgacttgcaccatccggcttcccggacactgcgatgctggcgggtgcctcttcctcaattacggcgcttgccgtgccttccaccatgcgcttgcggcgcttatgcggcggcatggcgaacacggaggcgcacaatacggccagcacggccagcaatccaccggacagatagaacggcatcgcaaagtccggcacttcggagcgcacccagtgcagctgcaccttggcgttggtggcattttcacccaaatccacaatggccaccgtcgaggcgccggtcttcttgctctccagcgaaacggacccggtgccgcatttcacggcagtccacatatcggaatccttgaacgccaccgcgtcatcggcactggcaggcgctccctgactcgtgctgcttcccttctgggtgctcagctcgctccatgacgccaatccggtgatacgggtataggacttctcggacgcgacccatccggcaacatccttggacggacccaacgccacgcacgcctcgtcctgagaggatcccgagtccacggttatcgtggcgttctgatccaacaaggtcagcacattcggatcagtgacggcataccgggagccgctcatggttgcggaagcggtgatttcagtggagggcttccatatcgtggtattcatgtaccccaacaccacagccgccacggccaatagaccgaagataggcgtcaccactccacgcatgatcttggcatgacgggatggacgcttggcgcccttatccggtcttgtagtctgttcttcagcactcataacttaaccattctacaatcttcacctgtttattacctaggagcgcagaaaatcaaggttcaccagtagggtggtgtgtcatgcgtaagtctgttaaatctatgttatcccctctcggcaaggccgttgctcttgcctgctcgctggcgatgtgcgtatcgctggctgcctgctccagttcgagctcggactcgaaatcctcttccggctcttctgacaagaaggggcaaattgccggcgtgaccgccaagggcaagctcggcgagaagccgaccatctcctttaatacgccgatgaccgtgtccgacggctcctatgtggtgctgcaaaagggcgatggcgacgtgatcgaggagggcgaccgcgtctgcgcccaaggcatcgcgctcaacgttaaagacggcaccgagctcatggacacctggaccaagaacacgccggattgctcgctgaaggtggattccaagaccctctcctcgacctactacaaccagatcaagggtgccaagatcaacaccacgatcggctttggcgtcaacgctcaggattcgtccggatactcttacattttggcgatgacgtttgtatccaagtccaaggacctgaagaaggccactggcgaggaagtcaaggatgtgccggccaatctgccgaaggtgacgcgagccaagaatggcaagccgtccattgacatgaacggtcagggttcggttgattcgctgatctcgcagacgctgatcaagggtaacggcgccaagctgaccgacaagaacaccgtggtggtcaagtacaccggttggcttacggatggcaagcagttcgattcgtcctgggatcgcgattccacaatcgacgccgatctgttcagcgattccagcggccagcatcaggttatcgagggctggcagaagggtctggtcggccagaccgtcggctctcaggttctgctggtgattccgccggatcaggcctatggagataaggagcaaggttcgattcccgccaactccacgttggtcttcgtaatcgatattctcgccgcgtactaaa

SEQ ID NO: 383 - DNA, 4947 bp, Unknown
  R42_10m  MAG No. k141_42488
acggtctccgggttgcagttgaccatgatggtgtcatagtccttgccaagctcctgcacggcgtgcacgcacgtgtagtcgaactcgatgccctggccgatgcgattcgggccggagccgaggatgatcacggcctcgcgctcgcgcgggcgcagctcggtttcgtcggcgtagcagctgtagtagtacggcgtggcggcgtcgaactcggcggcgcaggtgtcgacggtcttgtagaccgggcgcaggccgtaggtccagcgcagctcgcggatggtgttctcgccttcatcgcccaagccacgcaggtgggccacctgcacgtcggacagaccggcgagcttggccttcttgagcagcttcggggtcagggtctcggcctcgcgcaccgtcatggcggtctcgttgatgaggaagatctgcttcaggaaccacgggtcgatcttggtggccgcgaacacctgctccagcgtggcgccgccccagatggcgcgcatgagctgcaggtaacggtgttcggtcggggtgtggatggcctcaagcagttcggccacttcctcggcggacggcttctcgccatcccagttgaagcccatgtggcgcttgtcgatggaacgcatggccttgccgagggactcctggaagttgccggccagggccatggcctcgcccacggacttcatggaggtggtcagggtggggtcggcgcccgggaacttctcgaaggcgaagcgcggcaccttggtgaccacatagtcgatggtcggctcgaatgaggccggcgtggactgggtgatgtcgttgcgaatctcgtcgagcgtgtagccgagggccagcttggtggcgatcttggcgatcgggaagccggtggccttggaggccagtgcggaggaacgggagacgcgcgggttcatctcgatgacgatgatgcggccggtcttcggatgaacggcgaactggatgttgcagccgccggtgtccacgcccacgccgcggatgatggcgatgccgatgtcacgcagcttctggtattcgcggtcggtcagggtgaagcagggggccacggtgatggagtcaccggtgtgcacgccgaccgggtcgacgttctcgatcgggcagacgaccacgacgttgtcgttgcggtcgcgcatgagctcgagctcgaattccttccagccctcgatgccctcttcgatcaggacttcgtcggtgggcgagtaatggatgccggcgccggcgatgcggtgcagctcctcctcgttgtgggcgatgccggagcccaggccgcccatggtgaagctcgggcgcacgaccagcgggtagccgaacttctcggcgatcttgtcgacttcctcgatgctgtgggcgatgtcggagcgggcggattcggcgccggcctcgtcgacgaccttcttgaacagttcacggtcctcgccacggtcgatggcttccagggaggcaccgatcagttcgacgttgtacttcttcaggacgccggcctcgcccagcgccatggcggcgttgagtgcggtctggccgcccagggtgggcagaagcgcgtcggggcgttccttggcgatgatctgctcgaggatcggagtggcgatcggctcgatgtaggtggcgtcggccatctccgggtcggtcatgatggtggccgggttggagttgacgaggatgacgcggatgccttcctcacgaaggacgcggcatgcctgggtgcccgagtaatcgaactccgcagcctgaccgatcacgatcgggccggagccgatgaccatcacggatttgatgtcggtgcgcttcggcatatcacttaccttccttggagttgttcttcataagttcgcagaaacggtcgaacaggtaggccgcatcgtgcgggcctgctgcggcctccgggtggtactgcacggagaatgcggggatgtccacgcactgcaggccttcgaccacgtcatcgttcagatcgatgtgggagacgagcaccttgccgtacttgccgttttcaaacggcgcgtcgacctgcttgccgatcggggcatcgaccgcgaagccgtggttgtgggcggtgacctcgaccttgccggtggtcagatccttgaccggctggttgatgccacggtgaccgaacttgagcttgtaggtgccgaagccgagcgcgcggccgagcagctggttgccgaagcagatgccgaagaacgggtagccggcgtcgagcacctggcgcagcagctcgatttcggggccggcctgttccgggtcgcccgggccgttggagaagaagacgccgtccgggttcaggttctcgatttcggcgaaggtgatggtggagggcaccacgtgcacgcggcagccgcgctcggccatgcggtgcggggtcatgcccttgatgccgaggtccacggcggccacggtgtacagcggctccttgccttcgtactcgccgcatggctcgatggtgtaggcctgcttggtggacacttcgtcgtacaggctcaggccctgcatctgcggtgtgttcttgacgtcttcgagcagctgctcgatggtcttgagcgcgccggtggcctggtcggtcagggcgtcgccggagaagatgccggcgcgcatcacgcctgcggaacgcaggtgacgcaccagcttgcgggtgtcgatgtggctcaggccgacgatgccgttcttggcgaggtcgtcatcaaggctgccttcggcacgccagttgctcacgttcggagagggatcacgcacaatgtatccggcaacccagatgcgggaggactcagggtcttcgctgttgacgccggtatcgccgatgtgcgggaacgtctgcacaacgatctggcgatcgtagctcggatcggtgagcgtctcctggtatccggtcataccggtggcgaagacgatctcaccggtcgtctcaccgagggcgccgtacggctcccccacatatacctgtccgtcttccaaaacgaggactgcatcgtccttgtcatacatcggaattgcgatggtcccggactcgttctggctcaccaaaacccccttatgtttttcgggtattcgtaccaaggttaacggccagcgcagactcacacgccgttgggcgcaaagtctcaccccgctggcggggctgtcggcaaggtgccgacttgagaatgtgtggcgacacaagtgtccgcccatgaaaaagcctcccgaatggggaggctgaacaacaaatgactaatcgaccgtcggctgaatctcagcggacggggcagcgggctcgtcggatgcaccggacgaatcgggcgaatcggaaacatcgccctcatcggtcggctcggatgcggcggcatcggaatcggacgattcctcatcggcctcttctgccgcggactccggtgccggtgctgcgttcttggcggtgcacactgcagacagcaggccatggatgaaagcgggcgaatcgtcatcgcacagggtcttggccaatgccagagcctcgtcgatggcgaccttgtccggcacatcatcgttgaacagaatctcccaagcggcgatacgcagaatgttgcgatcgaccacgcccatacggcggaccttccaacccgtggagtgttcgtccagggtcatgtcgatctgacgacggtgctcggccacgcccttgacgatttcaatggcatagtcgggaagcggggtctgggcaccgggatgtgcgatgcgctcgtcaagcagggcgagaatatcctgacttttttcgtcggcttcgtacagggtgttcagagcccttttgcgcgcggtggaacgtgccatactgctgctgtcctagtcctttatacggtcggtcgtctgttgaggatgcggagatcagttgttctcgcggccggtgtaggaaccatcctcggtgttgatcttgacgcggtcgccctcattgatgaacagcgggacctgaatctcggctccggtctcaacggtggccggcttggtgccggcgttggagcggttgccctgcaggcctggctcggtgtgggtgatggtcaggaccacggagcccggcagatcgacgctcagcggggtgccgtcgtggaaggagaccaagcagtcagtgccttcgagcatgaacttggccttgtcgcccacgagggtcttcggaaccatgatctggtcgtaggtggtcatgtccatgaacacgaagttgtcgccgtcctcgtaggagtactggagggtgcggttgtcgacggtctcgaattccatcttcatgcctgcgttgaaggtcttgtcgacgatcttgccggagagcacgttcttgatggtggtgcgtacgaaggcggggcccttgcccggcttgacgtgctggaacttcatgacggtccacagctgtccgtccaggttcaggacggatccgttcttgatgtcgttagtagtctgtgccacgttattcacctatttcaaattcaaactagcttaggcaaagcccaaaaattgccttggctattatgccacaccgggtatacaggaagtgaacgctggggtttcccacgtgaccccgactagactggatgaatatgcgatccttcttcgaagccatatccgtgtcctgcgtcgttcccgcgcaatcaccggcggacaacgaacgcacggtgttcgacaacctgtccttcagcatggaacgcggcgagatcgtcgatctggtgggaccgtccggctccggcaaatcgagtctgctgaccgcatgcgcccgactcaacccgcatgcgcacggcacgttcgcccttgaaggcaagcgcagcggcgagttcacgccgcagcagtggcggcgggatgtcgcctacctgccgcagaagccgattctgacgggcaagaacgtggccgaggcgatccgcctgccctggacgctcgcgattcgcggcaagggcggcaaggccgagcagctgctgcccgacgagcgcatccgcacgacgt

SEQ ID NO: 384 - DNA, 4573 bp, Unknown
  R42_10m  MAG No. k141_44327
ggcaccttggccgccatgcgggcgggcgacggacggctgaccggcaacggcagcggcaccgttcgcggtctgccccggagcggcagcggcggtcgggttcggcgcgacacccgccgccggagcattctgccgcgcagcggggtcctgccccttaccttccttgccctccttgcttttcttccgcgtccaagcgacaaacacccccacgaccaccgcgatgatcagagccagagaattgttcagattcagggcgttcaggatgaagtaggtaacgatgaaggcaatgatgccagcgatcatgatggatgttccttcttccttttccttctcttgtctcgactcgtccctgactcacaccatcttgccgcaggacgggcactccaccagcccctcgggcggggtgaagagcatagcctggcagttggggcacctgcggtcgcgatacatcagcttctcgcgcatgagctgcatggtctccttggtggcctcatccgcctgggactccaccaggttgcgcatgtactgcgccgaggtgatataggtgaactcacggttgcgccgcgcacaggccaggaagttgatggcggcgaagatcatcgggatcaacaccatcagcaggaacccggcaatgcccatgagtttgacgacagcctgtacctgccgcagcatccgtccaccgtcggcattgacatccacgggtatcgattgcagcatggaaaccagccattggtcgaatacgccgccccacagcagcttttgcagagaaacagctgccaccacaatcagcgggatatacagcaacgtaacgatgccgtagacccacatcgtccgacggccgcgttgacgaaggcgttcctgcatctggtctggggagagggcggcttgcgccttgcgtgttgcggttgccatcaccggcctccttccatgccgggcaccacatgcgatgccacgtcgtttgcgtcgatgctgttgccgcaggccgggcagacgtacggccggttgagccgcgcagcccctgtggccatgcataccgggcaacggacggccactttggccccttcggcggcggaggctgcggcctgcgcggaatcgacgcgatcgctggcctcaccttgggagtcggccacgatgtctgctgcggtcaacgtgccgccacaaccaaggcagcgacgcgaacggtcggcgtagccgatgctcggcttaccgcagcgcgggcagcggaattgcacgatcgaggtgtcgccccagatcgcacggccgtcaaccgagtggacctgacgaaggctggtattgactccggaggcggctggggcttgctgcgtgggagactgaacggaagacgacgcaccgaattgcgatgcagctgacgcggcagactgcatgatggcctgagcaccagctggcgtagccgccggagcttgaccgacaccgccgattgacggggcaccggcgaccaccggaccgcccgtcactgaggattcgggcttctcacctcgggccagccgcgcggcatcgagatgctcaagcgccgtgcgcgatatgtcggtgccacaggccgcacacttgatggcatgccccatgggcaggaagttccggctttggcagaccgggcatcgcagcgcgacgccggccgtggaatggttgacgcccacggaacggtgcatatccaccgaatactgggcctcctcggccgcgcgctcctgcacgcgcaccgcggctccctcgcgcatctggaccatgcgcgccgagccccgccactcatcgatcacaacatacgccagcagggccacgccggcgaggaacagcagcaggttccttgcggagaactcggagaacaccgcgctgccggagcttgccagacagatgccgaagaacgggatcacgaagtagaggcccttgccgcgcacaccggagacgcgcgccatgcccttgatgatgccggcgatcagccagatgctcagcacgggtacgccgatcagcaggaccaggatcagcaggatcagcaggacgttctccatcagcggccgccctttccaggcgcggcagccacgggcgcggacgcctgattcggggccggcatggcaacggtctgtcccgcctcggcggcggtatggtcgagcgtctgcttggtgcgccgcatcgtggcgtcatagttcatagtagcgttgatgccggcactggcttgctgccacgaggtgaagttgtagtcgtcggcgatgccctgcgccatggtcatggtgacgaacacccctagaccggtgccggcggtcagcacaatgaccggaacccagagattatccagcaatgtcaacgtgttggcgaacatggtcgcgcttttcgggtcgctaaacacctcggtgtagtcaccgttgaagaagatgtccacggccttgaacatcgccatgccgaagatcatgagcgcgttgtcgaacagcagcaggatccacacgaccgacgcgatgcgcaagaacagccgtttgatgaacaggatcggcatcagaagccgccctgctgcgacgtgtaccggttcgcgctttcggcgacgagcttgtcgttggcggcgtcgttgtgctcctcgaagaacgaggtgtacagcgcgatggcggccaccgctagcagcacgatcaactcaaggatcatcgtgacacgccaccagccggtgttggaaaggaacagcaccacgatctgcaccacgtagttgaccgccagcgcgatgagcaccggcacgcgggtcacgtagtcacgggcctggaacagcatgggcaacaggaacagcaggccgctgagcgtcaggcaaacgaacgccacccaatacgccacgttgttggcatgcgggatgagcagcatgatgatgtccaccaccacggtgacgagaaccgcgaggatcgcgtgttttttgcccttcatgattgtcttctttcttttctgttgattgagattggctgatttggttgcgattggttgacaccggcatcgcgcggtcgcgacggggcagcgaagggccgcgatgcgaaaagccgggttcgatgccggaatgcggatacggcgcaaccgtcatcggacccggccgaagggtcagagctgggagaggatctcctgctgtttggccgtgaactgctcgtcggtgatcaggcccagatcatgcagttgcttgagtttgctcagcacctggaccaggtcgccggccggctggggctgggcgggctgaacgggttgaacggcggcagccggctgggtggagactgcggactcggattgcgtctgcgactgagcgggctggggctgcgctgccgcagcggtcggattcaccggggtctcagtggccggagccacaggactaccggcgggttgagcaggctgagcaggattcggctgagtctgcccagcagcctgccctggctgttgggccggcccggccatggtcggcgtcaccagtgaggagaagtccggcgcgcccatcgcactgatcgccccaccaagccccttggcgatgacgccacccgcgccaagccccacaccgaggccgatgccgccgttcatcaggtcggagccggaaccggtgttggccgctgcggtcttgagcacatcaagcgtatgctcctgctggaaggtgtagccgcgctgccgctggtcgtaggccttggcgtccgtcatcgccatccggcctgcggcctgcttctgcgtgacatacagattggattcggcatcagcgccgcgattctccatcatgttggcgcgtttctcgtattgtgcccattccttgctggacttgtcaatcaccagctcgttaagacggaagtcggagatcttgaggccgtacttatcctcgattcgttgcaggacgccgtccacctgcaactgctgctcgatggcggcgcgaatctcgctcgtgcggctgtcgatctgttcgatgggaagcttcatcagctgcagtaccttgccgatgatggtacgcgcggattcattgatctgctggcgcaccattttcttgacgtcgtcgcggctcacctcgtcatggcctgagacgaactggttgaggaacgcctccagatgcttggggttgtttgcctgaacctggggatcgtcgctgttctcataatccaaggcgatggtgtactggccgttggcaccggcgggaatcgtcagcgcggaggaccgtggaccgaacgccagccccggcacaggaacgccgatcggccccacaccccaaagcatgttcatctgatcgggcttattgatgaagtacagcatcgaggaatacgggtccacgccgccggtcaccatcttcgtcagtccggtgaggaagggcgcgctattgccctcgaccttgtgccggccttcgctgtagacggcggccacgcgaccggacttcacgaacaccgcaagctggtgtggcatgacctccagaatcgtgcccggcttgagcgcggtgtttgggtgcttccatgccagaacgttcgcagtgtccgcgccgttgtaccgcactacgtcgatgagatgaaaagccataatcgggcccctccccagtatcttccaatcctcgcatcgtcacggcaaactgtacccccccccc

SEQ ID NO: 385 - DNA, 17761 bp, Unknown
  R42_10m  MAG No. k141_45291
ccgacctgagtctggtcgtcaacgaccctgtgaccggcgaacccgtcgaacccgatctcatggcccttctgagggatggctgcttcgacttcgacaggagccgcgagacgccggaatggcagggcttctggaggtcggagcacggcatggtggaccgcgacgcatcggggctcgtccgcagatggacgccggggcacgggttgggcgcggagctggtgtcgcccgccaaacgcggggcgtggttcgatgtgcccgacgccagcttggcgaaactcgccgggcaggagtgccgggtatgatgaaaccgacccgcggcaaagggcaatgcaagctgaggccgtgggtcgcttcacccccatagccaattgtcatatacgggtttggctacctttggcaggctccggtccaaaccgctgattagcatggcttcaaaccgttgaaataaagccattcctgaagtccggtcaaatcactgtcgcacagcgtacattatcggttaatagtatgtggtgattttagccgaaccagtagtatctagctgcggattagcctcgccgcagagaatcggctacttcgcaacatcatccttattccggtgagaagcaacgcccaaacgcttgtccatttcggtttctgaggcgttgcgtgcctgcagatacatggcgatgagttccagcagcaccagcacgaatatgatgattgctccgggcaattgcgcgtggtcgtagaacgcgagcatgcgagcatccatcaaatccgctgtaaacgtcaacacgggaaacggaatcagcgccgccgcaaacgacatgaaatgcgttttcaccatcgaccagtcgaccggatcgaccggcggtcgccggcgtttcggcgtgaacagatggcctcggctgaccgttatagtgatgatggacacagcaaagatgacggcgaccatccacagaacgcccggcaacaatccgacaacaatcccgttcacccggtcctccaatcagtcataataatcaccgcaacatataaaaacataagatggcaggcaacaaaagcaacacatacaacaaagcgacctgccgaccaaagccggcaagtcgccaacaaccatacatgtatcaggcggttgcgcgttgcaagcgctgtgcctcgagcttcttgcgcatcctcatggcagtcagttcatcaatcgggcggcccgtggcagtcgtcagcggcttagcctcaagatcaatatattcttcctgttccaaggccgtctcaatctggtgccacaacgaacccaccgacacggcgaacactgccttaccgctttgcaacagttcgagcatctgttcgctggtagtgcattcgtgcacgttttgaccatcgcacatgatggtcacattggccagctgatcggtgctacgttgagtcaagaatccgatggccgccgtcacgttctgcagattcacaccggcatcaagcagcttcttggatacagcgagaatcaccacatccttaaacgagtacagtcggcgtgaaccggagccatgagacggcgtgatggacggctcaacaatctgcttgcgtgcccaataatcgagctgtcggtacgtgatgccggccaccttggaggccacagtgccacggtagccgcgcttgatctcctcagtatcgacattggagaacaactccccctgaatcgcgtcagcgttcagattctgacggtcctcaagcgaaacatgaagatgcagccctgtctgtcccatggcactcccctaactcatgcgtgtctcgcatgtgactcacactggtgtaatcacatgattgcaatttctgcaatcagtctaaccccgtgctgggtgtggactattgggaaataatggcggatttcgtgaagaacacgagacggaatttaccgatcatgatttcgtcgccgttcttcagcgacgcctgatcaacacgctgacggttcacgtaggtgccgttcagacttcctgcgtcaaccacaaagaactgaccgttgaccctgcggaacacggcatgctgacgggatacggtggagtcgtcgagcagaatatcagctcgcggatcacgaccgacggtgatttcatcctcgtcaagcaagtaacgagaacctgagaccgctcccctggcggaaatcagcaatgccgttccctcggacaatctggtgatggtgtccagatcctcttgagtcagcggtcgatcgccggtggtggtaatgggcagtacattaatcgcgggcaggccgataatggtggtttcgcctgcgctaggaatcgggttggtcataatcccctattctaccgtctttgcatactggttttgcgtagcttcgcgtacttcgtcgataatgatgctgtcagaaggctgcacgttgacgttggatccgtatttcacctggagctgagcgcccacaccgccggcgatatcgactgcgttggacagctcctgcggattgccgatggccttcaccgtgtatgtgggcttgatggtggtgccatccacgatcaagccttcctcggcgtcctgaatgtaggtggaggtgatgacgcgcacgttattgatggcgattacctcggcgccggcattgcggagttcctcgatgaggttgaacatgattgaggcgtccactttagtcgtcgagcctcgtccgatccggatggtcacgccctggcccttcgccgggagtctgccggagatcaagccgctggtctcttcgttttgcttggcgatcttacgcgcctgctcctgctcgttagccgccgatttcagtgagttgagctggctgttcaactgggttttacgctgctcgagattcgagatttgcgtattcgactcgttcagcagccttaccagttcgctctcgtccatcgtttcgtacgtggatttagtgttattgatctggctcatgtaggcgaaacccagcagcgcgcacatcagagcaatgagaatcgaggatagtagccgtgatttgttgctggcccggttgagatccttccggggcttcttgcgcaccgtggggaacgacccggtttccatccggtcgttgaccttgtcttgtgcatgctggtcgcgcattttctccagcatgttgtctgattgtgctttacgtgccatacgtcagtacccttgtcagcctcggaagatgaagcgtctgatcgcggacacgttggagaagatgcggatgccgagtacgacgatgacggccgtctgcagctgcgaaccgacgccgagctggttgccgaggaacacgagcagtgttgccgtcaccacgttggcgaggaaggagatcacgaacacgcggtcggagaagctgcgctcgaaataggctcgcgcggcacccagcagggcgtcaagagcagcgaccaccataatcggcagatatggctgcacgatgatcggaatgtccggcttgacgaacacgccgatgacgacgccgatgatcagtcccagaacggctgccattattcattcctttccgcgtacttcacttcgccagtgactgctgcctcaagtgtaatcgaattggatttgctcacctgcgggtagataccggcttccttgaaggaatcgtaaagacttgcaagtctcttctcccccatcgcttcggccaaggcgctcttatcgcctatggcttcaatggtataggggctttgtatcgcggtcatgccgatgagaatatgcccgccggccttgcgtatcgaggtttgcgcgccgagcctattaccgttgatggcaatggcttcggctccgttttgaaacatcagggagaccagttgttgcagatccagatcggtgatgactcggatgttcgtggaggtgccgactctcgtcgaggaggattgatccgactggcttgccgcgattggatcggccagcgtcatggtgattccttcgccttcgaccaccgtggcaccattgaccatttcgtcttggataagcgtgtcgcttttcacgctgccggagattttcttggactgttcgtcaacttgggatcgcaaattattgacgtccgtggtgagttcgtctatctgcgagttgcgattctccaattgcgtggccaaagtctgccgtacctgcttacgcggatcggattgcaactgttgcacgaataggctgcaggcaaagccaacgccgacgcagatgatgaatacgacgatgcgattaaaccagatggagaaggtcgaacgatgctcatggaccagtcgtgagtcggagaacatcggatccatcggacgattgacaagatcatcgatgagctgaagcgaatcgtcgttggttttacggcgacgtctggtgcggatggcggcggcgtcatccggggaaagcgcatgatgcgattccgcgcctcggactgagtgggagaacacggcgcggcgtcgtaccggctcattctccttgggtatggggaacgagaccggggccatggcctcaagcgccatacttctcccccagttccttgcgtagcaatccgacgccctgcttggtatagatatatccggcgagccaatacatggcgatgccccagatgccggcggccagcgcggcgatgtagagcaagtggaagaacgtactggtgcccaaatcggcgaaaataagactgacgatggaaatcatcagcagcgcggtaccagccttgcccacgaaatgcacgggcagcggaccataaccgtactgggcaagccatagcacctgaatcgccatccacagatccctcagtcccacgataatcagcatccaccatgggatgatgccggcgacgctgagggccagaatcgagcagaaaatgagcagtcggtcggcgatcggatcaagaatctgaccgatcttgctcacttggttgaatctgcgcgcgatgatgccgtcgagtccgtccgaagccgaggaaatggcgatcagggctagcgccgcaatcacctcatgcttggagatcagcacgctgatgaaaggaatcgagatgattcgcagcgcgctgatcaaattgggcacggtgaaatagatgtcacgtgcttccggactgtatctggcgttgactttctggttggtcatatcgactaacagtctacatgcgggaggcttgcagagcggtaacgatgatgccgcgtgcgccgacttcgtacaaatcatccatcagctggttgaccttggccttgggaaccatgactcgcacggcgttccactgtttgtcgtgcagcggggagatcgtcgggctttcaaagccgggggtcacggccacggcggcggcgaccttgctgatcggaatgtcatagtccatgagcacatactgatgcgcagtgagcacgccttgcagacgacgggtcagcacggccagacgcggatcctgctcgttcagacgcggcgagcgaatcaggcaggcttcggagtgcatgagcggttcggcaaacacgcgcaggccggcgttgcgcagggtggtgccggtggagaccacgtcggcgatgaggtcggccacgcccagctgcacggaggattcgaccgcaccgtccaggtggatggtctcggcctggatgccgtgctcgaccagatagtcgtgtacgagcttatcaaatgtggtggccacgcgcttgccctgaacatcctccagagtggtgatcggggattcgttcggtgcggcgaaacggaaggtcgaggcaccaaagccgagcggcatgtgctcgagcgcggcggtaccggagttcttgagcaaatcctggccggtgatgccgacgtcgatggcgccgcggcccacgtatacggcgatatcgagcggacgcaggtagaacagctcgatgccattgtcgggatcttgcacgaccagctggcgagggttggtgcgcagacggtagccggcctcggccagcatgttccacgcgggttcggatagcatgcccttgttgggcactgcgattctcagcatttgcgttcctctcacaggtgcttatagacgtcctcaagcgtcaggccgtgcttgatcatcatgacctggacgtggtagagcagctggctcatttcctcggcggtgcggtccgcaccctcgtattcggcggccatccaggtctcgccggcctcttcgatgatcttcttgccgatgaagtgggtgcccttgtcgagctcgtcgacggtcagggagccttcggggcgggtctgggccttttcggacagttcggcgaacagggattcaaacgtcttcatgtgattcagattcttttcttgcggttatggatgaaaggtggattgcggttcaggcttggagctcaggccttgaacgcggcctcggccttggtgcggatgtcgtcgatggcttgggcgggattctcggcgccgtacacggcggaaccggcaacgagcacgtcggcgccggcctcggccacgatgtgcgcggtcttggggctcacgccgccatcgacctggatgcgggtcttcaagccgcggcgggtgatctcatcgcgcaggcggcggaccttggccatctggttgtcgaggaacttctggccgccgaagccgggctcaacggtcatgatgaggaccatgtcgaactcgtcgaggatatcgaagatcggctcgaccggttcggccggacgcacggcgaagcaggccttgcagcccatctcgcgcagctgtcgggccagacgcacgggggcgtgggtggcacccatgtggaaggagatggaggcggcgccgagcttggcgtattcgggagcccaacggtccgggtcctcgatcatgaggtgcacgtcgaccggcagatcggtgacctgacagatgcggccgacgatcggctcgcccagggtcaggttcggcacgaaatgatggtccatgacatcgacgtggaccaggtcggcgttggcgatggccttgagatcacgttcgaggttgcagaagtcagcggacaggatgctgggtgcgattgcgatattgctcatggtttcctaccttatctgtgcaatgggacttggggtcccgtgtttcgcgctgtttcggcgctgtttattgtggtgtcacttagtgcgcttggcctgcttcttctggcgaagctgttcctcttcgatgctctggcgttcgagctcgtcggcggtgaccgccgcaagcccgcgcgcctgcgccttggggtccggaccgtactggtagagcacgacgaacaggatgcagccgagcacgaagacgatgatcgcggtccacacgttggtcctcaggcccaggatcaccgtggagtagttgatgcgcacgttctcgatccaggtgcggcccaggccgtaccacatcaggtacatggcgaactgctggccggccttgagccggtcggcgagcttgtggccgaggtagatgatgagcgcggcgccgatgaggttccagatcatctcgtagaggaacgtggggtggaacagcgtggttctgtagtccgggcattgcgcgccggaatagcagatttcggatttgccgatggcgtccgcgtcgttgagcttcaggccccacggcaacgtggtgggccagccgtagagttcctggttgaaccagttgccgagtcggccgatggcctgggccacgggcagcgcgggggcgatggcatcggcgaagatcgcgaacggatagtgcttgtggcggcaccacaggaacgccaccaaggtgccgacggagatgccgccgaagatggccatgccgccttcccacaccttgaggatgttgaccaagttgccggtgggcgggaagtagtcggccggcgtggtgatgcagtggtagaggcgcgcgcccaccagcgcgcagggcacggtgacgagcgtggtgtcgagaatctggtcgaaggtgccgccgtaccgcttccaacgtgtggtgaggatccatacggccacgcagatgccgatcaggatgcagatcgcgtacatgtggatagtgaacgggccgatctcgaacttggagaaggtcggcgagggaatataagccagattcatcgtgcctctacttgctggtgctcatggtgtgtccacgcgcgggttgtgcttgatgctctgtgactaccctaccgtgtcacggcacaacccgcgtgaggcgcaccgggtgttcaccgggcgttgtggatgccttcggccagttcctcgctcttggcggcgagcagcttcaagccttccttcgggtcgcgtgcggtcttgtcgtcgtccgcgagcatggtgtgcacgagcgcggagccgacgatgacgccgtccgcgtaggagccgaccttggcgccctgttcggcggtggacacgccgatgcccacgcacacgttctcggcaccggcctgacgggtgcgctccacgagcagttcgggcgaggcgtcgatggtggcgcgttcgccggtgacgcccatgcgggcggccgcgtacacgaagccgcgcgcgttgcgggccacggtttcgaggcgctcggtggacgagtccggggagaccaggaagatgcggtcgagtccgtgacggtcggaggcttcgatccactcccccgcctcgtccgggatgaggtccggggtgatgaggccggcgccgccggcgttctcgaagtcgcgggcgaaacgctcgacgccgtagtggtacacgaggttccagtagctcatgatgagcggcacgccgccggcgttggccacggtctcgacggcctcgaacacgcgcttgatggtctcaccgttgttcagggctatggaggcggcagcctggatgaccgggccgtccatgaccgggtcggagtacggcaggccgatttccacggcgtcgacgccgtgctcgaccattgtcttgaaggcgtcaagcgagacgtccgggttggggaagccgtagggcaggtagccgatgaaggcaggcttgttctcggccttgaacttggtgaacatagcgaccgacttgctgggcttgtggctgatgcccagcggctggccggacggcgtggttgcttcgttggtcataatcaacaatctcctcttcttgttcaggcgacagtattgccgtgggcgccggtcacatcgagcgcggcggcctgatcgtcggtcaggtagccgaaccacttgccggcggtggccatgtccttgtcgcctcggccggagatgttcacgatcatcacggccttgtcatagcccttggctttcagatcggcggcggccttgtacgcgccggccacggcgtgcgagctttcgatggcggggatgatgccctcggtctggctcaggtcgcggaaggcgttcatggcctcctcgtcggtggcccagctgtagttcacgcggccgatgtccttgagccatgcgtgctcggggcccacggaagcgtagtcgaggcctgcggagatcgagtaggtgtcgagcgtctggccttcgtcggtttccagcaggtagctcttggcgccctggaacatgccgagctggccggtgccgggggcgaagcggatggcgtgcttgccggattcggggccgttgccgccggcttcgtagccgtagaggttcacgcgctcgtcgtccaggaaggcgttcatcacgccgatggcgttggatccgccgcccacgcaggcgcagatcgcgtccggatggtcgatgccgtaccagtcctggagctgctgcttggcttcctcgccgatgatcttctggaagtcgcgcaccatggccgggaacgggtgcgggcccgcgacggtgccgagcaggtagtgcgtgtccttgacgttggtgacccagtcgcgcagggcttcgttgatggcgtccttcaggatcttgtcgccgagggtcacctcgaccacttcggcgccgagcatacgcatgcgggccacgttcagggcctgacggcgggcgtcgatctggcccatgtagatgcggcacttgaggccgagcatggcgcacacggtggcggtggccacgccgtgctggccggcgccggtctccgcgatcacgcgggtcttgcccatccgcttgacgagcagggcctggccgagcgcgttgttgatcttgtgcgcgccggtgtggttcaagtcctcgcgcttgaggaagatacgggcgtcgagaccggtcttctccttgacaagtgcggcgaagcgcggggcttcggtcagcgggctcgggcggcccacgtaacgctgctggagcgtcatgaactccttgtggaattcggggtcggccttggcttgcgtgtacacgcgctcaagttcgtcgagggcggtgatgagggcctcgggcacatagcggccaccgaactggccccaatacggtccctgatgttcgctgagcggggtcgtttcggatgctttcacttgtgctcctgcctttactagtcgttccactgcaagttcatgatcatcggcggtggccacgccttcaccgaccagtaccgcgtccgctcccgcgcgggcgtagtcttcgacctcgaccgcgccgaatacgccggattccgccaccttgatgacgtcatcgggcagatcggccgcgagttcgttgtatttgttcacgtccaccttgaggttcttcaggttgcgcgcattgatgccgatcaccttggcaccggccttgcgggcgcgtttgatctcctcgcgggtgtgcgtctccaccagcacggtcatgccgagctcgtgcgccaggtcgagcagatgcttgagctgggcgtcgtccaatgcggcgacgatgagcagtaccaggtcggcgccgtgggcgcgggcctcgaagatctggtagtcggtgacgatgaagtccttgcgcagcactggaatgtgcacggcggcgcggaccttgtcgaaatcgtcaaggctgccgaggaatttgcggccttcggtgagcacggagatggcgcttgcgccgcccttctcgtattcgcgggccagcgcggccgggtccgggatgtcggagaggtggcccttggacggggacgcgcgcttgatctcggcgatcaccgggatgccgtcggcgcgcttaagccatcgtgtcgcgtcaatcggagccggggccgccagcgcggccttcttcacgtcctcaagcgatacggtgagctcacgggcgcgctgatcctccagcgctcccgccaccagttcgtccaaaaccgacatggtcctccctttgttggtgttcggtcatgcgccactctaggtcacgccccgtcccgattgccgaacccgtcctacattctgggctattcctcgttggttcgtatcgctacggaaccagagcggccaacaaaaaggaaaatcgccatgaatatcggtcatacggcctgggattgattccattgatggcatagactgggcgcatgtgcaggagattcgcgcttgatttggattgggatgccgtggcctcacagttcgcggtagacgaggatgacgtgcgcgttgacactctgccacagccttcctacaacatcgcacccatgcagaacattggcgtggtggcacagggcaaggatggccgccgtcatctgaccggtgcctattggtcgctggtgccgcgatggagcgccagcaaagtgctgagctaccccacatataatgcgcgtgtggagtctgcgcatgtcaagccggcgttcgccgaatccacaaaatccatgcgagccatcatccccgcttccggctactacgaatggaaaggtcgcaggccgttctattttcacgcgccacatgatgaactattgtctttggccggcctgtactcatggtggaggccgtctcccgcatcgccatggcagctgaccgcaaccatcatcacctgccctgccgcggacgagttcgtcaaggtgcatgatcgcatgcccctgctggttcctcggaatatggttgcctcatggctggaccgctccgttgacggagccgcactgttagattccatgcgggaagcgggtaccatgctttcccggcatctgcaatttcacgaagtcgcgccactgaacagcgacggcaaacgtcttattcagccattggattccgccgaacccatgcgtctgttttgagctcttgcagctggaaccggctatgcagctgtatatgaagacgggtcaatcaacgccccgctgatagctaacctcgtatggccatcagtcaaaaacaggtctcttctgctcgacattggtcgactacgactacttttgcaccaatccgcgcaacaactcgatctcgtcgcgatgcgtggcgggcgtctgctccttggtttcgaggatcatcgggagcttggccatgattgggtcgttgaccagtcgcgtgaaaaacgggatgccgagctggccctccccgatgttggcgtgacgatccttatgcgagtcgaggccaaactgcgaatcgttcacgtgaatcgccttgacctcggccaagccgatcgcctcatccaactggcgcatcacaccgtcgtagtcgtgcaccaaatcgtagccggcatccaacacatggcaggtgtcgaacgtgacgccgacgttcgccttattctccacgccatccatgatcgtggcgagctcatcgaaattgcggccacattccgtgcctttgccggccatggtctccagaagcaccatgacgccggccgcgcgctcgaacacctgattcagtccctcgctgatcagccggcagccggtctcggagccttggcccacatgcgcgccgggatgaatattgatatacacctcctgtccggcctcgcggatggcggtcagcagctcgatgtcctcggccaacgcctcgatcgcgaatgtgcgcttggcctcatccttgccggccagattgtagacgtacggcgcatggacgaccaacggcccatagccctcagccttcagacgcgtaccgaacgccgccgcgccggccgggtcgagcgccttcgaacgcttgccgtacggggaacgcgggaagaacgcgaacgcggtaccgccctcctcatgggaacgttccagcagcgcattccatccgccggccgtcgacaaatgcgatccgataagcaaacccgtcatttcacttccgcctttcgtgagccgtttcatctaccgctatcatatggtaggcagcatcgagtgcagcccgcacaaccgacatgaggcacaaccctctgaccatccgaccatctgaccgaaggagacttaagcatggcgtcagccggcaatcccaaggacgacaccggcctcgaacggaaaatggagtcgcgccacctgacgatgatctccctgggcggcgtaatcggtaccggcctgttcgtcagctccggttacacgattcatcaggccggacctttgggcgcgatcctcgcctacgcggtcggttccttgctcgtctactgtgtaatggtctcgctgggcgagctgtccgtggccatgccgtatgccggcagcttccacatgtatgcgaagcgattcatcggacccggcaccgcattcaccatcgccatcctgtattggctgaactgggcggtggcactcgcctcggagttcacggcggcagggctgttgatgcaacggtggtttcctcattcgccgtcctgggtgtggtcggccgtgttcattgcggtggtgttcgcgctcaacatcatgtccgtgcggctatatggtgaggcggagttctggttcgcgtcaatcaaagtgttcgccatcatcgcgttcattgtgatcggcctgctggcgatcttcggcgccataccgattgccggtcatgattccgcgccgttgctgggcaacttcgtggccgacggctggttcccaagcggtatcgcgccgattttctcgactctgctgaccgtggtgttcgcgttctccggcaccgaagtggtgggcgtggcggccggcgaaaccaaggatccctcgcgtgcgattcccaaggccgtgcacaccacggtgctgcgcctggcgattttcttcatcggctcgattctggtgatggcggccttgatcccctggcatcaggccggcgtggatacgagcccgttcgtgctggtgttccagtcaatcggtatgccgttcgccggcgacatcatgaacttcgtggtgctcacggctgtgctttccgccgcgaactccggcctgtacgtgtgttcgcgcatggtgtggtcgctggccaaggagcggctgattcccgaacgttttgctaggacgaatttccgtggtgtgccggtgtgggccgtgctgttcagcatggcgggctcactgctggcgttgctgtcttccgtgatcgccgcctcgaccgtgtatctggtgttggtcgccgtgtcaggtttggcgacgctggtggtgtggttctccgtatgcgtgtgccatatccgtttccggcgcgaatgggcgcgggatgggcacagcgccgatgagctcggctatcgtgcgcccggtttcccggtgctgccgtggctggccatcgtgatgtgcatcggcgcgctggtgctcgtggtgctcgatgatacgcagcgttcgaccctgtattgcatgatcccgttcgtcgcctgctgctacgcggcttattacgcactcgaacggcagcgcaaacgcgaaaacaacgcctaactcgatttcgaggggctgatttggcacttgccggagatctatctccgtttcaaggggctgatgcccgagtagacaaggctccacaatggcgtaatggcgttgccgcaaagccgtttatactcgcggtttggcgtttgagcagcccctcgaaagccaagtagatgtccccaccggacgaaatcagcccctcgaagccgagaaaccattgatggccgattatgttgtgcccagtgacgcgcctggttttatgctcgaactggtacaataattggagtttgttttttgcaaaggggcattgttatgtacaaggtgttggtgtcgttcgcagacagctaatgcgcgttgactcgtcgcgctaagccgtggtcaccgtttgggcccacggcacttctgttgtgccatttcccacgcacttggtcgaaggctggcgatgggccctgaccaagcgcgtcttcctatccgcgatcatactcggggcaattgtgaacatcgcctgcgtagtcagtatcaccggcgcgcagatcatgttggccgcccgtggcgccaacgcggtcatgatcggactgctcggcacggcaatgggcgtgagtactttggtcggctcgctgttggccaacaagctagtcgatatggttcccacagggaaactgattgcgggcgcgctggcgttgttcgtggtcagccagatgccactgctattcctgcacagctacgcggccattctgatctgccagattctggccggcctgccgttccccgcgttgaacgctggtctgctgggctttctctacggcaagacacccgacaacatgcaggggcgggcttctgccgtatttgaaaccacggtcggcatactgggcgcagcatgcccggcgatggtcggctggctgttgcaacagccagatctcggtttcacggcggtgatggccgtagccgtggtctgttccgtagcgggattggccgtatcgttgtccggcccgctgcgcagcattccgaatcccgaccagtggtcggaggttttcctgtaacgccaagcagcggagcgccggtttatatcaggtcgtacggcatctgacgcttgaccagccagaagatgccgaggccgatgaacaccagcagattgaatccgccactatgccaccacaccacggcgatcagcgtcgccatgcgcgccacatagaacgccacgcgaagccacccttcgcgcggccgggtctctatcgtcatgtgcgtgaagctgccgccgaacgtgcagccgccgcgcaaccatggcaccacgccctcgaagaggatgagcgccgccaggaagaggatcgagccggtccagtcgaacggttccatcgactgccatgagccgttggagcccgagggcaggtttgggcggacgatcatgacgaacagatgcgtcggcatcacggcgaacccgatcagcgtcatgtcgatgatgaacgtgatcagccgcctcatgaagccaggtgtggtggtcggcgtcatatcggcgacccgcgccggaatcaggcgcagcgaaagcatggccagcgcgaatccgatcagcgcgccggtcgtgttccacaggagatcgtccacgtcgaacagacggtaggcgcacgggaacacgcccatgaggccggtcagctgcatcgtctccagaaatagcgacgtggcgaacgacagtactgcggtaaccggcagcggccaacgccatatgcggcccatgatgaagcccaacggcaggaagaacacgatattaaacgcgatttgcagtacggcggtgagaccatcggtacggatgtcaccgatgaactgcaatggattgagctgtggcgtcagatggtgcgcggcgcaataggctgccgcatcggccggcatcggatacagtgtgaagcacagcaggccgagcaggtacagcaccgtgccatacgccactatggccgacgacagtcggatgcgattgtcgcgatgatacagcaacgccagcaccggcaccgtcagcagcatggacacaaacggccacaatgccagcgcgaacgcaaacggttcggaaaagttcttgagaaatcccatcttcaatgctccctgcttcggtccgctccattcggtttcggaccatatctctcgacttctgattccaaggtacggaacatgacggcacgcgggtatcggccatgagagcgaaatcattgggatgaaaggcgattcgtatcattcgcatggatgaggaagatgcaccagttaccattgacgccgacgaggatggcgtggtcggcgccgtgaccgcgcagatgagcgagcgtacgtcgttcatcgtgttggaccagattacttccgccaccgctatgctgtttacggcccagcgcatcgccgccgaagcccatcgccgcggcatccgcattttggttgatggcgcgcacgctcccgcccaactggccgatccggccggcggactgcagtccgattggtgggtcggcaattttcataagttcccgtgtgcgccgcgtggcacagcattgctggtgattccgcccgaaggcggtcaggatggtcaggatttgtggccactgatcgactcgtggggtttcgctgacccgttcccggagcgattcgatgagcaaggcacccaggatttatacggtccgatcgccgcgcccgagtccctgcgcgagatcgagcgactgtggggctgtgatgccgtgcgccggtacatgtccgatcttgccgattacgcggagcgtcgggtatccgaggcggccagcgcggtcggcggcgaactgtacctgcgcctcaccgcccacgcctacgtcaccgccgacgccatagaccgcttcgccgaacaatctatcccaaccatcgtcggatggctgcgtaagcgaatcgtatgttgcgtggtgccttaactatggatgattaaggcgccaatgcaacattcatgaagccatgtctttgaacagtgagcaacgcgcggcgactatccgcgaatttcaggagaacatgagccggctgggtctgaccgccgaacggcggcagggattttggcgtcagcggcagcagagtggagcaaatcatcaccctcaagtcgggcgtgctggagtatccgtggattatccgagcctatctgctgagcagagctgagacacagggcgtggaactcacgccgttcatggcgttacgcggaaatccgcacgattattggttcctcgacggcgactttatcgaccgaggcgaaatcgattaaaaccgattgataatcggccatttacacgcaagaggcgccgtcaatcgcctcgcgcatagaggccatcgctctccgtgcaggtggcgatgcg

SEQ ID NO: 386 - DNA, 25568 bp, Unknown
  R42_10m  MAG No. k141_45573
actgcggaaaataccgtgggcacggcaaccccgaagcaaaatggactcgccgtgttgggcaagtatatgggtgtttccgccacgcagaccattgtggagtatgcgacgttcgccatcctgcacttgatcggcgtgccctcgcagatctccaacggtatcgccgtggtgtgttcggcgacctacaacttcgtgatgaaccgcaacgtgacgttcaaatcgtcaagcaacttcacccgttccgtgatgcttttcgtgctgctgtggatctggaacttcacgttcagcacactgctgatcggctggatgccgggcgcgacggacctgagcccgtatgtggtgaagttcattgcgatggcctgccagttcggctggggttatccgttgtgcaagtacgtgatttttaggtgacgcattccaattgctcactgtcgttcgccttcgcctatttgtatttggagcgcttatcagaagaacagcatcgcaacacctgcggcgaagcacatgagcagaatcgatgtcaggaagctggcgagcatcggcttcttgcccttggaagcgatggccttgaagttcacgttgatgccgagcgcggccatggccatgccgagcacgatgtacgcaaagtccacgagctgcggggtgatggaggcgatgagcggcacgaaggtgccgatgatcgaagcgccgatgaagccgagcatgaaccacgggaaggccacggtcttcttgccggtgttctccacctcggagtgcttcttctcccaccagatagcgatgatgatggccgcgaacacgagcatgagcacgcgggaaagcttcatgatggtggcgatgtccaccgcgccgaaagcgtcgccggcggcgaccgcgtgggcgatttcgtgcagggaagcaccggcggtgatacccagctggtccttggtcatgccggttagcgggccgagcgcgatctccagcaacgcgaacacagtacccataatggctacgatggccacggccatggtcacgtcgttgtccttctcgtcctgcttgtcctcaggcaccttgatggaaccggccagacccatgacggcggccgcaccgcagatgccggtgccaccggcggtcaggatggcgagcatcgggtcgacaccgagcttgcgggcgatggcatagcacacgatgatggtcagcgtgacgaccacagctgcgatcggcagacacttgatgccctgcgtgaacagcacggcgaggttgagcttgaaaccgagcaggatgatgccgaggcgcagcagcttgttggaaatcaggccagcggcgtccttgacgcctgccttgcggccatcattggaaccgacgtaggcactgcggatcgggaactggatgatcataccgatgagcagcgcgatgataagcgcgccgaacaggctgaatccggggaactgcttgagccaggaggcgaacagcgaggccagcagagtcagaacgccaatgaacaacatgtcaacggtggtaatgcgcttccaccattttgtacagaactctctcacggtgtctattgaagctcaagcatttacatcggtcaaatcattgcaaccaatacatatcatcgattttgtcgatacctaattgatctccctctgatgagggaggtggccgccgcaggcggacggagggagagaaacaacgttcgcgaccttccctcagtcgactatctgactacccgcgcagcgcagcaataatcatctccgccaactcccgctgatcgtgcgtcagaccggatctcggcaccagcgcatagaaccgccgcacaaactcatcgccaagctcccgctgcaccggcacgcccgccggcacggcggcttccgaaatcaacgactgcccgaacccggcggacagcgccgccacaatcgccgcattactggacacttccatcgtgcgtgcaggcacaacctgagcggtcttgaaatacaaatccgtgtaataccgcacgccggaaccgtgctcgcgcaccatccacacgccgtcgggctcccccgccaacaccagccggtcctcgcacagggtgacgcggtccaccgaatcgttcacgatcggcttttccaccacgccgagctgcacggccttcatgctgacccgttcgagaatcgcatccgagttcatcacgtgtacggcgaagtcgaaactgtccatgttccgagccatcaccggcaacgccttcggcagcagaatcgccgcggtcgtgtgcgagaacgaaacggccagcggctcacgcgcctcctgcacgcgggcgatctgctcacgcgtatcccgccataatccgtcgatgccgatggcggtctggtacagcatccgcccggcctgtgtgggcgtcacgtcgcttttcgcattgcgcacgaacagcggcgcgccgaccatctgctccaattggacgatacgcgacgacaccgtcgactgcgacaccttcagttcgtcggcagccagcgtgaactggcccacctcgtatacggcgaccagggtttcgagcagagggaacatggtttaactgtacgctgtatgatgcacgaatatttcaattagcttgggcgtagccctaggccacggacctggaccaccctcagtctcgctttgcgagccagctcccgccagcgggaccccaatggttttcatatcactagttttgcgagctgtgttttggccttgtggagcttggcatagatttcattgcgctgaacaggattcttgacgcgctgatggtcgcgggtgagcttgtccacttcggattcgagccgagcaatttcagtatggcgaatgatgcgcgcatccagattttcgatctccggcgtgcccagaatggtctgtgagcacagcgaggcccacagctcatcaatagtagagccggccagctccagctgggcctcccccgctggctgccaatcgccggcatatacccgatagatcggcgtgtggccggcacgccccggtatcgcccgacgcacggcgaacgcacattcctcacgtgtgctgccctcgaacggcacgtcgcgtacgcacacgaacacgatgcccgatttacgctgcccggcaatcaaatcgatgacctcgttcggtatgccagtggctttggccgtaagcttcagtccgatgaccagcacttccggaaccagtttgccgtccgcaagcccagtgttaatcgaccggaccaacgccagcatggtaatggattcgatttcgttcaccaatcgctgcttgagtttgcctgaaatcggtgccttgcccacgaacaaggctttcggcagtgtgcctttggcttcgggaatcgccgtggagacgggcagtcccagtgaaagcgcggatacggaaccacagtgtgcggcttgcgaaccagtcatcatcgaccttctttcccggcctgccatcagtgtcataccctcgcagtgcagcagtccgtttatctattggaaagcaacactagcgcatccaggccggaagtcgtggtacatatccatatcctgctgcggttataggaaatcccctccgagtttcctcgaaggggatttcttaagtcgctagttcaagcgaagattcttgtctgatgataatcaggcgaggatcttggtcacacgaccggagccaacggtgtggccgccttcacgcacagcgaaggtcaggccctcctccatggcgatgggctgaatcagctcaacggtgaaggtggcgtggtcgccgggctgaaccatctcgacgccttccggcagctcgatgacgccggtgacgtcggtggtgcggaagtagaactgcggacggtagttggagaagaacggcgagtgacggccgccttcgtccttggtcagcacgtagacttcgccctcgaacttggtgtgcggggtgacggagcccggcttggccacgacctggccacgctcgacatcctcacggccgaggccacgcagcagcagaccggtgttgtcgccagcctcgcaggcgtccatggtcttgtggaaggtctcgatggaggtgacggtggtctgctgggtcggacggataccaacgatctcgaccggggtgttgacggccagctggccacgctcgacacgaccggtgacaacggtaccacggccggagatggtgaagacgtcctcgatcggcatcaggaacggcttgtccaggtcgtgaaccggggtcgggatgtagtcatcgacggcggccatgaggtccttgacggactggacccacttctcgtggtccggagcgtcgtcgtgcagggcaccgtaggcggaggtgtggatgaccgggcagtcgcgatcgaagccgttctcgtcgaggaggtcacggacctcttcttcgacgagctcgatgagctcttcatcgtcgaccatgtcgcacttgttgagggcgacgaggatcttcgggacgccgacctgacgggcgagcagcacgtgctcgcgggtctgggccatcgggccgtcggtggcggccacaacgaggatggcgccatccatctgggcggcaccggtgatcatgttcttcacgaagtcggcgtggcccgggcagtcgacgtgagcgtagtgacgcttctcggtctggtactcgatgtgggcgatgttgatggtgataccgcgggcggcctcttccggagcggagtcgatctggttgaagtcgtactccgggttgacatccgggaactcctcgtgcagcaccttggagatggcggcagtcagggtagtcttaccgtggtcgacgtggccgatggtaccgatgttaacgtgcggcttagtacgctcgtacttttcctttgccattacttttgtcctcctggacgtctcgtgagtttcctgcgccctttcgcacagggactcgcttattctactgggtttctgggttatgtgccactttgaagagccagaacccagtcagcggtatacgatactaccgctgactggagacaccggccacttcatgatgtggcgcgtgtcactcgccgcgctgggccttgatgatctcctcggagacgctcttcggcacctcgtcgtaggagtccatctccatggtgaacatggcgcggccctgggtcttggaacgcaggtcgccgatgtagccgaacatctcggacagcgggaccttggcgtcgatgaccttgacgccgacgccgtcggtcatggactggatgttgccacggcgctggttcagatcgccgatgacttcgcccatgtactcttccggcgtacggacttcgaccttcatgatcggttcgagaatgaccggcttggccttcggggcagcttccttgaagcacatggaacctgcgagcttgaaggccatttctgaggaatcgaccgggtgcatctggccgtcggtgacggtggccttgacgcccacgaccgggaagccggcgagaacaccggactccatggcctccttgacaccggcctcgatggggccgatgaattcggcggagatgtggccgccggtgaccttgttctcgaactcgaaggtcttgccctcggtggtgtcgagcggctcgaagttcatcaggacctttgcgaactggccggaaccaccggtctgcttcttgtgggtgtagccctggtccatgacggccttgcggatggtctcgcggtaggcgacctgcggcttgccctggttgcactcgaccttgaattcacgacgcatacggtcgacgatgatgtcgagctggagctcgcccatgccggcgatcagggtctggccggactcttcgtcggtcgtgacctggaaggtcggatcctcttcggccagcttggacagggcgatgcccatcttctcctgatcggccttggtcttcggctcgacggccacctggatcaccggatccgggaaggtcatggagtcgagggtgatcgggtcgttgatggagcacagggtgtcgccggtggtgacgttcttcaggcccacgaaggtgtagatgttaccggcgtcggcgcggtccatcgggttttccttatcggcgtgcatctggaagatcttgccgatgcgttccttcttctcgcgggtggagtcgagcacggagtcgcccggcacgacggagccggagtagacgcgcacgaacacgagcttgccgtagaacgggtgggtggagatcttgaagaccagagccgcgaacggatcggtcttgaccgggtggcggtcgatctcgacggactcgtcgccgggcttgtagcccttgatggccggcacgtcctcgggggacggcaggtagtcgacgacgccgtccagcatcggctgaacgcccttgtccttgaaggcggagccgcagaagacagggaaggcttccttggcgatggtgagcttgcgcacgccggcgcggatgtcttccttggacaggtcgccgtcctcgaagaacttgttcatgaggtcgtcgtcggcttcggcggcggcttccacgagcttctcgtggtactcctgagccttgtccttgaggtcgtccgggatctcagtggtgtcgtacttggcgccgagctcctcggtgccgttccacacgtaagcctgcatctcaaccagatcgacaacgccagtgaagtcgttctcggaaccgatcggcagctgcatcacgatcggagtagcgcccagcttctccttgatggtgtcgacggagtagtagaagttcgcgcccagcttgtccatcttgttgatgaagcagatacgcggaacgccgtacttgtcagcctgacgccacacggtctcggactgcggctccacgccttccttgccgtcgaacacggcaacggcaccatcgagcacacgcagggagcgctccacctcggccgtgaagtccacgtggccaggggtatcgatgatgttgatctggaacttgtccttggtgtcgtgggactgacggctccagaagcaggtggtagcagcggactggatggtgataccacgttcctgctcctgcgccatgaagtccatggtggaggcgccgtcgtgggtctcgccgatcttgtagttcttaccggtgtagaacagaatacgctcggtagtggtggtcttgccggcatcgatgtgggccatgatgccgatattgcggacgtcgtggaggtccgaaatctcttcagccatctttttccttagttttactcagggcgagtgattaccagcggtaatgagcgaaggccttgttagcctctgccatcttatgagtatcctcgcggcgcttgacagaagcaccgaggccgttggaggcatccaggatctcgttggcgagacgctcggccatggtcttctcacgacgggcgcgggagaagtcggtcagccagcgcagcgacagggtgttggcgcggttcggcttgacctcgaccggcacctggtaggtggcgccaccgacacggcgggagcgaacctcgagggacggacggatgttgtccagggcgcgcttgagcacagccaccggttcctggtcggacttctccttgaccatatcgagcgcggagtagacgatgtcttcggcgatcgacttcttgccgtcaagcagaatcttgttgatgagctgcgccaccacggtggaaccgtagatcggatcgggcagcacgacgtgcttcttggaaggtcccttacgtgacatatctcttacttcgccttctttgctccatacagggaacgaccctgcttacggtccttgacaccctgggtatcgagcgcgccacgcacgatgtggtaacgcacacccgggagatccttcacacggccgccgcgcacgagcacgatggagtgctcctgcaggttgtggccctcgcccggaatgtaggcggtgacttcgatgcccgaggacaggcgcacacgagcgaccttacgcagagccgagttcggcttcttcggggtggtggtgtagacacgggtgcacacgccgcgacgcagcgggctgcccttcagggccaaagtcttggacttcttcggctttgcctgacgtcccttacggacgagctgttcaatagtaggcaacttgaattctccgattcagtggtttctcttgcttttgtgtgaccgccgcactgcgcccacacttttcagcacactcgcttggcatccgcctgttggcgacacccgacgaatcggaaaagatagcccagtccaccggcccgatggccttcgcccctcccgtcggcgcattactacgtgcgatcagcggtttgaaggatatcccagcatgctcgcctgttacataaggcgtgctgctggcacacacgaatatctatactacgattccgccggacaacgacgcgccgggcctcgactcactagcttgggacaatccgcgccctgtacttttcctctccttctggcgcaacaatcccgggaatgcgtcgcacaacacacgcacacacgccctcccaacgcaatattcccgggaatgcgtcgcaaaaaagcgaacgccacacagcaggtgcccccgcggagactatgtcacacgggggcaccgccaaggaggttacattatgtttcttttcaccacatgccgcttctgtgttatctgtttccagcacatcctcgtgctcttccatatccgatgggaacctctagcgacccggcctctttgccgtatcaccttgccgctttctgcattactaattatagcaaaaccgccctcgcgaaacgcccgatacatcaatcgggagtaagcgggagcggctatgttatgcggggtaggaaaagtggatgaccgactgactggagtcgtgccttacccggcctttctcaccatctcaggatttcaggcagcgaccttggcggccttgtcggcgtcgaacgggtgggccacggaaacggtgctcttggcggagcccttctcgccgttgtcagaatcccaatgaatctcgtgccggtcgtcatggttgcgccaccagctggacaggatggagccggagatgttgtgccacacggagaagaaggtggacggcacggcggcgagcgggttggacgcgaaggaggtcagggccagcgtggcgcccagggcggagtcctgcatgccgacctcgaacgtgatggccttctgctgcgcgtagcggaagcccttcgggtagatcctgtacatcagcttcgagaagccgaagcccagcgagtagccgcacagattatgcaggatgaccaccgggatggccatcagagagctggccacgaacagcttcggaccgttggcggcgacgaccacgccgatgatcagcaggatggccacctgagacacgatcggcagggccacggtgaccttctcgatcttcttgccgaagaccatgtggcagatcacgccgagggcgatcgggaaaagcaccaccttgacggcattgaggaacagggattcgaccggcacgctcacatactgggaggccagcagctgcatcagcagcggaatcatgaacggggcgcacagggtggagaggatgccgatggagacatcgagggccacgtcaccacgggacaggtagctcatcacgttggaggaggtgccggacgggcagcagccgacgagaatcacgcccacggccagcgggccggacaggtggaagatcgcgcacagggccacggcgacgagcggcatgatgacgaagtgggccaccgtgccgacgatgaccatcatcggctgggtgaggatgcgcttgaaatcgtccagcgtcagggtcagccccatgccgaacagcacgatgcccagcatgtagccggtgtacgccttgccccacaggctggcggccggcacgaagtagttgaagacggcccagacgatgacgatgaccgtaaaccacttggtcagccaatctgcaaaggctttaaccttttccatggtgtttctcttcccttgttcggtgtaggtaacatcgcatgaaactaggcgggtcgcggttgatatgaaacataatgctcacattgtgaacgctcacgtaatcatctctgcaatccccagccgcaccatcacgccgttgtgtgccctgacttttcatcaatcgccacacaagacccactcgtccacatcccaccatttgagacagcccacagcctggccccaagaatgaaaccaaccgcttgattccatcgcgacacaccgatgagcacacatccgcaaagttgtgtatagtattcacctgttgtgcgaattcagcttgctgaatacgacactatggtggccatagctcagttggtagagcatctgattgtggttcagaaggtcgcgcgttcgagccgcgttggccaccccagtaaaacccttccgttcgcggaagggttttgtttttctccatgaattccccgctcctgccgggaaccgccacgttgtacactcgggcatatccaattcatctaacacaaggacaaaaggtccgtcatgctgtcttttgagaacgattactcccgcgccgcccatcccgcagtgcttgaagccgtggctgaagccaacaaccatctgtattcgggctacgggtccgacgaactgagcgatcaggccaaggccaagatccgcgaggcctgcggccagccggacgcggatgtgtggttcctcgtcggcggcacgcagaccaaccaggtcgtcatcgacaccatcaccccggcgtatgcaggcgtggtcgcggtcgcctccggccatccgaacgtgcacgaggccggcgccatcgagttctccggccacaaggtgcttacgattccccaacacaacggcaaaatggatccaaccgaactggacgagttctgcaagaccttctatgcggacggcaactacgagcacatggtgttccctggatccgtgtacgtctcgcaaagcaccgaatacggcaccatctactccaaagccgaactgcaggccatcgccgatgtggcgcataagtacgatatgccgctgttcgtggatggcgcgcgactcggctacgcgctgaccgccactggttccgacatgacgctcacggatctggcgaccatcgccgacgtgttctacatcggcggtaccaaggtgggtgcgctgttcggcgaggccgtggtgtttaccaagcacaacacgccgaagcacttcctgacccgcatcaagcagcacggcgccttgctggccaagggcttcgtgctgggcgcgcagtttgacgccttattcaccgacaacctgtatttcaagatcgcccgcaacgccaatgaggcggccgatcgtattcgcgaggccctgcgcgccaagggctacatgctcactttcgaagcgcccaccaaccagattttcgtgacgatggatcagccgaccatcgaccgtctggagcgcgaggtcaagctcggctttaccgagaaggccgacgacacgcataccgtgatgcgcatctgcaccagctgggccaccacgcatgaagaagtcgatcagcttattgagttgttgtaaaacccttcgctaatccctccctccgtcatcgcttcgcgatgccacctccctcatcagagggaggttttttcgtagctcccgccgatgagggagctggccgccgcaggcggactgagggaaaacctctccgcaaacgagaaggctcctactcccctatcgccttgcgttccatatccacgaacttgtggaccgaggcttccacggaataatgcgccttggtgtattcggcgtatttctcgccccattcggcgcgctcggcctgatgtgcgatccaccaatcgatgcgtcgggccagcagggccgcgtcccgcacggggaacaacgactcgtcgatcagcgcgaactggccggccgccgacagttcggacgcggcgatcaccggcaccaatccgcacgccatcgcctcgatcacgctcaccgattcgatgtcggcaatcgaacaatgcacgaacaaatcgcccgaacgcaacaaatcgggcatatcggcgtgcttgtggaatccgatatcggccttgcgcgccagcaaacgtccggcgcggaacttgagatactgcttgagcggcccagtaccggcgatcaccagctgaatatcgccggcgtgccgggacatcgacaccgccttgatcagcgtaatctgatctttctcgctggccagtcggccggaagcgacgacacggaacggcacgggagccgaggcatccggatcggccggcttcttcggcgaatacaccggtgaataaccattggaaatcacgtgcaacttggctttatacccgtgcgcgcgcaacaggctcgcggtcatttcggtgggcacatggatgtggtcaatgtgcttgtacagccagtgcttgaacagccagtacaggaagctggaaataccgggaatgcgacgtagcgggccggccgaatacagcacgttctccggctgcaggtggaatccggcagtcacgggaatgcccagttggtgggcgactttagcggcacgacggccgaatttgaacggcatatagatatgcaccacatccacgccttggaaggcggtgcggaacaacgtgtcgctgggttcggcgaattgcatgagctgcttggcggccacccacgagacgagcggcaccttattcacgcgcgccggatattcgggcgcccctataccgacaagcctcacatgatggccttgccgctccaattccgcagcccattgcaaggccgaattggaggtgccgttgccctgattgcccaccgtatcgaccacaagagcgatagtcagcggacgatcaatgctctcttcaatcccgttttcgcgcattgcctcatcctaaaccaccgcgcggcaatagcgtcggccgcgctgcctgaacgcgtgtgaaatggtatgggctgccgcattttgcccaatattgaatcacgcgcttcgcagcgcacgatcggcgcgggccacggcctggaacaactcggcggtgtgcttgagcagactgatgcgcacccagccttcgcccgcctgaccgaagcagacccccggcatcagcgccacgccggccgtgttgagcagccaatccacgaatgcggcggaatcgccatgccaccgcgccagccggccaccatatacattttggacagcgagccaagttccagcgccacgtccagcgcgcccggagtctccagcaggctcagcgagcgtacgtcgccgaattcgagccccgcataggcggaatcgttaagtacttcgactattgccagcgtgccggcttgtagcctgaaatgccggaaccggcacgccgctattcgctatatgtcgcatcccaaaatgttggcccgaccgccccatacttcatcggccggtaattgctaaggtacgacggctctgttacacacgcaatggcgtgtctatacgcagtatttatggcgggttacgggcatctgaatcttcatggggcggtaacctgcccatggggcggtatttcccccatggggcggtgaaattcccatggggcggtaaggcaaaacggcttaattccaaggtttcacaaaaccaacaaaccgccccatggactcattgccgccccatggggaatttaccgccccatgaagccggatattccgcccgtaattttgccgcgtgaggcactccgctcacgcgacataccgaaatcatcgcgtcatggcagaatgtgggtatgactgagaacgccgtgaatactgccgtgacttccgcctcctctcccgcaattcccgccgagacttccgccgtctcccccgcaactcgcgcagccaaccacccgctgggcacaccgctgggcaagcaccccacccgtgtgctgtttttgggcgctggcgagctgggcaaggaggtcacacttgaactcatgcgactgggcgcatgggtgtgtgctgctgactcctatgccggcgctccggcccagcaggtggcgcatgaataccgcgcgttggatatggcgaatgccgccgaattgcaggcattgttcgatgaaatcaagccggacatcatcgtgcccgaggtagaggccatcgccaccgatgtgctggccggtgctgcggccgcgggcgcccaggtggtgccgagcgccgaaatcgccgcgatttgcatggaccgcgagcgcctgcgcgtactggcccacgaagaattgggcttgccgactacaccgtatcgttttgccggctcgctggaagagctgcgcgccggagcttcggaagtcggctatccgtgcgtggtcaagccggtgatgagctcgtctggtcacggccagtcggtggtgcgttccgccgacgccatcgatgccgcttggaccgaagcgcaggagggccgccgcgccgccgatgagggcgatgtgtcgcgcgtgatcgttgaggcgcttgccccgctggagcgtgagctgacggtactgaccgtttcttcgtccgccggcattgtgacgtgcgcgccgatcggccaacgtcaggagtccggcgattaccgcgagtcctggcagccggctaccgtgcccgatggtgaggccgagcgggcgcgcgacatcgcacgtaccgccgttgaaggcttggtggccaaggctcaggcgaccggcgaaaccggttggggcgtattcggcgtggagctgttcgtgctcaccgacggctcgattctgttcaacgaggtctccccccgtccgcacgataccggtatggtgacgatgacctcccagcgtctgagcgagttcgcgctgcacgcccgcgcgattctcggcctgccgatcacccccgagcatgtggcgctcacgattccggccggctcggtggcggcaagccatgcgattgtggtggccggcgacggtgaggccgagttcaccgatgtggccgctgctctggccgaacccggcacggacctgcgcatttttgccaagcccgaagtgcatggccaccgtcgtatggccgtggcactggccgtcggcgagtccgaagccgacgcccgtgccaaggccggccgtgttgccgatgcgttgacgattaccgtggagtagtccacggcctgatcagctcagcatggcctcaatattgttgccgtccgggtcgtggatgaacgcggcgtaatacgtggggccatagttcgggcgcgggcccggagcgccgttgtcggtaccgccagaggcgagaccggcctcatggaacgccttgacggcggcctcatccttggcgcggaacgccacatgagacggcaccaccgggttgccgtccttcggagactccaaccaaacgctgtcaccatcctcgtcattggcaaagcacacggcggtcgggtacgccactttcttgacgtagcccagcggggccagcagcttctcgtagaaatccgcgtactgtgcggcgtcggaaacaaacaaaccaatatgatcgatcatgacgaacctccttgcaccatttcgtcactcccattatcgtgcgtgcgcggccgtacactcacgttttgtctattgacgaacatctgagtgtccgcgtgcttgcgtagatactgtcacgccgaacgactatgcgaccggcaatgagtcgattgtcggaccaataccgtccgcctccgccatcccaacagcgtatggtcgttcgatgcagcgacgtatgatgcgctggccgcatcgtagcgtcatgccgagtgttgttgtagccctcgattggtacccttttaccgttagttcacccagaaattccactcctgaaaggtgagtcatggagaagctggaaaagctctacgagggcaaggccaagcaactgtacgcaaccgacgatccagaggttctgtgggtcgaatacaagaacaccgccaccgctggcgatggtgaaaagaaggaagacttcaccggcaagggccgcctgaacaacctcatcaccaccatcatcttcgacctgctcaagaaacgcggcatcgacagccatctcatcaagcgagtgaacgacaccggccagctggtgcgcaaggtgaacatgttcccgttggagatcgtgctgcgcaacgtggccgccggccacttctgctcccgtctgggcgtggaggaaggactgccgctcaaggagccggtgcttgagtacttcctgaagaacgatgatctgcacgatccgttcgtcaacgacgatgacctggtggccctcgacgtatgcactcgcgaggatctcgccgagatcgccccgctggcccgcaagatcaacgaggccctgatcgagatcttcgccaagatcgacgtcaagctggtcgacttcaagatcgaaatgggccgcgccaccgacggcacgctgctgttggccgacgagatcaccccggattcctgccgtctgtgggaccagaaggaccactccggcaaggtcgagcaccttgacaaggacctgttccgccgtggtctcggcagcatcatcccggcctacgaagagatcgaggagcgcctcgccgaactcgccaagtccgaaggcatcgaagtcgccgaataagtcgtttaggtgcaggtagcagaacatacagctggctcccctctccgaggggagctgtcgccgataggcgactgaggggaggtcaagacgttcaccgccatgacaactcccctcagtcagctccgctgacagctcccctcggagaggggagccaagttcttttaccgcacttcttcaatttttcaatattttcaagaaaggatttccatggtttttcgcgtgtacgtggaaaagaagcccggctttgatgtcgaagcccagcagcttgcgggcgaactgcgcacgatcctcggactgaacggcctcaaggccctgcgcatcgtgaaccgctatgacgtcgaaggcatctcccaggagctgttcgaccagaccgtgcccaccgtgttcagcgagcctcaggtggacaatgtggcctacgacctgcccgacttcgccggcgccaaggtcttcgccaccgagttcctgcccggccagttcgaccagcgcgccgactccgccgccgaatgcatccagctcatctcccagggcgagcgcccgacggtccgttccgccaagctgtacgcgttggaaggcgaactgaccgacgccgacgtggacgccatcaagcattacgtgatcaacccggtcgaggcccgcgaggccagcctggagaccaaggaaaccctgaagacccaggtgccggtgcccggcaaggtcgagaccatcgccggtttcaacgagatggacgccgaagccggccagaagttcatcgacgagcgcggtctggccatggatctggccgacctcgaattctgtcagaagtacttcagcgaggagggccgcgagcccaccatcaccgaaatcaaggtgatcgacacctactggtccgaccactgccgtcacaccacgttcggcaccgagctggacgaagtaaccatcgatgacgccaccgtcaaggccgccttcgagcgttacctggcgatgcgccacgagctcggccgcgacaccaagcccgtctgcctcatggacatgggcaccatcggcgccaagtggctcaagaagaacggcgtcctgaccggcctcgacgagtccgaggaaatcaacgcctgcaccgtcaaggtcaaggttgacgtgaacggccacgacgaggactggctgttcctgttcaagaacgagacccacaaccaccccaccgaaatcgaaccgtttggtggcgcggccacctgcatcggcggctgcatccgcgatcctctgtccggccgttcctacgtgtatcaggcgatgcgcgtcactggcgccgcggacccgaccgtgccggtctccgagacgctggaaggcaagctcccccagcgcaagctcgtgaccaccgccgccgccggctacagctcctacggcaaccagatcggtctggccaccggtcaggtcgacgagatctaccaccccggctacgtggccaaacgcatggaggtgggtgcggtcgtggccgccactccggccgaccatgtgcgccgcgaaaccccggcccccggcgacaagatcatcctgctgggcggccgcaccggccgtgacggcatcggtggcgccaccggttcgtccaaggcgcataacgtggaatcgctcgaactcgacggcgccgaagtgcagaagggcaacgctccggtggagcgcaagctgcagcgtctgttccgccgcggcgatgcctgccgtctgatcaagcgctgcaacgacttcggcgcgggtggcgtgtccgtggcggtcggcgagttggccgacggcctgttcgtggacctcaacaccgtgcccaagaaatacgagggcctggacggcaccgagctggccatctccgaatcccaggagcgcatggccgtggacgtggccgccgaggacgtggacgagttcctgatctacgcccgcgaagagaacctcgaagccacggtgatcgccaccgtgaccgaggacccgcgcatggtgatgacctggaacggcgacaagatcgtgaatctgtcccgtgagttcctggcctccaacggcgcttccaagcaccagaccgtgcatgtcgaggcacagcagtcctacgagaccccgtggggcgagggcacgctggccgagcgtatgaacaagctggtcaccgacatcaacgtggcctccaacaagggcctttcggagcgcttcgactccaccatcggcgcgggcaccgtgctcatgccgttcggcggcaagcgtcagctcaccccgaacatggccatggtcgccaagctgccggtgttcggcgagaccaccaccgcctcggcgatggcgtggggcttcaacccgtacatcatgtccaagaaccagttcaccggcgcctacctgtccgtggtcgagtcgctggccaagctggtcgcggccggcttcgagcatgagaaggcctacctgagcttccaggagtacttcgagaagctgcgcgacgagccggaacgctggggcaagccggcggccgccgtgctcggcgcactgatggcccaagtggacctgggcgccggcgccatcggcggcaaggactccatgtccggttcgttcgaggatctcgacgtgccgccgacgctgatctccttcgccgtggccgtgggcaacatgaagcgcgccacctcccctgaattcaaggacgccaatcaccgtatcgtgcgcatcgcgccgcgctacctggccgacggtctgaccccggacaaggatgcgctgcttgaggtgttctccgtgatcgaggagctcaccgacttccacgatgccctggccgtctctacgccgggctatggcgccaccgccgaagccctgttcaagatgacgctcggcaaccgcatcggcgtgactctgaacgacagcatcgccgtggacgacctgttcaccccggcatatggttcgttcatcgtcgagctggcagacgatgccaagcttccggccgtctccaatttggtcgagatcggcgaaatcggcaccaccacctccgagtacgtgttcaaggccgccggcgagacgctggacctgaacgctgtgcaggaagcttgggagtccggcatcgaatccgtgttcccgtaccgttccaagggcgaggacaagggcgcgaccgtcgagaccatcgacttccacgcgccgaagaagaccgtgtacgtcggctcttccgtggccaagccgcatgtggtgatcccggtgttcccgggcaacaactgcgagtatgattccgccgccgccttcgagcgcgccggcgccgacgtgaccacgctgatcatcaacaacctgacaccggccgccgtcgccgaatccacgcaggcgttggtcgatgagatcaacaagagccagatcgtgatgatcccgggcggcttctccggcggcgacgagccggacggttccgccaagttcatcaccgcgttcttccgcgcgccggccgtcaccgaggccgtgcgtgacctgttgaagaaccgcgacggcctgatgctcggcatctgcaacggcttccaggcgctcgtcaagctgggtctggtgccgtacggcgacatcgtgccgatgaccgacgcctgcccgacgctgaccttcaacaccatcggccgccaccagagccgactggtccgcacgcgcgtggcctccgacctctccccgtggctgtccaagacttcggtcggcgacatccacaccgtggccatctcccacggcgagggccgcttcgtggcctccgacgaggtgctcgcccagctcagggccaacggccagatcgccacgcagtacgtggacgagaccggcacccccggcatggatctggacgtgaacccgaacggctcgctgctcgccatcgagggcatcaccagcccggacggccgcgtgttcggcaagatgggtcactcggagcgttccggcaacggcctgtacgtcaacgtgcccggcaacaagtaccagccgatcttcgaggccggcgtggaatacttcgccgcctgataatcggcgcgtatcgcgtctgatacggcacacagggaaggaactctcgggttccttcccttttttgttcatgccggtcatgggctaaggttggggtgttcgcactaccgaatccgccgctgaaaggacctgtcgtcatgccgatcaacgaggcattgttcgccgcgatgaaggccgccagctacatcaagcccaacgcgggcaagtcgtacaaattgcagcgcgtggcggaagagcttgtcgccaagcaggcacccgccaatccgaaatgccgtgtcgaggacgccttcgcgcctatggcggatggatatgccgtaccattgcgagtgttcacgccgctggtcgcctatggagcgcccctgcccgaagccctggaggaatcttccgccaatggcacgccagtggcctcggcaatatccgcgattctgcccgccgtattacccaaagtcctacccaaaatacccatcaaggaaagcatgtcgagcggcaacaccgacggtatttccggcaatgccaacacggaacttccctcagtcacgccgcgtggcacgatcctgtttttccacggtggcggttggaccacaggcggcatcaacctgtacacgcaggcttgcgcgcatatggccgtacgtctgcaacgccgtgtgatctcggtcgagtaccggctggctcctgaataccgcttccctactgctgttgaggattgctatgaggtagcccggcagctgtttgctggggaattgccgatttctggggtgggtggttctgttgatgttgaccacccccagtcggctgcgccgacagcccccaccggcgggggcgatatatctgcgacaatcccagcaccggatcccgacagcatcgtgctgtttggcgacagcgcgggcggcaatcttgcggccgccgtctcgctcatggcccgcgaccgcggcgagttcatgccgcgcacgcagatgctgctttacccggtggtcggcaacgactacaatcccgagaccagcccgttcgaatcggtgcggaccaacggcaccgactacatcctcaccgcacaggacatggccgactacatcgacatgtaccgttcgtccgtggccgacctgaccaatccgtatttcgcgccgctcaccgcgcatgacctgagcaatcagccgcgcacgctggtgttgtccgccgaatactgcccgctcagagacgaggacgaagcgtacgcccgtcgtctgcaattggtgaacgacaacgtctcctgttaccggattcacgacggcatccacggttatctgctcaacacgtcggccgtagggctggtgtccaccacttaccggatcatcgagcatttcctcgacgacacaccgctggtgccggctcccggcaccggcaccaccgccaacgcaccggagggaggcgacgcatggcaagacgtacttggtaccgactagacaacatcggcaagttctactcctcccaggctggccgctcctcgcagaccgtgttccgctattcggccgagctggcggacgacatcgccccggacatcctgcagcacgcgctcgaccatgccatcgcccagttcccgagcttcaacgtgcacctgctcaacggcatgttctggcattacctcgaacagtcggacggccggccgctggtggagccggaacatctgccgatatgctcgcgactgcattacgggcccaaaagcatgctgttccgcgtgagttatttccgcaatcgtgtcaatctcgaggtctcgcacatcatttcggacggtcgcggcgccatcaacctgttcaagtcactgttgcacgcctacatcgccgagcggtacgacgtgccgggcgtgccttcggattacgacggctcggacagcgacaaagccgaaaacagcttcgacaaatactacgagaaagacaaggccggtgccgcgcccggcacgaagatctaccggctggccggccccatcgaccgggacgcgcccacgttcatggaatatcacgtcagcgccagcaaggtgcttggtgcagcgcatcagtgcggagtgagcctcacctcctacctcatcgccgcgatactgtgcgcgattcgcgacgtcatgccctcgcgcgcccgcaatcgcgcgattcgcgtggatattccggtcgacttgcgcgccttcttcaggtcggagaccgtgcgcaacttctacggcatgacttacgtggcgtacacgccggccgatatcgaagccgatgaggactccgcgaaaacttccgcaacgggcccagacgcgaccggcgacggccagcagtccgccgcccgtaccgcgcacggcaacggtatgggtggattgctgaccgatgagccgttggccgacatcgcccgccatgtgcaggagcagctcgaccatgccaccagtcgcgagcgcgtcgaatcgcatatgaaccgcatgattgcgctggaaaagaatccggcgctgcgtctcgcgccctcccctgccaaggactgggtgctggagctggcccggttcatcgccgaccgcgagaccacgaccaccgtctcgaaccttggccgagtcaccttggacgaacgactcgcgcgccatgtgcgttcggtgagcttcctcaccacaccggccagcctgaatttcacggtctgctcgtttggcgacgacctgagcatcggcatctccaccgtctaccatgatctgaacgtcatcaagaacctgtgtcggattctcgccgcgcagggcatcagcggccgtatgaacatcgccggcgcgcatgtggagaaaggagcgtcggcatgaagcattgcgatgcctgcaacgtcgatttcaccggcgatatggcccgttgcccactctgtcagaacgaattgcacggcgaggcctctcccgccgcattccccgcgcagcagatctatctgcgtccgaggcgtttggcggtggagatcatcacgtttgtaaccggcgcgattctgctgctgcatggcttcttcagctatctgttttcgtggccgataccgattgccagtgcatcggcggccgcgctgatcatcagcgtgctgttcatcaacagtgcgattctgcacgcgccgcggccgcttcgcctcatgtttcgatatttctatatcatgctggcgattgcgctggtctggtttgtggcgacgatgaatcatgtcgtcaccatgttcgtcataccgatcatgtgtctggtctcacttgtcttcgacgtggtactgcttatcgtgctgcgggccaaggccatcgaccaatacgccaaatatctggcattcgacatcgtcgctggcctactgccgctgacgttcattccgctcggctgggctccgtgggatgtgctggtgatggtcagcgggctggtctccctgctggtgctgctcggcctgctcgtcttcgcccgccgccagctcttctcggaattcggcaaacagttctcggcgtaagttgactgatattgacgtttaatagtgatggcccacaggaagattccctgtgggccatcactatctgttgtgtatggatacgcttaatcgtctacttcatagtggtcgacagatgccttcacctgcgccgcatcggcatcgctaccggtttcgaattttaccttttctcctgcaggccaagcattagtactggcgtatacttcggcagccttcacgccatcggcatcgtatagagccaatatcaagttgacggtaccgaaatcgattccgctgatgttttcgatgacggctgagtatgcgtagtagccatatccgtcatcagttttctcaaaagtcgcagaggcaatcagattattcagcgcgtcttccgtttccgtctttttcttgacggacgaaccgttggcaacaatatcattcaatggattttgatatttactgtctaccgtgagcttgtaattatcgacaaaatccttgagcaatgccgaacgcttatcgtataccttagtccattcggtgctgtaatccgagctgagataggaataatcctcgttcactttttgtgaatcctcaagcaggttgatataagtaatgactttctcctgcaacttcgaatccttgaactgccgctctttcaaaggctcatcgttatcgatttcagcctgaacagcatctttgacatgcttgacggaatcggtatctttcttctgctcgtactggtcgagaacatccgaacgcttctgatacgcttttgcgattatggacatcgcctcatcatccgcatagtctggaccgtcatccttttgagtgttaccgcagcctgcagcgccaacgatgaacaccaaactaacgaccgctgcaagtaccgtcttacccacgtttcgtacataggaaatcataagagtcctctcaattcctcgtttttcctatgacgcgactgcataacctccaagaataaatcagttcccaactgatttttgacgataaataattgaccttgctataccataaaaaagcgctgttactcatgcctcatagcatgagtaacagcgcttggcaacaatgtagactatttttttcggctctgttgtgtggatattcaccgtatacgagtccatttctgcaatagatgaatacatcttttcaatcaccgtttttgcctgctcattagcattcttcaacaaatcccccttattcagtttcttttccgactgcgttttggcgtctttcaaggcatctgctgtatctgaaacttcattgccgttaaatagtgaagattcttcatcaaagaatctcaatgaatccgggtccaccgaaactgactagatagtaggtgctggcagcgtgatgtcgatggttcgattatgcttattgacatcaatctcagccttactcagatcgacgccggcacgggcctcaaacgtatagaacatcacaaatgattttttttattgaggagagacatggtggtgattaacgcaatttacaaaaaagctttacgcgcaagactgtggcagccgactaagtggggtaagaagcttctgaaaatcgcggattccataagctactaagtgacggaagcgagtggacaatgcaaacgcgggagcatgtgttggatactttgaatcatgacggcgcgaaagtctttgccaaggggatgataaggcagggatggaatgctctaggtgagggaatgcataacaccgtagtcggtatccagcattcgttgaagaacagtggcagggcatggaatcgtttcgtttccggttggcaggatgcgaaacaggccgcgaatgccgctcatcctaacccaaacaacacggtgatgagggatttctgggatggtcagttcaagagattcggagattggagcaaaggc

SEQ ID NO: 387 - DNA, 19274 bp, Unknown
  R42_10m  MAG No. k141_45574
gagatgaacgggatgatgttgcccaccatctcaggccaatccttgaaggtcttgcctgcgccggaaatcgcctgataggtgctcacaaccacctcacgcggctcgaattccttccatgcggccagtgccggcgtgtaggcctgaatcgagcagttcggcttgacggcgatgaaaccacgagtggtgcccaggcgcttgcgctggtgctcgatcacctcgaagtgctccgggttgatctccggcaccaccatcggcacgtccggggtccaacggtgagcgctgttgttggagaccaccggggtctcggtcttggcataacgctcttcaatggcgcgaatctggtccttcggcatgtttaccgcagagaacatgaaatcaacgccagaggccacggactcggcatcgtcgccatcgacgaccaccatgttcttgacgtattcgggcatcggggtttccatcttccaacggtctccgaccgcctcggcatacgtcttgccggcgctgtgcgcggaagcggcaagggtgaccacctcgaaccacgggtgattctcaagcagcgtgataaaacgctgaccgaccataccggtggcaccaaggatgccgaccttcaatttttcggacatgatgacctctatgacctctgggtttcgatgggttacttacgttcggacggccgtcatacgggtgaccgtaaaacaatgacattgtacgaaacgcgcggaacaacagtagcggtcttcccagatggtgactgcccgatgaagcgaaggtgatgttctacactggtagccatgtctatcgcatcagtagaggcccaaaaacagctcgaccgtatcgtggctctcggctatccggatgtggcggatatttccgccgccgcattccgctcgctggcccgacccctgatcggggcgctcgagcattccgatttgggatcgaacatcctgctggtgcccacgcgcgaactggtttcgcctgagtcactgatcgcacgaacctccatcaatcgcatggccggcttcaccaccatgccgccgcgtgacatcgccagcttcctgcctcaagacggcttcatgccgccggaaggcccgttctatctggtcgtcaatccgcacaccggcacgtgctatatcaatcgcgagccggacgtggcccgcaagcttatcgactccgatgaacgcctgccgctcaccctcgaggaaggcttggccatcgccacccagcacccggagtggctgctggaaaagaacggcttcaatctgctcggctcacgctccgcagacggccgcgtgccgagcatctggatgagccagaacgcaccgcgactgggagctgtctggcccaattcccgccatacctggctgggcaacgcgtattgcacggcccgtcgcggggtgagtctgttccgttgactccgccagtgtgcgttttctctgtacaaggaaaggcatattgcatcatttcatcagagagaagacgcgatgaactgtgataggtgcggtgctgccaatgacgataggtcccgtttctgcacggaatgcggtgctccgctggcaccgaaacttgccgtgggacacaatacggtcactgatgttccgcctgtgccgatgccacccgccggtcccattcccggccccggtctcagctctagcctcggcccagcgtcgtctgcgcccgccactatcgcggtaccgcagacgccggtaccgggcgagagcgtcgccaaggccgctgcggccgttaaagatatgggtgtgccgatttatgccaagcgagtagccgcaacatccaaggccgatacgaagaaagtcgtgtatacctacccggctgggggcagccagtggacgataatggtgcgatttatcttggtatcccggatccctcagtcgagggcatgccggccgacgttatcggtatggataaggatgaggcgaaaaccgcagtagaaaacgcatcgaacaacaagatcgaggttattctcgagccgcgattttccgccaagaaggattttggcaaaatcgtagcttccaattacatttttggtgcgccgtttgaggcgagcaatgaggaaaatgattataaaatattgcaaccgatacgtctgtactacggtgtgggagccgacaacactgaagatgtggtgaccaccggttcaggtagtgattatgatttcgacccgcacgcggattatgccagcactagcaagagtgacaggagtttgccgtatatctcggctgcgggcgaatggcgtgttacgggcacctattgcaaggatggtttcttacctggctcgggtggatgcatctcgctgatttcgaagggtcaagacggaatgaaatacgggtccggttacccgtatttggtgcgcaaaggcgatgagtccaatggcatatggaacgatcgggtcacactgtgcacgcccaccggagacattggcgggtgcattctgcactacaaggatggttcgattcccgataatgaaaccaatatgcgcaaccacttgttggccaaacagtggggcatgttcgagatgtaccgtggctacggatggccggtatgcgacggcacggtctaccgaggctatggggagacggaagggtgtgaccatggtcaatatgtgaggactgatgatatccctgatggtcagcaatccggtgccacctacgaaatggatgacttctacgtttacttcccggtgggatcgaagatcagcaaactcgaggattccgactatttctccaacaaggcgctggctgcggcgaacaaggcggggaagccagacaccgaccggccgttcttcatcatgcgcgaccccaagggatacaagaccacaagcgtcgaagcatacaagaacggcgagcaaaccaccaatccgtttgtacccggtataccgatgagcggtggatacagcccgctagtgaagatggatgtggctgtcgaatacatcactaagagcggcgcaacatccgatggttccagcaagtccaagaaaaacaagagcagcaagtccaagaaggagcagaagactaaggccccaaccattacgtccagccagttgtcggatattaccgatagtttctcaggctcggatgtggcggccagcgccaccgtaatcgatgattcgtccagctccagttccagcgccgatgcgtcgtctgaagactcggccattgccaatacgtcgcagtcgagtaagaagttcgttgccgcaggcctgtatctgccggtgtatcttgcctctcaaggcaacggcaatgcggaaggattggcaaatacgatgatgaccggcatggataacagtgccggcaatcaggctgtcagggcccttggcggatggagtgctgtcaattcatggctgagttcccatgggtacagcggcaccagcttcaaccgtgatttcggtgatgtacaggccagcaatgctggatatgagaattacagtaccgctcgtgacgcggcccgcatgctggttgccgttgatgcggtcggtggcactggtctgatgaacactgatattgcttcggagggcgtggtgattccgagcggcatgaccgtgcatgcacatcgtggcatgggcatccagaacacgtggaattacttcgccatcgtggaggtgaatggcaacaaggccgcggtctctgtggtcacgcaaaaccaaggtcaggatcgtgccgctcagctgatgagccaagtgcttgcctcggtggatagcacgttgcgcaaatagtacaagcagtatttgcacatgcaactgtgtatacggaccacgccttttggttggcggctgagtggggactattccatcgcgttcatttcccagtagaatgagactatagtgcgtcattcgaccagagagaagagcaatgatgatctgtaagaattgtggtgctgacaatgatgggggaagccggttctgcatgcactgtggtgcgccgctaaccgacgtgagtgctcctgctcctcaggcggcggccggcccgattccagtgccgctgccggacaatactatgacggtgcttgatcacccgccgctgcccggcccaaacgatgggaacgcctatgggcagcccggcgtgccgacatcgagcggtgtggcaggagcgccgaccgcaccgggagcaagtcatactgggtcgatcgcaccgggagcagtgccgcaggccgctccgggtgctcctgtcgctccgggcgcagccacgccgccgagcggcacaacgaccgcaaccgccacattgccgaatctttcgggcaagcgtggcccgaatacgctgattatcgcgctcgtggcggtgctgctggcgttgatcgtagccggtgtggctttattcctgacgtatcgtgccgaggtgtggggtggtaagtcgctgcctgatccggcgtccatcgcctccagcgtcaccgataagaacggcaagaaggcatcggtggtcaaggccaaggatgtgaccgaggcgttgaaggccaagggcctgaacgcgaagacggttccggtgttctccggcgaggatcgcggtgtgttcctcggctacgagggcacgaatcctggcgctcgcgtcaaggccggttccacggtggtggtgcaggagtcggccggtcccggtgtgccgaagggcacggtcggcaaggatgtgaacaaggtgacgaacacgttcgcgaatatgggcgtgccgattcactataagaaggttgtgatttcgccggacagcaagactccggaagggcaggtcagcgtcacgtacccggctcccggtgtagggctcaccgatgacgagaaggacaacggcatttacattggcgtggcctccaagggcgatggtatcccggtggatattcttggtgcggacaagaacaaggccgtcagcgacttggagtcgcaaggctacagtgtggatttggaaccgcattactcgtcagagaaatacgtgggcaagatttccggctcgtacccggctccgggatccacgttgagttccggccagtcggtgaccttgtattacggcatcgataagtccagcaacatggacgtgctgagcaaaaccaactcgtatgacaacatcaagatggccagcatccacgcgtccgcaatgatcggtatgtactgcaagagcgaggtgacggatgccgacaaggactgcatcacactggagcaatcctcgatgaatccctttggctccacttcatccgaggattatcagtacctgcaaatcaaaggccatgagcctgaagacaaggccgatgtgttgggcctgaccaacttctctcaggacatcagcggcgcgatgctggaagcggattcggaatacggcatggccgcggacaaattgccgatgaaaaaccatctgctgttgaaagactggggtatgttcgagctgtacgcgggcatgggtctgccgaactgcggctcaaaggtgatgtccgcttcgataggcgagtactgcgtgaacggcaactatgaacgggcgtcgttcgacgatggcgaaatgacgccaccggccggggctgagaacgggtcgaccggcatgacctacgacatgaaggacttcctggtctacttcccggccggttccgatgccaagtcattggatgattccggttacttcgacgccgccgaactggcgaaggccaagaagcagaaggccgtggataccagccgcccgtacgttctggttcgtgacaagagcctgtacagcgagatcagtgtgagcgccagccggggcaaggacgtggacccgtttgtgccgaccaacagcagtatcaataactatcagaacgcgctggtgccgatgaggccggctcccagcgattcgaccgtctactatctggtggagcagaacggcgatctcgactgggattccctgccggacgccgaggtcaagggcactggcgataaggccgcttccggtgagacgaccggtgacaagtccaaggacagcggcaaacgagacgccacattcaaagaggccatgaaacaggcggcaggtaactatagtttcggttccggtgtcggcgcatggggaaccgtaatgaaagtcaataaggatggcactttctcaggctcctaccatgactcggatatgggggccacgggagacggctatctcataggaaacgacgtcgatacgctgaacggcaaggcattgctcaacgtgacgagcggagcggataagggatacacgttctacgatttctcgtagtgattcagctgccgtgcggagcggcggggaacgtgaaggaccggcgcgtatgctgtgcgaaacagcattacgtccctagactggtgaggcatgacgaacctgcgattccgcgaagacggcagcttccgcgtgctgcaaatggccgacatccaagacggccccaacgtgctccccgataccatccgccttatccgtgaagccattcgcaaagccgacccggatctggtggtgttcaccggcgaccagatccgcggttacgatcctgcctacatcgacactttcctgcgccgccgtggcgaggaaccgggcgcttgcgtgcgtgcggtcaccgaggtcgaggccaagctgcgcggaatcaagcggcgggccagagaccgcgtgaacaatcgtctgctggccatgaagtccgacggcagcgattccgacgcccaacaaaccgcgtccaccgcgtccacgctggtctactccacaacatccgatccacaggatgtgccgacgactttggacgagctcatggacgagacccgtgacaaagtccgccgcacgtttgccggcttccttggcccggtcatcgaagcggaagtgccgttcgctgccacctacggcaatcacgatttccagtgcggcatcctggccgacgagcaggacggcatctaccgcgaattccccggctgtctgaacccagtcgacagccttgagccaggcacttttgccctgcccattgaggcttccgacggatccgggcgcgtagctatgtccgtcatgatggtgaattccggcgattacgccggcaagcccgaagagaacgacgcccaatacccggcctatgtggtcaatccgcgtggtcttgatttggctgattccgatgggtatggcacgccaagccccgaggcgatcgattggctgggagccgtacagtccgaacttggcgaacgcaacggcgacggtaagccggtgcctgccatcgccttccagcacattccgccgcaggaattctacgattgcctcaaagaggttcccgcatggacgccgaacgcggtggaaggcgcacgtacccacgccggtcattgctacgtgctcaaccatgagatctgccggccgggatcgcggctgggtgaggcgattggctgtgcagacgagaacgtcggtgaagtggacgccttgcgtgaggcaggcggctacttcgcgctgttctgtggtcacgatcacaagaacgccttcgtgggccacgcgcatggcattgatttgggctacgcacccacctgcggattcgaatgctatggccccaagtcgcgctatcgaggcatccgcctgtttgaattccatgaaagcaacccggccggctacgtgacccgcatgctcacctggggtgatctggtgggccgatactccagcaacgaggtgcgcgtctggttcgaggaccactgcgtgaccggtgccatcagcatgcgtaacgaattgcgccgcccgcaggtattcgcagtgctggccggtgccatgagcctcggttttatggccgtcatccgctcgttggtgaagaagcgataaaaacacgtgaggccggtatgaactggcctcactgagtattaagcgttggatccgcctgaaccctgcttaactgttatttatttctgggtgcggataaaaacaccagagccttcggtgttaatcagcatccaatcggatggtccatccggcgttccacgcttgacgagcatggcctgtgcttcagatggcaacgcatcgctggaggttccagatggatatccggtgaaggtgccacacgggctgaatcctgacttgtcggatttggacttgtcgtcaattttgaaagccgacgcatcacacttcagcgttaccgtgccatctgaattggatgtggcggatgcaaacttaccgctgaacttggtctggatacgtggcgcattcgctgcggaatcgccactgctcatatctgcctcgtccacagtgccggagaagttgccccgatcatccaacgaaatggtggtgaaggcgctgccatcgccagcaatcgtgtaagcgtattgggcaccggccaaatcagaaaacaccttcagtgaggccgcatccggtgtgccggatttcttactgctcttgttggaatccttggaatccttggaatccttggagttgcccttgtccttggtgctgggcgccttcacgtccgcgtccggcagggaatcccaatcgggttcggacgcttcgaccagatagtaggcgtcggcgtcgcttggggccggcttcatcttgacgatgtcggacttactgccgttgtatccgttgtagggcaggaacggattggcgccgttcccggcaccgttgtatggagcggtggtagtgtcgtagagcttcggatcgcggtacagaatgaacggtcgattggtgtccaccgccttctgcttcttggctgcggcaagcgcgtctttgtcgaagtagcccttatcttccaacccctgcaagtcggagccggtaggcactacgaggaacagatcctgcatgtggtattcgccggatgtgggccaagaatcacccatatgcacgccattgccgtcatacattttgccgttggcccaaaagttggtcaggctgatatgcggaatgagctcgaaggcgccataatcttgtgtgactaggtagtcggctttcggactgctgcagtacgcctgctgaatggcgtcgcaggcaatcagagcaccgtcgtaatcgccggtatagtcagcattatcactgccgccttcagtcaccttgtaattgtcgatggtgatgcacttcccatcattagtgcaccactggccgtcggctgcgcgtgtggtaccgagcagcgcgtcaccgcctgtttcggccaaatcatggcctgtaaaggcttctttggtgtcgctggcatcgatgccctgatacagggtcacgtcttcgccggaagacagggacgatcccggagcggggctggcgccggaaaccttacccacgtaatccttggaagagaaacgctgttcaacggtaactgtgtggccctcagactcgagctgggatttgacggtatccacatcctgacccatcacgtcgatgggcagagcggtgtcgtcacccttggcggccacgccaatgtagatgcccttgtctttctcgtcgtccttgaccccagtgccggcggcaggataggtggccacaaccgaaccttcggggttcttcttggcgtcagagacaaacaccttcttatagtggaccggaacgcccatatcggcgaacgtctcagtcaccttattgacctgtgcgcccagagtgtctttcggcacgccggggccggcggattcctgcaccacgaccgtggagccggccttgacacgagcgcccggagcggcgttcttatagccgatgaactcacccgaatccttgccggagaacaccttctccgttttcgcgttgagtcccttggccttcagcgcggccgtgacatccttggccttgacggccgacgccttcttgccgttcttatcggtgacgctggaggcgatggatgccgggtcaggcagcgacttgccgccccacacctcggaacgatatgtcaggaacaaagcgacacccgcgatgatcagggccgccagcaccgccaccagcatgatgatgagtttgtttgggccgggcttggtcgcggcggttgtggttgccgttgccggggccgtctgcgtggccgtggcaacggtcgcagtgggctgcgtagccgccggtgcggagacgaccgccggagccgacatgccagcagcaccctgcggcataggaatcggcggcactgccgcaccgccggggccggggactgaagcggcagccggagcgggagtcgctcccgctggcgtgggcgcaaccggcgcgtcctgcggtgtcatggaagcactcgacgctgcagtattcgcttcggtggcggtgagcggcgtgccgcatgtttcgcagaacttgctaccttccgcgttatcggtatggcaattggggcaaagcataaatggaatctcctatgaatcaacgagactgcggagccgaacaataatggtctgattggtgcggccatcggcaagcgcagtaaaaacactgccccggcaaatatgtcggcaagtgtagaaggacgggattgtttcagccgcgcgcgttgtagtcggcggacagatcgttcatcgcatgcagcagcttgtagaagtagaccagcggtcccacgatgatgaaaattcccaagacgtcccacagccagaaggtggctgcggtaacggtgggagtcatgccgcgggcctgctgctcatcgccaatacgggcgctgaggcggtggtaccacaccagccagccgatgcccagcgtcaggccaccgatcaggaagaacatcaggcagtagtgcatcgtgcgcttgccgtcacggcgcgaagcgatgaggttcagggtctcgcccacttcgctcatttgccagatatcgtaaatgccgaaagtaataatgccgagcaggatgtacttcagcaggctgcgcttggtgcgcagttggttgaccgggcgcgggttataggtggcttgctgtgctgcgggctgctgtgggaatgtcggctgtacggcagccggagcctgcgccgggaactgcggcgcggcaggctgagcatattgtggcgccgcgaactgcggcgctgcgggctgcgcggggcgtggtgctgcaggctgctggaagaccggctgcggtgctgtaaattgcggagctgcgggccgctgaccgttcggttgagggatttgcggcattggaggcatacttggatttgtcataatggacctcttctctcgctgtggaagcccatgcgcctccacgcatagttgcaagtctagtagtactgcgccgggaagcgctacgtgtgctggcatattgtgagatgaacggggtgttggaatgggccgtcgctaggatggaggaagttacgcatgttaccaatgcgtaaacgaatatccaataagcgattgtatgaatggttcgcacagtaaaggaggaacaatgggtcagggtcaatcatccgtttttgatctcgcggcagtggctgcggcgtccaatggggggaacaacgacccgctgctgcctccggcacgattcatcggcgatccgcagaagccgagccgtatgccgtataacaagtacgccgcctacgacaagcagatcccgtttgattacccggagcgcacgtggccgggcaagcgactgcagcgcgcgccgcgctggtgctccgtcgatcttcgcgacggcaatcaggccctcgtcaacccgatggattccgagcgcaagctgcgtttctggaacctgctcgtctccatgggattcaaggagatcgaggtgggcttcccgtccgcttccgaaaccgatttcgacttcatccgtatgctcatcgagcgtgagctgattccggacgacgtgaccatcgtggtgctcacccagtgccgcgagcacctcatccgccgtacttatgaggcgctcaagggtgccaagcgcgccatcgtgcacttctacaactccgtgtctgtgctgcagcgcgaggtcgtgttccgcaagaacaaggaagagatcaagaagctcgccaccgacgccgccgaactgtgcaaggacctcgagaacgaggccaagggcatcgacctgtactacgagtactcgccggaatccttcaccggcaccgagccggagtacgccgtcgaggtgtgcaacgccgtgatcggtgttatcaagccgactcccgagcacccgatgatcatcaacctgcccgccaccgtggaaatgaccacgccgaacgtgttcgccgacgaagtggagtacgtctccacccaccttgacgaccgtgactccgtagtgctctccctccacccgcacaacgacgaaggcatgggcgtggccgccaccgagctggccgtgctggccggcgccgaccgtgtggaaggctgcctgctgggcaacggcgagcgtaccggcaacgtcgacttggtcacgctgggcctcaactggctcacccaaggcatcgacccgcagattgacctgtccaacgtgcccgagatccgcaagacggttgagtactgcaaccagatcaagatctccgagcgtcacccgtacgccggcaacttcgtgttcaccgcgttctccggctcgcatcaggatgccatcaagaagggtctcgaggctcgtcaggtggccgccgagcgcgctggcgccgatctcgacagcttcgtgtggcttgtgccgtacctgccgatcgacccgaaggacatcggccgcacgtacgaggccatcattcgcgtcaactcgcagtccggcaagggcggcatggcctacctgctcaagaccaaccacaatcttgacctgcccaagcgtctgcagattgaattcgacaagatcgtgcaggactacgctgacacgaccaagaaggaagtcaaggacgaggatatctggcgtctgttcaaggacgagtacctgccgatcgaacagtccggcatgaccgccgccggtgtggttgtgggcgatactcatgacgcctcgctcgcgccgtggggccgcttgaagctgctcaaggtggccgtcagctccggtgaggatggctccgataccgtgctcaaggctcgcctgctcgaccgcggcgtgaacgtcggggtcgatgcgcccgtggagcgcgaggtctccggcatcggcaacggtccgatcgccgccttcctcaacgccatttccaactttggcgttgacgcctcgattatggattacgtggagcacaccatgtccgtcggcaccgacgccatggccgcctcgtacgtggaatgccaggtcggcgaggccgatgatgcgcagatcgtgtggggcgtcggcatcgattcgtcgatcaccaccagcgctctgaagtcgattatctctgccatcaaccgttcccagcgcaagcgctgagcgctaacaacaaaacaaagctccctctgattgcatcagagggagctttgttgtctgtgcttacttactactgggtgacgccgttggtgccggtgttcccgccggtgcctccggaattaccattatcgttgccggtattgttcccgttgttcccgccggtattgccggtattgttgccattgttgccattgttgccatctccgccggtagtggtgccgggataattcggacactcggtggaatagctcggattggcgaggcactgctgggcgaactcctgggcctgctgttgcttcttggcttcctcttcggccgccttctgctgtgcgtcctgctcagcctgcttctgcgcgtcttcggtggactgcttgttggtgttgttggacaggccgctgctctgtcccttgcccaagccccaagtgccgtcgggtccaccgatcttgccattgtctttagcggtcgggaactgctccacctcggtaccttgcaaggcctgagccatgaactcatggaacaggtgggcggggtatccagtggaagagatgccgtatccggagaaggccggcaccgcctgcggattgcccttatcgtccgggttccagatagcccacacattcatcatgctgggggtgtatcccacgaacgacgaagccatttcgtcgttggcggtaccggacttgccggcgatgggtcggcccagcatgttggatgtgccggccgccgtaccgtacgtggtggtgccctgcatggccttctgcaccaaagcgcagtcgttggcatcgaacaccttggtgcctttgctgggcgcgttgtacatgtccttattgttggaatcaagcactttggacaccatgtgcaaggtgctcttcacaccattgttggcgatggtcgaatggccttgcgccaaatcccacacggtcagggcgttgatgcccagcacgttgtacatggagttttcatcgatatcgccctgaatgcccgcttcatgggcgattgcggccgtgcgcttcggcgtcagatgctcattgacgttcatgaacaccgtgttcaccgagttggcggtggcctgatacagattgatgttgccccagttgttctccagagcgttattcacctcttgatccaagccggtgaagtgctggtgggaattgccgttgaacaacgtatcgaagctgacgccggattgcgcggcccccagcaaagcgaacggcttcatagtcgaacccggttcgaatacggcctgatcggcattgttgagctgcttggacagataatctgaaccggcgtatacggacaatacttcaccggtcttcgggtccagcgctatgccgccgatttgcagggattcaggcatgtcgtccagacgggtgtcgccgatggactgcataaggtcctgcttgctcttgtcgatggtggtgatgatcttgtatccgccggtatccaaatcctctttggtaaaggccttggactgcaccagctcacggcgcaccatatccagcagataaccgttcggccccgcgtattcgttttgctgcgccaccgcggcagtctgcgggaacttggcatcagtgtgctgcttggcagtgatgtaaccatcctcctgcatgatgttcagcacacgcttgaagcgcgatttggccatatcggcgttatcggccggatcccacgtggacggtgacggaataatgccggcgatcatcgccgcttcagacagcgtcagatccttggcgtccttattgaagtatgccttggccgctgcctggatgccgtaggagttgcggcccagatagatggtgttcatgtaattgcacagcacctcgtccttggactcggtttgcgcgattttgatggccacgatggcctcgcgcgccttgcccacataggatgtggtttcgcccatgtaataccgctcggcatactgctgggtgatggtggaaccaccttggcgcgtgcccttggtcacattattaatgaatgcgcgggcgatgcccctcagatcaagacctttatccgtgtagaacgtacggttttcggacgccacaatcgcgttgccgatgtagtccggcagcccctcgcaagagatgattgaacgattctgttccgcgtaggagccgatcgcggtggtgccgtccgcgtaatacacggtggttttctcggccaacgcgaacttttcgggttgcgggacctcggtggtggtgtacaggtatgcgaatactgcgataccggccagcaagcccagtccaatcagggagaagaagatgcccagcacccatttcagtacacggtgcttgccttttcctgtgttctttttcttcctgttcggggctcgatggctattggaagccttgtggcttgcgtggcgggaacggctctcctggggcgtataggggccctcctgtgcggagtggtcggctctgctttgcgcggtgcgcggttgcctcagagcggggccattgcctcccgaatgtgcacgacgagtataagaagccatggtgtccaccgtaactgttggccttgaacaatcgtttgacgtgagcgtaaccacacgcatttatgccggtatttttccggaattcttacaattgggcacgttccttgatgctgcatgaatattgtctgaatgcgctggttggcctgccgtgcgacccggcgcgcacgtttcgtgtcgctgcgctggtccatacgtctccatagacttatccccagcctccacgcggcgctatgtcacccaactcccccagggcaggaatgcagcaagggtaagtggcctctgacgggtgcgtggaggttttccatttgtgcggatttggccgtgagctggcacgagcacggctccctgtccggggcgcggccgtacagtcgaacgtatgaatgacgcacagacccctagaattcgcgacccgcatgcggcggtcaatctggtcggctcaggcgcagcgcagcctgactcgtcgtcgaacgttgttgacccattggctgcgctcggcccggtctccggttcagatgcatcggcatccacatcaggctccttaggggatttcaggccgctgggcatggacgatgcggatggggcatctgatatcgaccgtggcttggcccggcttgacccgcttaccgtgcgcccgcgaatctccagccgcgtactgtgcgtggtattcggtctgctcctgatcgctattggcttcggcgtgtggtgggggtgcgtgtttaccgaaaacggacaatcgtacgacgaactggtctggaaaaacctgcacaacgatgtaccgtcctggaccaccggcatgatgaacgccgtcgcacaatcctggctggttatcgctgtcagctgcacaattgccgcaatcggcattattacggcgctgattcgacgccgctggtggttggccgggcaaatcgccgtgttcgccgtggtctgcttggccgtcacccgtatcaagggtctgttgccgcgtccgttcatcatcaacactgaatcgcctgccgctaattccgcgccttccggacacacgatgctggccgcagcctgtgcggtgattctgctgcttaccgtgcctcgcgcggttcgagctttggcgggcgtcatcggcgtggtttgggcggcgaccgtcggtgtctctgtgatatacgggcaatggcatcgcccttcggatgtggcgatgtccatcctgctggtggcgggattggccctgctcgctctggcggttacacgcaagtccggcatggacgagccgggccaccgcgtctcctcagtgagtgtgcagatcgtcggcagcgtgttgattaccgggggcctgctgttgctcgcctacagcggttatgtgatctggcaggtggtgccggggctcaatgtcagcgccagttgggcggttcagggggcgaatgtcagcgctgttgtgggcattacgggtgtggccatgctcgcattcggactgttgctggccctacgtcagatcactgcagcgcccttaagcaggctgggcctgatcggcgctccgccggcaccgcccaaacggtaaaacatgaggtgcgaacggccgaatttgcctggcacaacggcggaatttggcagttggatatgattcatgagtattatgacgccagaaacgtcgtgtgtttcgcgcaatacataaggagtgggtatggctaccaaactggtgattgtggagtctccgaccaaggcccacaagatcggtgactacctgggcaaggggtacaccgtcatggcgtcggtcggtcatatccgcgacctcgcgcagcccagccaggtgcccgcggcagacaaggccaagttcggcaagttcggcgtggacgtcaacgacgggttcaagccgtattacatcgtcgacggcgacaagaagcgtacggtcagcgaactcaaatcagccctgaagaacgccgacgaactctatctggcgactgatgaggatcgcgagggcgaggccatcgcgtggcacttggtgcagaccttgaaacccaaggtgccggtcaagcgcatggtgttccacgagatcaccaagaacgccatcaacgcctccctgaacaacacgcgcgacgtggacggcaatatggtcgacgcacaggagacccgccgcatcctcgaccgtctgtacggctatgagctgtcgccggtgctgtggcgcaaggtgggcccgggcctgtccgccggccgcgtgcagtccgtggccacccgcctgatcgtggaacgcgaacgcgaacgcatggcattcaagcgtgtgccgtactgggatatcgtcgccatgttggccgcgcctgacgcgctgggggagcgtgccgaattctccgcccgcatgatcgcgctcggcggcaagcgactcgccggctccaaggatttcggtgccgacggccagctgaccccggacgggttcgcggcgaacgttcgccagcttgatgaggctggtgccactgccgtggctgaagcgctgaggaccgccgatttcactgtgatgtcgatggaaaccaagccgtaccgccgccgcccgcagccgccgttcaccacctcgaccttgcagcagaccgccggcaatcgcctcggcatgggtgctcgcgtcgtgatgcgcgcggcccaaagcctgtacgagaacggctacatcacctatatgcgaaccgattcggtgacgctgtcgcaggaggccatcaccgccgcccgcaacgccgtctcctaccatttcggcgacaagttcctctccgccgagcccaagcagtacgccaccaaaaccgctggcgcgcaggaagcccacgagtgtattcgcccggcgggctcgcgcttccacgacccggatgagctggcttccaaacttcccggcgaccagctgcgcctatacacgctgatctggcagcgcacgctcgcctgccagatggctgacgccaccggctccaccgccaccgtgcgcctgtctgcgccggccggccccaccgagggcgaggccgtgttccaagcgtccggcaccgtcatcgaattccccggctttatgaaggccacgggggaggggcgcaagcccaaagccgccgctcccggcgctggggctggctcggaccaggctgctgccgccggcaagacggacgtcaaggccgtcaggggtgacgcctccgaatccaacacctccctgccgccgatgagcgtcggccaacaggtcgaggcaagcgacatcgaaccggacggccatgaaacccagccgccggcccgttataccgaggccacgctggtcaagacgctggaggccaaggagatcggccgcccgtccacctacgcgagcatcatctccacgattatggatcgcggctatgtgtatgagcgtggccgtgcgctgatccccagctggctcgccttctccgtgaccaagttgctcgagacgaacttccccaagctggtcgactaccagttcaccgccgagatggaaaacggccttgaccgcatcgcccacggcgaggaatccggccgcgactggctcacccacttctacttcggttccggcgagggcgccgcccgcaacgccgacgaggcgcacgaaggcctgcaacagcaggtcgcgcagctcggcgagatcgacgcgcgcgccatcaacaccatcgacatcggcgacggcctgcacgtgcgcgtcggccgttac

SEQ ID NO: 388 - DNA, 21555 bp, Unknown
  R42_10m  MAG No. k141_45866
tccaacaggtctgtacgcataccgtgctcgtccactggaacgccgatgatgcgcgcatccgccgagcggaaggtctgcaatgccgggaagaacgtggattgttcgaccagcacgcagtcgccggggttgatgaacgcgcgcacgatgaggtcgatgccctgctcggagccggagagcaccatcacgttgcggacgccgcattgtacgcctcgtgtgcgcatatgttcggcaagcagcgcacgcaactcttcgaatccctcgataggtgattccggttggccgtcgaattcccgcgattcgaacgcctcgatgctcaccttgcgcagcagatcgtccgggatatccgccgggttcggcgaaccggtggcgaagtcaataatggtgtcgccgcgctgcgcccgctcggccgaggcgatgtcatggtaggtaaaccggttggaataatcagagaacaacaccgaccatggcggacgcacgacggttggctccgggccctgaaccgagcggctttcacgaatcgtatggaccgccgcagagctgctgccctggtccgtcgtcaagaaaccagtggaggtagcacgttctacgtcgccggaagaggaggcttgcgatgttcccatttctgccgacgatcgtgttgttcgcgttattgcattcccgaagtcactgtttgacgtgtgcggtgttcggcttgcggaggcagccggcagcacgaacgtgcctttgccgactttggaggagataagaccttcgtccttgagctgctgatacgcctgcaacaccgtggtgcgattgacttcgagacgcgaggacagctcgcgttcgggaggcaggcggtagccctcggccatcgcgccggagacgatctgttcacgcagctcggcagccagctgccggtacatcggcaccttgctgcgtcgattcagctcaagctgcatggcagatcgtctccttgattcgtcagtcggataccagtctaacggcagacgaatcgactacagcgacaggaagagctcgtggatgcgggtatcgtccgtgagttccgggtggaaggcggtggccaggatattgccttgacgcaagcccaccacgtggccatcgacttcggtttcgaccgtggcctcagggccgaccgacaccacgtacggtccgcggatgaataccagtgggaagtccgtgatacgctgcggatcatccgctgcaccaaaatcggcggtggcctggaaactaccgagctgacgaccataggcgttgcggcgtacgacggcgtcgagcgcgccaaagtagacattgtcgtcattgtcgagctttttagccagcagaatcatgccggcgcaagtgccgaataccggtttgcctgccttgatgtgggcggcgatcggctcgaacagtccggtcgaatgcaggagcttgccctgtgtagtggattcgccgccaggcagaatcacgcggtcgatggattcatcgaaatcctcggccgcgcgcagcagtttccacggcgcaccgagcttgtccagcaccgccgcatgttcggcgaatgcgccttgtacggccaggatgccggtcacgccgtgcttgacgttttcgacgtccgcggactcttctttggaaatatattcaacagctacaaccatgttgtcctctccggcttcgactcccgtcactcgccgcgagcggccatgatggtctgaatctcgtcctcgttgatgccgaccatggcttcgccgaggttttcggacagcttggcgagcagatcggcgtcctgccagttggcggtggccttgacgatggcggcggcgcgcttggccgggtcgccggacttgaagatgccggagcccacgaacacgccttcggcaccgagctccatcatcagggcggcgtcggccggggtggccacgccaccggcggcgaagttcacgacgggcagacggccgttgtcgtgcacgtacttggccaggtcgtagggcacggccagctgcttggcggcctcgtagacctcgtcgtcgcgcaaggccacgagctcgcggatctgcttgttcatggtgcgcatgtggcgcacggcctgaatcacgtcgccggtgccgggctcgcccttggtacgaatcatggcagcaccctcggcgatgcggcgcagcgcctcgcccaggttcttcgcgccgcacacgaacggcacgtcgaactggttcttgtcgatgtggtacacgtcgtcggccggggaaagcacttcggattcgtcgatgtagtcgatgtcgatggcctgcagaatgcgggcctcggcgatgtggccgatgcgcaccttggccatgaccggaatcgagacagcttcctgaatgcccttgatcatggccggatcgctcatacgggagacgccgccggcggcacgaatgtcagcggggatgcgctccagcgccatcaccgcgcacgcgccggcatcctgcgcgattttcgcctgttcgggcgtggtgacgtccatgatcacgccacccttgagcatctgggccagattacggttgagttccgcacgattctgcgtcatgagtttcccttcgttcgacgctgcttggtatcgcgcttcattattgaacggattggattggccccacccaaaccagtccaatttggatggggccaatctgcaacttctgcacccatccaatccggcaaccggttgtatggccttatgcatccggcacgtattcgaagatgcgcgcaatcagtgggaggtattagccgacggtgttgccgtagatttgggcttggaggtctttacgggcggtttccatgcgggtgatctggccgaggagggttatcttctcttcgccgtcgggcagctgggccatgcggcgtttggccaagccgatctggcgcatgaagcccatgtccagtagccgggtgagcagttcggtggcatagcgctgctcttccggcgtggcagggcgtagctgtactgcggcggcaccgccattcacgccaacacctcctcccgacacgttggcctgcaccggctgcgcaccgctaccgatgtcgtcgccaggcagtggcaacggcatgacggccagctcgttgatcacctgattcagcatcggcccgccggccttggtgaggttgtgcatccacagcccctgcggggtatcgtcggatggcagtccgccggcggccgcgatcgcctggaacagggtgcggaacaccgaagtcatgaaatggtcgatggtcagctgcccgaacatggtgcggtcgatggcgcgcggcacctgaatcagcacggccatgaactgctgttcggcgatgaatacggcgtcgtcgatcttgaaatatgcctgttcggcggcgtcacggcgctccaacgccttgcgcgtggccggattggcgtatgggttggtgccgggttccacacgcggctcgtcacgctcgaatcgacgtttgggcgtgtaggcgtcctcatcgcgtacatgcatctgccggcgcgcgttcatcacctcgcggcgcatcacctcaagatccacgccgatacggcccgcggacttgcgcgcgtaagcgtcccatagggagcggtcgcgaatctgcgccaccagcggggccacggctttcatcgcacccacttggccgggcgtgtaggtcaggtcgaaccggccgatggcggcgtcgatcacgaagtcatacaacggtttggcgcgggcgatcagcgagcgcaccgcctcgttgccccgttcgatgcgcaggtcgcacgggtcgagattgtcgtcggccacggccacgaaggtttgggagaggaaggccgaatcaaggccgaaggcatgcagcgcggctttctggccggcggcgtcaccatcgaacgtgaacacgatgcgcgagctcaacggctggtccttgaccttcaacggcccgaccagctggaccgcgcccagcgaatcgtcggcgatcaggcggcgcacaatcttggcgtgctcggcgccgaacgccgtaccgcacgtggcgatggcggtgtcaatgccggccaagtgcatggccatcacgtccgtatagccttcgacgatcaccacctgtcgcttcttgacgatggcggatttcgccaaatcgatgccgtaaagcacctgggttttgcggtagagctgcgtgtccggcgtgttgatgtatttggcggcgatctgatcgtcttcgtatagtttgcgcgcgccgaagccgagcgtgcggccggtcgaatcgcggataggccacgtcacgcggccgcggaaatagtcatagatgccgcgctggccttggcgggccaagcccgcgtcgaggatttccttctgcgtaaaccccttggaggccaagtggcgcacaagattatcccaaccttggggcgcgtagccgcaaccgaaacgttcgcagtcggcttgggagaagttgcggcctccgagcagcttgcgggcgggcagtgcttccttggtcaggatctgggagacgaagaagcgttgggcttcctcgcaggcttccagcagtcgggtgcgcttggagccggtgttctcgcggttcgggccgttgccgctgttctcgtagtgcagctcgatatggtacttgtcggcgagcagttccacggcttcgcggaagtcgatgttttcggattgttcgacgtatttgaatacgtcgccacccaagccgcagccgaagcagtgccacacgccgagcgaggggcgcacgttgaagctgccggttttctcgtcgtggaacgggcaaaggcctacgaatgtgccggtgccggagggcttaagcgttacggtcgcagatacaatgtcatacaggtccgcggcggcgcgcaccttctcgacatcctctttcttaatcattccgaccataagtctctagagtaccgcctcacctgagacacggtaaatttttaccgtcggttatcatttcttccgcgaaactcccttcagtcgcctacagcgacagctcccctcacccgaggggagctggctcgcgcagcgagactgagggaagcacccgtccaacacgccctcagcacaagatggagtgcagggccagagcggagttgtcggtcaggcttgcgacctgatcgatggcgacgcgcaggcgctcgttgtcattggtggattcattccaatcggccaggaactggctttccaaagcgtcggatgggagcggcgaatcggccataagcacatcgaccaaatccgatacgatcttgagctcctcctgatggaatggctcgcgctcgcgaggcgccatgacgaagtacacggcgatgcccttcaacgccacgatctcgtaattcgtgtcctcgggaatcacgatgttcgcggaataccgggtcaacggcccgggcccatacgtgtcgcgcgtggcggtttccaccgaccagcagaagcgaccgatcaaatcggacgtgatgttcttgagctgtgccaacgattcgcgcgaaccattgaaatgtgcagggaacaaatgctctcggcgcaatcgcatgaacgcggccagcagcttgtcggcatcccacttcgccccataccatgcgcgcgtctgctcgatgatgtggtccagcatcttcggatcggcgagcacaatcggatcgaacgcgccggtggcgatggaatcctcgacatcatgcacggagtaggcgacatcatccgaaaggtccatgatctggcattccatgggcttggtggcctggggagcgccgattttgagccagcggaacaccggttcgtcatccgggtagacgcagaacttcttcgaccgctcccccttggggtgtcggtcggcttcggccaaggtccacgggtatttgacggccgcatccaaggccgcacgggtcaggttcacaccggccgaacgcccgtccgggtgaaagatcttgggttcgagccgggtcaggatacgcatggtctgtgcgttgccctcgaagccgccgatattgctggcgatgtcggcgagcgcacgctccccgttgtgcccgaacggcgggtgaccaaggtcgtgggccagacaggcgcagtcgaccacgtccggatcacagccgagcaatgcgccgatttggcgaccgatctgggcgacttccagcgtatgcgtcagtcgggtgcgggcgaaatcgtcggtaccggcaatcagaatctggcttttcgcgcccaaacgccgcaaagcggacgaatgaatcagtcgcgcgcgatcgcgttcgaaagccgtgcgcgacttggatttgggcggctcgggtgcccatcgctcctcgtcgaaggcgttgtagccctcatcgctcagcacctgttccccatccaacgttgtttccatatgccaagcataggcacacatatcggccgcagtaatcccgacttcccgaatatgtgccactgacgtcaactcaacggcacatattcgggagattggggccgatttcccgaatatgtgacgctcagcacatgtcagtggtacatattcgggaagaagggattacggggtgccaccgtatggcggtaatgcaccttatagcagcgtggcggggtcgagcttggcgaggtcggcggcgggcagtacttcggcggcatgctcgtaaaggcgcgggatgcggttgcgcaggcaggtgaagatctcgtagctgatggtgtcggcggcgcgggcccaatcgtcggcggtaggctcaacgtaatcctcgccgcggcccgggccgaacagttcgaccgtgtcgccctcgtgaacgccgagttcggcggcggatccgtgcaggtccacgatgaactggtccatgcacacgcggccgcacacgcggtagagcttcggaccttcagtggtcatgatgcgcaccgggccgcccggcttctccacgtgcttggcaccttccatatcgaaaccggaagcggagcggtggatgccatcggcgtagcccagcggcacaatagcggtcgaggtgttgttcggggtcaggtaggtgcggccataagagatgccatggccggcctccacatccttgaccgtgccgagctgcgcctgcaggcgcatggccggggtcagatgccagtcgcgcggggtgcccatcgcgggatcgggctcgtagccgtacaggccgatgccggggcgggtaagttcgaagtgaatctccgggcggtccaaagtggccgccgtgttggccaggtgacggatctccggcggaatgccggcctgttccatgcggcgcgtgaagtccttgaacgttgcgatctgctggtcggtggaggcgacgaattcgggcacatcgggcgaatcggccacggcgagatggctccactgacccacaatatgcaacacgccctctttggcgagcggcacgagtttggcgagcgcggcgtcgaatccagccggcgtgaaaccgttgcgaccgaagccggaatcgaccttgacgtgtacgcgggcgggcttgccgagcttgcgtgcggcggcggccacggcatcgatgccgggcagggagccgaccgatacgtcgatatcggcagcgatcagctcatcgaatggcacttcggtgccgttgtagacccaagtcagaatgcggcaacggtcggggccgatgccgagtttgcgcagcagcagtgcttcatgcgattgcgcggtgccgagccatgtcgcgccgccggcgagcgcggccagtgcggcgggcagcagtccgtggccgtatgcgtcggccttgaccacgcccatcaccgccgtgccggagttcgggccgccgaccacggagaccaggtgggccatgttgtcgcgcatggttttgaggttcacgatggcctgtgcggggtattggcggcgggtggccgcatagttggccttgccctgctcggacgagaatgcgatttcgggtgctgcgttcatgctcataggcacctattgttgcgcaggaatgtgacgtgtggtcacaatcgtttgttttcgcccggcagtcgtacactaatgaccgatatgcggtttctcggaagccgcctttgattcccggcgttgaggcgtgccgggatcccggaaatccgtccggtctagccccatatcttaagtttcatgagagaagaacatggatctgtttcgtaagaaaagcgtggatcagcttgtcgccgaatccactcccctgaagcgcacgatgcgcaccttcgatctgacgatgctcggtatcggcgcgatcatcggcaccggtatcttcgtgctcaccggcaagggcgcgctcaccgccggcccggccctgtccgtatcgttcctgctggccgccgtctgctgcggtttcgccggcctgtgctacgccgagttcgccgccatggcaccggtgtccggctcggcctactcctatgcctatctggcgttcggcgagctcatcgccttcgtgatcggctgggatctgattctggagtatgctctgcaggcggccaccgtgtccgccggctggtccggatacttcaacaagttgttggaaggcttcggactgcacctgccggtcgagctgaccgccgcctacggcaccaacccggacgtcaccacctacttcaacctgcccggtttcgtcatcgtgctgatcatcacgtgggtgctctcgatcggcatcaaccagaccaagcgcaccaatgacgtgatggtgctcatcaagctcgccatcatcgtgctgttcatcgtgtgcgccgtgtggtatgtcaagccgtccaactggcagccgttctccccgtacggcatctacactttccagcccggctccacccagccgtacggcattgtgccggccgcatccatcgtgttcttcagcttcatcggattcgacgccgtgtcctcttccgccgaggagaccatcaacccgaacaagacactgccgcgcggcatcctgctgtccctggccgtttccaccgtgctctacatcgtcatgaccatgatcatgaccggcgtggtgccctacaaggagttcgccaagtacatcgacgccccagtggccggcgtgattctggagaccggcatgaactggctcgcggtgatcgtgaacctaggcgccctcatcggcatgaccacggtgatgctcgtacagctgtacggccagtcccgtatctgctacgccatgagccgtgacggcctgttcccgaagttcttcggccacgtgcacgagaagtaccgcaccccgttcaagggcacctggttcttcggtctgctgaccgcgttcgccggcggcttcatcaacatcaacgtgctgttcgagctggtgaacatcggtacgctgtccgcgttcatcatcgtgtcggccggtattctatggatgcgcaagacccagccgaatgcgccccgcggcttccgcgcgccgggcgtgccggtcaccccgattctggccatcgtattctgcttcgtgctcatcgccggtctcaactgggagacctgggtgcgtttcgccatctggttcggtctgggcctgatcgtgtacttcggctacagccgcaagcgctccaagctcggccttgagcagaaggccggggctgacaccaaggtcgctgcgactgaggactgaggtctatcggctgaccgatagccgatggctgctttcgtgaaaaccgtacgctgagttactttcagcgtacggtttttgcgatatgaggccatgtcggagaccaccctggaccgtatggtcagaaaaagcgtcgaggaggccttgaacgcgatgcccgctaccagcggtgcatggtccgcttcgagcgcaacgtcctcgccagggtcaacccccgcaaccgcgaaatcagacggcgcacgcgcatggtcggcagcttccccgacgaacgcagcgcgttgatgctcgtctgcgcacgcgtgcgctatgtcacgtcgaacgagtggtcgacgcgccgctacctcgacatgtcaagactcggtgagaccgtatgggaagcgaaccgatcatcgccacagggacgggcgaagaccaaagtgcgcaagatatcgggcactaccccagcgcaagctctcccagggcatcaccgccggtgccgtgaaatacccccccccagcagcccggctcaccccagacaaaacgccgtggcgggacgggcctgcgacaggaaaggaagtaagcatcatgctcgacgcattcaccacagcgaaccccgcgccggggctcggacaaggcgccttggatgccgtggccatgaggacccccggccgcacccgctgcatcaacgccgaaaacccggacggcggcaagggccgcgcggccatggcggccagcgcgttgggcccctcccgcaagggaagcccctgcatcagcacggtgaggtccggggaatcggtgacattgatggacgtcgagggccccggcgtgattcgtcacatctggatgacggtaaccgaccgcacctcccccaccggccccgacgtgctacgcaacctgatcctggaattctactgggacggcgaggactccccctcggtgcaatgcccgatcggcgacttcttctgctgcggacacgcccagtcctgcaccatcaactcaattcccgtcatggtcaacccgaaccggggcttcaactgctacttcgccatgccgttcgaacacgcgcgcatcgtgctgcgcaacgaccacaacgaggacgtgcccgcgttcttctaccaaatcgactacaccgaatacgaccggctgccggccgacacgatgcgcttccacgcgcagtggcgccgccaacgcgtcaccgaactcgcccacgactacgtggtgctcgatggcgtcgaaggacacggcacctacgtcggcacctacctggcgctcaccgcgctcgaaagccgctggtggggcgaaggcgaattcaagttctacatcgacggcgacggcaaataccccacctggtgcagcaccggcgccgaggactacttcggcggcgcctggagcttcgccgaattcgacgaacacggccgcatgtacgagcgcaccttcaccggcccatacctcggcttcccgttctactcgcagaacctcgccggacgcgaaagcgcctactgggacactgccacccccgtgacccgcggcctataccgttggcacatccccgacccgatctacttcgagcgagacctgcgcgtcgaatggcagcagatcggcaccgaggaagccggcaacttcgaacgacaggacgacgtggccacggtcgcctactggtaccaaagcgaaccacacaagccattcgccccaatcggcgaccgcgcgttccgccggccacggtgacttcctcgatgcctgtcggccgatggggctccatcggccgacaggcatcgccatgtcttctccattcacctgcgcggtgaatggattggcaacggtgtgttaccccgggattcgactggacgccgccgcacgacgacagcatgacagccgcaagcaccgccacgacgcccccgacccaacgtgttcttctcacacactgattctaccgtcagaaaccgatgacggtgcagaaacgagcacatcagccggcagccacactcaccactcgtggcgctgataggcgattctggtggtgtcgaccggccggtcgagcagctggatcaggccgcaacgggcgaagccggagctttcgagcacgtgctgcatggccttgttattggggtgggtgtcggcgcgcacgttgccgtagtgcttcagggcccacctgatgcagtcgcgggccgcgtggcgcaccagaccggatgcggcgatgcggtggatggtcacataggtgtcgttgtccagccaggcgccgtcgattttggcgtaggtcggatccttgcccgggcacagggcgaactgggccagaatgcgttcgtggccattgcaggtgtcgaccagcagcatcgtacgctggttggcgatgtcgtcttcaatcaccgattcacgcggaaattcgttgccccactgggtggggttgccgttggcggccatcaacgcgcgtgcgcgtgcgtagattttctgcatctgcggcagatcgcgcatggtggcgtggcggaaacggcggcctgtcgccttgtttgcagcgttcgactgagtcacttctcacctctccgacatgccgggttgccggcacggtgaccggcgactaactgacggccaacctaccatgccgtaggcacaagaaatcccgtccgcgttgcatgacggacactaataaacaatggcttccgtccgcaggagccggacagtccagccgagttgaggacagccaccctcagtcggcttcgcccccggctcccgccagcgggagccgaatcagaattgaatcgaatcagacgaatcagacgaccttgcgctcgaacgggtcggagctgatgccttcctcaaggatctgcttggcccattccttggcggcgaacaggctgtggtcgcgatagttgccgcagctcttctcggtggtggcgggcacgtcatcccatgtggccttgtatgcgatgaactccaacgattccttcaacgccttggccacatcctcggtggagtgggtgccccaggtcagcaggtggaagccggtgcggcagccgaacggcgagcagtcgatgtagccgggaatgcgttcacgcagcagcacggcgatggtgtgttcgatggtgtgcaggccgccggtggggatggcctgctcgttcggctgggtcaggcgcagatcgtaattggagatcacgtcgccgtgagggcccgtttcggtgtcgatgtaacgcacgtacggcgccttgaccttggtgtgatcaagctggaatgattcgacgacgggcttttcggccttgtcttctgccatgctgttgcctttctacttgctgagtgttcggtcatgaagtatcgaacagtcatcgtagtcgcgccagcccaagaacgcccgcaaatactccgcgggtcgctataggagattgttatgacgcactcccggcattgaacgaggcgatggtttgcatgaagcgctggccgtagaggtcgagcttgtgttgaccgacgccgttgaccgccagaaattgcgcgttggtaaccggcttgatgcgggccatgtcgcgcaaggtcttgtcggagaacacgatgtacggcggcttgccgatttcctgggcgatggtgcgtcgcagttcgcgtagcttctggaacagcgattcctcgtcatcgtccgggatatacgagcccagcgcatcgccgggaacattggcggaatcggcagtatcagccactcccccgctccgaccggaaccggccgccgccgacttgcgttccacccgtttgatctcatagtggaagtcgggagcggcggtttcggccgcccgcgcaccgaacatgacgattggcatacgcccttcggcgattgacaggtacccgtccgtggccatctggctcaacacgtcgcgcacgcgagcctcgttcacgtccttgagcatgccgaaggtgggcatccgctccgggttcagccatgccagatcctgtgcccgcgaaccgcgcaggatcttgacgatcttgccggaaccgacgcgctgccccacgtcatgcacgcaacggctgatcgcctgcgccacgcgggtcacgtcgatggtctcgaacgtgctttcgcagttcgagcaggcaccgcatctgccggactgcgaagagtccgccgcaatgtcttcacccgccgcggaaccagcattcggcgacaattcctgaccgaaataccgggtcatataccggtgcaggcagtcggtggtgcggcagtagccgaccataccgtccagcagccggcgcttggactggcgaacgatctcctgctcttcgggagtcaatcgctcgttctcataatcgttatccagcaaccgacgccgggtgacgatgtctgactcattccacagcagcgtgcatcggctgggctcgccgtcacggcccgcgcggccggcctcctgatagtaggcttcaatggattcgggtagattgtggtggatgacgtaacgcacgttggacttatcgatgcccatgccgaaagcgttggtggccacgaccaccggcaccttgtcggtgatgaagtcgcgctgggccacctcacgcgcgtccggcgacatgccgccatggtaggcgacggccggatgccccatctggttcagcgtgtcggcgagcgcttcggtggtcttgcgggtggcgcagtagacgatgccggattcgtccggatggtcggccacataccgcgccacccatgcggccttgtatttggtctccagtttgaccacatcaaaatacaggttcggccggtcgaatccggtgacggtgacggccggattccgcaatcccagcagtcccacgatgtcccgacgcacccgttcggtggcggtggcggtgaacgcacccaccggtggacgctgcggcagcccggcgatgaaatcgccgatacctaagtacgacgagcggaagtcctgaccccactgggagacgcagtgggcttcgtccacggcgatcagcgagatcggcgtacgggcggcaaagtcgcggaatcgcccggtttccaagcgttccggggccacgtacagcagtttgatctgcccggcggcggcttgggcgaacaccatcgcctgctcgtcgggagtttgagtggtgttgatgaacgcggccggcagaccgaggtcgttcagcgcatcgacctggtcgcgcatcagggaaatcaagggagatatgaccaaagtcgcacccgggctgagcgcggcgggaatctggtagcacacggacttgcctgcgccggtgggcatcacgcccaagacatcgcgtccggcaagcaaagcctcgacaattccttgctgtccgggcctaaacgagtcatagccgaagtatcgtgtgagcgcctccagcgccgcctgatgtgctgtcataaacgaccagtgtaggccgaccgcggatggatttcatcgtataacggaatacctcgtaccgatgtacgtagcccttccgtattattatgcgtcgaggaacgctattcccggcatatcacacgatatgccgctttgagagaactaagacggggcattttatggccaacaatacattttccttttcctctcctgacgatcaggagacggcggtgctgcagcctgtggccgccgatgggctgttcgcagccgcggccacaggtaccgccacgccacagcaaagcgacaatggcaccaataaccatgccgacaatacagcctatgtgggtgaacatgttatggcatctaccaccgctaaatcacatggcaaggccgcacggattgccatcataaccatatttgcagtgttgcttgccgcattaatagcctatttcttcgtcggacgttggtacttccaagacaaggctgcgcccggtgttcatttgggcaatgtctctgtcatgggccagacccgcgaagaacttgcgaatactgtgaagcagcagctgaataacaccacagtgacgttcaccgccgaaggcaacagcgtcaaagcctcgctgaaggaccttggcgtcaccgtcgacacggataaaaccgtagatgcgctgttgaacgcgaagaccggcgacgtggccaagctcaatattttcgatcagccgcatatcgctctgaccgccaccagagacaaagagactgccgaacaattcgtcaccgccggcctggtcgatgaggccgaccgagcgcagattgccaccgttgtctacaacaagagcaccaagcagttcgattacaccgcgggtcaggatggcaagggcccggatatcaatgttgtcaatgctgcagtcaaggaggccgtcgcgaccccgggcgaaaatgcgacggtgccggtcaagctacagactgcaaagaatccgattgatgacgcgagcgcacagcaaacacagtttgacgccaatgccaagcttggcctcaaactgaccgtggacaacggcgtgaacaagagcgtcaccatcccggccgataccattgcctcattcctcaagcccacggtgaataaggcgggtggcaccatgagtctggtagtcgaccgcgatgccatcaccaagtacgtcaccagtgacagcgtaaccaaggaactgactgttcccaaggtgacacgcgaggtctacatcacgccgaaagacgaaggcggcgtggaaattggtgccgataagacactcggtgtggatggtattgaagtgactggtgccggggacgcccccgaacgtctggctaccgccatcgagcagaaccagtccactgattccactgtggctgtgaaagacagcccatatgatgtcaagcaggtcgaggtgcctcataacttcgatacggcaaatggcgataagtgggttcatgttgatctgacgaaccagactgccactgcatatcagggcaccacggtggtcaagaagttcaacatcgcttctggcaagcccaccgccgatggttccatgctgtccgataccggcacgttctacgtgtatctcaagtacgaatcgcagaccatggttggcgaaggctacaaccagccaggcacgccgtgggtttcctactataacggcggcgaggccctgcacggtgttcctgcatacatgtggggcgagcaccccatctatgtgcagcagggtatcccaggctcgcacggctgcatcaacatgcaggtggccgacgccaagtggatgtacgactttgccaccatcggcactcgtgtggtcgttgatggcaccacaccgacttccggtcaggcgttgcgcccggctggtgcggatgccaccggatggcagggcggcaacgccagctgattcgatccatgtttaatcgataacggaaaatccccgacccttgtgggccggggattttttgtaggtaccaatcgatagcgagtccgccgataagcgtggtggcaccgtcaatacggtgccaccagtaccgtcagtacggtcagatacgatccaatgcctgcttgagatcggcgataaggtcgtcggcgttctcgataccgaccgaaatacgcaccagattggcgggcacctgcagggtggtgccggccacggaggcgtgggtcatggcggcgggcacctcgatgaggctttccacaccgccgagcgattcggccagtgtgaagatctgcgtgtggtccacgaagtgcttggccgcctcggcaccggccgcgagctgcacggagacgatgccgccgaagccgccgtgcatctggcgggcggcgatttcatgacccgggtgggactcgaggcccgggtaccagacgcgctcaatcacatcagagggctgggattcgagccattcggccaccttcagggcgttggcactgtggcgcttgacgcgcagatccagggtcttcaggccgcggatgtccagccaggagtcgaacggggagggcactgcgccggcggcgttctgcaggaaggcgaccttctcacgggtctcctcgtcgttgaccaccacggcaccgccgaccacgtcggagtggccgccgatgtacttggtggtggagtagaccaccacatcggcgccatcggccagcgggtgctgaagggcgggcgaggcgaaggtgttgtcgaccgcgaccttggtgccgtactcgtgggcaacttcggcggtggccgcgatgtcggtgatgttgagcagcgggttggacggggtctcgacccacacatactggtagtgcttggaggccaatgcggtttccacggctttcagatcggtgatgtccaccacgtcgaggcccacaccccacggcacgaacaccttggagagcaggcggtaggtgccaccgtacacatcgttgccgagcaggatgttgtcgccgggcttgatggtggagcgcagcagcacgtcgatggcggccaagcccgaggagaagctcagcgcgtacttgccgccttccacggcggcgagctgctcgtcgaagctggtgcgagtggggttgatggagcgagagtagtcgtggcctcccctgaggcccaacacgccatcctgcttgaaagtggaggtggcgaagatcggcgtgacgaccgcaccggtggtcgggtcgggctcctggccggcgtggatggcgcgagtggcgatgtcggtattggcgaacttggcgttgtattcagcggacatgatattgggttcctttcgggattgttccgtattcgaaggtaaaacaggtgcggttagttagtgcggatgttggtattgattcttttgatagctagttatggagtccatccgcagctccctcatcagagggagttccgttaaggtactgctcggcgagggagggcttgctggtgcgttccacgatgtcgccgtagccgttggcacgcatccagtcgtcattgaagatcttctccagataactgcggccggaatcaggggcgagcaccaccacaatctggttctcgtccaaatcattggcaagcgcgtacttgatggcgctggccacggccatgccggacgagccgccgaccagcaacgcctcctcgccggccagacggcgggtcatttcaaaggcttcggcgtcggatacgcgcacgatgtcgtcggtgatgttccggtcgaaagccttggggtagaagtcctcccccacgccctcgatgtcgtactggtggacttcgtcgcgtgaggaagcggagtagatggagccttccgggtcggagccgatgaccttgaccgcgccgttggaggcttccttgaggtacttgccggtgccggagatggtgccgccggtgccaatgccggccacgaagtgcgtgaccttgtggtccgtagcctcccagatctcggggccggtggtgtagtagtggctcagcgggccgttcgggttgtcgtactggttcgggcggaagccgccgggaatcgtgttggccagtcgttcggcgacctggtagtaggagcgcgggtcgtccgggccggcgtcggtcggtgtgacgatgacttcggcaccgtaggcgcgcagcaccgcgcgcttggattcggaaaccttgtccggcagggtgaaaatcgtgcggtagccgcgctgctgggcgaccagggccaggccgacgccggtgttgcccgaggtgggctcgacgatcacgccgccgggcttcagctggccggactgttcggcggcgtcgatgatgcgctcggcgatgcggtccttggaggagccgccggggttgaagtattcgactttgacggcgatggtggctttgacgccggccgcctgcgggatgtggttgagcttgacgagcggggtgttgccgatgagttctgcgaggctgttgtggatggtcatgtgaagtccttcgttgctggggttgtgggggttttgctgcgttgcgttcgtgaaccgacgttcccagacgaatggactgtggctttggtttgaaaatcgagtattcccgctcactgtacggtgaatccgaaaagtgaaccggtttttcatgttaaccacggctcgcgcattacacgattacgcttgtgccatcggatacatgaaaagtatgcggcagattcgccgcgattcgaatgctccatctcaagttatgcgtcactgaccgctcgcccaggggcgtcggttagcgacaacaacatgagataatctgcatgcctcacaccatagcacaacccgcgacaagcgcgtgtcgccggcggactgaggggagtacgacggcacccgtaactcccctcagcctcactgcattcgacagctcccctcagggaggggagccaaaaagatctataacgaggctgcctcgatgagctgacgggtgtaatcggattgggggttgccgagcacttcggcggtgggacccgtctcttcgacgcgcccgtcgtgaagcacgaggatgcggttggcgatgtgctgcaccacgccgagatcgtgggagaccatgatgatggcggtgctcggccgggcctcacggatagcggcgaaggtgtcgaggatctggatgcgcgcggccacgtcgatggcgctcattggttcgtcggcgaggattaccttgggctcgttgatgatggcgcgggcgatgaccacgcgctgcgcctggccaccagacaggtcgattgggtaccggttcaggaagtccgccggttcaagacccgccatggtcagagccgcgaccacccgctcgtcgatatcggtgttgttcagatcacgtcgctgcagactcagcggttcagccaccgatttggcgacttgccaacgcgggtcgagtgatgagaacgggtcctggaacaccagtcccgattcgcggcgcagggtcgcgaatcccggcgattttcggccgccgacaatggattggctctcgtattccacgctgccggagtccgcggattccaagcccagcataatgcgggtcagcgtggatttgccggatccggagccgccgatcacggccagacattcgccggcgtggacgtcggcggagacgtcgaagaggacttggtggcgtgcggtgcgcggtccgaaggatttggtgatggagtgggcggagaggagtggcacactgctgttactcatgcgaatcctccttgggggtgtggagggtgagggtttgggcggcggcgaccaagcgttgggcttgcggcgtggtcggtgcagcaagcaggtcggcggtgggtccggattcgacgatgcggccggcgtccagcacgtagcagcgggtggtggcacgcgcgagtacggagaaatcatgggtgatgaacagcatggatgcgccggcgtcgtccaccaacgaggtcagcaggtccacgatctgacgttgcgtgatggagtcgagcgcggtggtgggttcgtccgcgatgatgaatcgcggtgaggtgatcagcgccgtggcgatgcccacgcgctgctgttggccgccggacagttcgtgcgggtatgtgccggccacgtcacggtccagtccgaccttgtccagcatggtattcactcgctcagcacgttcggccttggtcagatcgtaatgcagtctcaacggcaacgcaatctgctgcgccacggtcatcaccgggttcagcgcatgggccggattctggaataccgtacccacataccggccgcgcagatcggcaagcgtatgctcgtcggcgtacgcagcggaatcgtggcccgaggtggcaaccctgcgttcaccggcaacatggtgcctatctgccgcgccgcgttcttcgtcagatcctgagtcatcttcctgcccatgccgcgactcggcggtttctccggacaggatggcggtttctcccatcgtgatggtgccggacagcacggcctcgcgcggcaacaggccgagcaatgacttggcgatcatcgatttgccggagccggaggaaccgatcaggccgacccgttcgccgtccgcgatggacagatcgacatccgtgacaatcggtttgccgccgatagcaatattcagcccgtgaatttcaacgctcatcatccgtctccttcggcgctgccactgcggactgcgccgcagtgtcaccggctcccctagccaccggcacaaccgcaccgggcacagtcatctgccgcaacgcgggattagccaccgggtcggtggcgtcgcgcaacgcgtcgccgaacaggttcagcgcgaccaccaccagggtgacgatcagaccgggccacaccaccgtcaacggaaacacgttgatgagtttgaccgaggtggccagcgaatggcccca

SEQ ID NO: 389 - DNA, 30075 bp, Unknown
  R42_10m  MAG No. k141_47323
aacagggcgagcacggccagtgagaacgcgatatccgtggcggtgggcactgcccagccgtgcgacatctccgagaacggaatgctgctgccggtggtggtcagaatcagcgtgccgggttcaccaggcccgatctgagagaacaatgccgtgacggccaggaacaggatgggcggggcgatcatgccgcccaccgcgcacagcatcggcacggcggccgctttcggattggcgagcgagccggtggtgagttcctgcttcagttcgaggcccacggtcaggaagaagatggtaagcagaccatcctgggcccaatggccaatcggcaggtcgagattggtgtaggggatgaacagatgcgtttccgctacggtctcgaacgcatgcgcggtggcgggcaggttcgcgagcaccaggccggtgagcgcgaagccgagcatgatgagtccggaaatacggtctgaggcggcgattcgcctgatggtggaccaaagtcctttcttcgcgccggcggtcgtggccatcgcgtctccttgctgtactttcttggatgaaccgtatgtaatagtacggaatatctcaggacgttccgctccaggctgagtcgcgaagggcaaccttacccccctgtgtggccgactcaaacgggccaatacaattggaaaagcctcggaagcatttcgctttcgaggcttactgtgcgccagacaggattcgaacctgcgacctgctgatccgtagtcagctgctctaatccgctgggctactggcgcataccactgttgtccccgtggttcgggagtgcgccagacaggattcgaacctgcgacctgctgatccgtagtcagctgctctaatccgctgggctactggcgcatgttgtcttttcagacaactcgatatataatacacgccgttcagatgaatgcaactcggcgtgttgcggcgagtcgcaccatcctaatcgccaccgcaacggcgtatttactggcctcacgccgcatgtgtacggactcggtcaagcaaaaccgactacgcaactttgaggcgtccctgcggcacatccacggcttcgcgcaagagtttgggcgtactggaaccctctacggacgccttgtccacaatcacctgcttcacatcatccaaactcggcaactggaacatcgtgtcctgcaacgtacgttcgataatcgaacgcaacccgcgcgcgccggtcccctgcttgatggcgatatcagcaatcgcccgaatggcctgttcggtgaactgcaggtcgacgccgtcgacggcgaacagcttacggtactgcttgatcagcgcgttggctggctgggtgagaatcgccgtcagatcgtctacggtaagttccttcagcacactggtgaccggcaaacgtccgatgaactcaggcaacagcccgaactcggccagatcatcggcattgacctgttcgagcaattcctcgtctttcatgtcggcgtcgtgccaattcgcgccgaagccggtctctcgacggcccaatcgcttgcgaacaatatccgtcagtcccacgaacgcaccgccgcagatgaataggatgccgcgtgtgtccatctgcgcagtgtcctgctccttatgcttgcgcgtgccctccaacggcacggaggcgatggtgccttccaaaatcttcagcaacgcctgctgaacgccctcaccggacacgtcacgggtgatggaggtgttctcacctgatttgcgcgcgatcttatcgatttcgtcaatgtagatgatgccgtgctgggctcggcttacgtcgccatccgcggcttgaagaagacgttggagcacggtttccacatcgtcgcctacatagccggcctcggtcagggtggtggcgtcggtgatgacgaatggcacgttcattacgcgggccaacgcctgtgcaagataggttttgcccacaccggtggggccgagcaacagaatgtttgatttggcgacctcaacgtcagccaaagggtcactgttgcggcgggtagcacgcgtctgggcgggagcggattgcttggcttgtttgccggtctggccaccgtgcccgttattcccgtcaagctgctcagcggactcctgaagctccatattgacgcgtttgtaatgattgtatacggccacggacaatgcgcgcttggcgttctcctgaccgatgacgtagcggttgagataatcgaagatctgagcgggcttgggcaggctcagcgaattgacctcggcatctttgacacgctcctcggagatgatgtccacgcacagggcgatgcattcatcgcagatggaggcgttgggaccggccaccagttttctgacctgacgttcggttttgccgcagaacgtgcaacggggtacgtcctcgttgtagctcaccacacgtcccatgattctcctttgccgaccgcgccgcaccgtcgaaccgccacgctgcgcattatcattgtcatccttgaaatacaatacccccggtcgttgccgaccgagggtattgcaatgttcggaagttttactggcggtgttccagcacctcgtccacgatgccgtattccttggcttcaggagcggtcaggaaagtgtccacttcgatgtcgcggcgaatcttctcgacatcctggccggtgtgcttggcgagggtctcctccagccattcgcgcatacgcagcatttccttggcctgaatctcgatctccgtggccttgccgaatccttggtcgatggccggctggtggatgagcacacgggcgttcggcagcatcaggcgcttgcccttggtgccggaggccagcagaatggcggcggcggaggcggcctggccgagacacacggtctgcacgtcgggcttgatgtactgcatggtgtcgtagatggcggtcatggccgtcatcgaaccgccgggtgagttgatgtacatcatcacgtcacggttcggatcctgggattcaaggaccagcagctgggccatcacgtcgtcggcggaggcgtcgtccacctgcacgccgaggaagatgatgcgatcctcgaacaggcgggagtaggcgtcctgggtcttcatgccatacggggtcttctccacgaactgcggcatgatgtaacggttggtcggcgcgggctgggctgcgcgggcggcggccggcatgaaaccggctacgccatgacggccggccaagcggtcggcacgggcggcgaactttgcttcttcacttgccatgagtctcactccccctgctggttgttgccgatggtgtccggcgtggtcacgagcttgtccacgaagccatagtcgagggcttcctgggcggtgaaccagtggtcgtattcgttgtcgcggtagatctcctcgagggtgtggccggtctgctcagcggtcagctcgctcatggttttcttcatgtccatgatgagctcggcgttgatgcgcacgtcagtggcggtgccgccgatgccgccggaaggctggtgcatgagcacacgggcgtgcgaggtcaggtaacgcttgcccttggtgccggagctcagcaggaactggcccatggaagcgcacatgcccaggcccacggtcgccacgtcaggctcgatgagctgcatggtgtcgtagatggccatgcctgcggtgatggagccgcccggcgagttgatgtacagccagatgtccttcttcgggtcctcggcggccagcatcagcagctgagcgcagatgcggttggccatatcgtccttgacctcttcacccatccagatgatgcggtctttgagcagacggttgaaaatcgggtcgacggggccggccgggacgtcatcgcccgccatgaccggcaaggtcgcaaaggtattgctcaccttgattctccttctaattactcgaacattgttcagactaccgccttgaagcgactgaaggcggcttttcgcgtgctttttggcgggtagcgtagggatttcgggttattccaaggtgtcgaggacgtcgtcaatgaggaggcgggtctgggaggcggcatcgtcgcccagacgcgggaagcgacgggcggcattggcggggctggcaccggcggctcgcgccacgttggacttgctggcaccatgggccacggctttttccgcgagccgatcgaccagtgaatcggcgacttggcgcatctgttcggccacccataattgggccatatccgcaggcaagtcgtagtcttcggccacatcgctggcggcctcctgaatggcggcccacaacaccatgaatggctttcgatagtagtcaatctgctcagtgagcggctcagcggcaagcgattcaagtgccgcacggacttcggtgttttctgacatagctttctttacctcggctcccctcagtctcactgtgttcgacagctcccctcagagaggggagccagaatatatgcatctacttacttacgactcagcaaccactttgatatcaacgacgacgtggccacggccatgccgactggcacgaagaaggtaatcggcgcttcggtcagctccatcaccaagcacatggccataagcggtgcctgctgtgaggccgaaagcaacgaagccgcaccgatcaaggcacacgcggttaccgaatcagtcggaaacatcagtatccatacgaggccgagcatcgcacccagcgtggaacctaatgcgatgccgggctgcagcacaccgcccgatgcaccggagcgaatggtcatcagcgtcaccagcgccttggcgacaaaggtgagtgccaacacacccagcaacatccagatattggactgggacagcgggaaaccggcgttcatcacggatccagaagagccgctcccaccctgaagcatggcccaaaacgaggccattccagagcccgctcccccgccagaggccgaatcggatacattaccgccgcccgtcagcaagttccatggagaggcggccgctgaagatgccgactgcatggcaccagcagtgccggcggtttcaggaatgaacgtgctgaatccaagttgcgctgcggcacggccgttgcccatcacctgcggcacaacaatcgccaccaaaccggtgatgagaccagccagcggcatctgccacggaatggccttgccggtcggcttgtgtgcttccgcccattgcgaaccttttcggaacaatgcgccgcccactccacatgccgcaccgcagatcagagcgaacagcattaacgttggcgtggattccggttgcatggcggtgatgtcgtagaacaggcaatgccctttgatcgcaaccgccacgaatgcggcaatggcagacacgcccagtccaaacgcaaccttttcgatcgtcacatccaccaacaggatttcgacggcgaagaacatgccggccagcggcgcgtcatagacgcctcctagaccggcaccggcagccactgccaccaccatgcgccggtcgataccatcaacgccctcgatatggaacaggtcgcaaaaacgttgcgcgatcatggcgccgagttcgcgtggggcgacttctcggccgatcgaggcaccggagccgacgatgaaaatctgcaacaccacatgcacaatggtttgccagaaaggcattcgctttcccgccacggccttcttgactgagggcaccacagtcgttttgtgtcgtagcagataccagataatgcccgcgatgccgagtcccacggtcaccgatatcacacggcgtgcagcgggcacgccgaatggaccagacaattctgggccttcgatgtagccgagcagcacatgttcaacgccgtagagcaacagggtcagcagacctgctcccacaccgatgagcacgccgagcacaatggtcgccgcagcgagccaaccaaggcgtttgatagtaaccgttggctgcatgtcaacctccgcacgctatgcaacgagtatgccttgggaactcccctcagtctcgctacgcccgacagctccccccaaaggggagccaaagaaatagtccttttaccagaataggaagagcccggaaccgtgaaacacgattccgggctcaaacaatcacgctaacgcgatgaggctatgctcactcagcgtccttggcgtcatccttggcggacagttcgtcggccacggcggcagcagcggaagcggcctcgacggactcggactcttcgtcctcagcggcctcgcccaggaagccggagaggtccacaacctcgccatcagcggtgaacttgacggcgcgcatgccggcgagcagacccttggaacggccgacttcctgcacagcggagccaagctggccattcttgatgatggcctggatgaagttgttcgggtccatgccgtactgctgggcgatggaagcgaggaagttgaacacgtcggactgggacacctgaacgtccagcttctcggccagagcgtcgagcaccatctgatcgcgcagatccttctccacggtctcctcggcctgagccttctgctccttggtggccttctccgggtccggggtcatgcccttgagctgctcttcgaccatgttggccttgacacccttcggcaccgggatctcgagaccttcctgcagcttggcgatgaaggcatcgcgagcctcggtggcctgacgaccttcggcgtcctgagcggcagccttgcggatgtcagccttgagctcgtccagagtgtcgaactcggaagcttcggaagcgaactcatcgttcagctccggcagttcctcagccttgacggagttgaccttgaccttcacggtggccttctggccctcgtgctcgccggcttccagcgtgccttcgaaggtggtctcctcgccggcggacaggccgtcaagagcctcgtccagaccgtcgagcatggtgttggagccgagctcgtagctcacgccttcctgggagtcgacggtctcgccgtcaatctcagcagtcaggtcgatgttggcgaagtcgcccttggcggccgggcggtccacgccgaccaaggtgccgaagcgctgacgcagggtctcgaggcgcttgtcgacgtcctcatccttgacttccggcttggagatggcgatctcaagaccgtcgatttccggcagttcgatgtcaggacgacgctcgacggtggcggtgaacttcagcttggtctcgtcgttggcggactgcggaacatcctgcacgtcgaactccggctgagccatcggacgaatcttcttctcatccagggccttggagtacagctccgggaccgcgtcgttcacggcctcaccggcgacggcggcgaaaccgatgcgctggtcgatgatcttgccgggaacgtggcccttacggaagccgggaacgttcacctgcttggcgatttccttacgggccgcatccagatacgggttgagctcttccggttcaacagtgacggtgagcttcaccttggtgggctcgaggttacgaacgctgatcttcacgctaatgactcctcaaaagtcgttatttcttacagttctgccgtaaggcaacctctacatgataacgccacttacggacggtgcaatgagtttcacctgccagtttcttgcgccctgctcgatcaggaacgtctcgacgtccacttccaccgggtcttccacccagcacaggttgcgtaggatctgtggcttgatgatcatctcggccggcgtgcgggtgtcttcggcgatgcggttgatcacacgccgtacccgctgcagacggtcataacgctccggatggcgctgttgccacagtcgcatggatcggggcgcgttcaccacaccgttttcgtcctgttcgggggcgggcatggtaggccattgggtgggcttcagggccatggctcggtcgatggcctgcttccagaccttcggcttgaccgtacgctgaatcggcgcgtaccgctcgaacattttgtcctgctcggtgccggtatgaatgcgcacacgctcgttcagggatcggagtgcgcggaattgggcggcattgtgcggcttgttggtcgcggcctcgatgattgacgaatcggtcaataacaggctgggagcgatgtcgtatcgccgggcgagccggtcgcgctcctcccatagggatttggcgatggccaagcccctcggatcacgactcagctgggtgatgcgcgagatacgcagccaaggaatcggatgaggtttgcgcggggcaaggcccgcaaccaaagcgtgagaaaactcttcagcggcccactcgtccttgcctgcggctttcaggtcacgacgcatcaaggtttcgagttcgataagcacctccacgtcgagcgccgcatagttgcgccagtcgcgcggcagcggacggtaggaccaatcggcggcggaatgctctttggccagcgtgatgccgagatagtgttcggtgacggcggccagaccgaagcggtgcaggccgagcaatcgcgccgctatttccgtgtcgaacaaggccttgggtttgagtccgatttcggcgaatccgggcaagtccatcagagaatcatgcagaatccatgtagcatcgcccacggcgtcattgaattcattccagtcagctccggcccgtgtcagggcgacgggatcaagcaaggcgatgcccgcaccttcacgtttgaactgaatcagccaatcctcatgtccatagcggaatccggacgcccgttcggcgtcggcggccagcgagcccgtcgcctcggccagcgcatcgcaggcacgatgatagccatccagcgacgaagtgacatcgggcactcccccgcgaggctctttcagcagtcggggttcggtgtcacggacgtcactcaactggcgtcatcctcctcaaaacggatggtggatctgatgaatgcggcccacgagcggatttgtgcgccggcgtccatagtaccgtccggtccggtcccgtcaagcggggtccatgagacgcgaatctcacacccggcgctggtggagccggccatcgaaccaaaagccgtgttttgggtcacggtgactgtgccggataccgaatccggctcgatgccgtcgaaatagtcgcacatgtcatcccagtacatgccgggggtcagagaatcgttttcggcggtttccagcggcagccgcgcgaacgccacgcaacgccagttggaatcccggtcaatgcgcagctcatgagcataaagcatcatgatccagcctgtggcgattcgtgattcggcatcgttgccaagaccggcggaaaaggcatcgccgagggcacgctctcccgcttcgaattccacgccgataccataatcggccaaggtggaaggcacgggaatctcccgatagcgcacgtcatggatgcgcttcatggtgctgacggattcgacagctgcccatacttcatccggcacaccctgagggcgtacggggcgtccgtcgttggacgctcccataggaaatgcgtagatgtcggccatatctctagggtatgggcgaacgggccgaatcgtggtatttacgcgcggttcggccctgcaatttaaaacacggtgaagccgtggtccttgaactggttggccacccgcgaacgggtggcggcgttgggtcccttctggttctccagcgggtatgggatgcgcagttcgtgccacttcgggcggccaagctggtggaatcccagcacgtcgatgtgttcgacggcatcaccgaaggactcgcagatcttcgccacgttttcgacgttctcttcggagtcggtcaggcccggcacgagcacaaatcgtacccagatcttcttgccggccttggccagtcgctggccaaaatcgatggtgggctgcaaggtgccgccggtgaccttgtgataggtctcctcgtcgccggatttgacgtcgagcagacacaggtcgatgtcctcgagcatctcgtcggtgtagctcgtgttgaggaagccggacgtatcgaggcaggtgtgcacgcccatctccttggcggcatggaacacacgcgaaacgaaggcgggctgcatcatggattcgccgccggagaaggtgataccgccatgcgtggccttgaacaggtccttgtaacgatcgaccttcttgatcatggcgtcaaggtagacgggcttgccgtcgcgcatcttccaagtgtccgggttctggcagtactggcagcgcagcgggcagccggacatgaatacggtcatgcgggtgcccggtccatccacggaggtgttgatgtcccaagagtggacgaagccgatatcgccggatttcagggcggaaaggcggtcacgtcggtcgagtccgattggggattcaaagccggaaaggccgcccatcaaagtctgcgaggcataggtcttcgattccttgagcatatgcctggtcgtggtgcggaacgtgggtgttgcgggcatagttgtcctcctgttccaaatgatgcgaaagtctgtggaaaataaggaaggggtggagccgtgccccaccccttcagttagtcattgccgcggttcgcggggttggtcatcagtcgacgacggcgccttggtggaaggtacgggagatgacgtcgagctgctgctccttggtgagcttgacgaagttcaccgcgtagccggagacacgcacggtcaggtgcgggtacttttcggggtgctcgacggcgtcctccatggtctcgcggcgcagaacgttgatgttcgcgtggtagaggccgtggccgttgcccgcgtccaggatgccgaccaggttgccgatgcgctcggcttcatcgcggcccaggccatcgggggtgatggtgttggtcagcgagatgccgtcgagggcgtcgttgtagtcgatcttgccgacggagaacatggacggcagcatgccgtgcgagtccatgccgttctccgggttggcacccggggcgtacggggtgcccttcttgtggcgggacgggaaggaaccggtgttcttgccgtactccacgttggaggtgatggtcaggatggactgggtcgggacggcgccacggtagacgggcaggcgcttgacctggcccatcacggtggagacgacccacttggcgatgtcgtcggcgcggtcgtcgtcgttgccgtagaccgggaactcgccctcggtgcggtagccgacgaccagatcgtcgtcggcgccttcgacgtactcgtactcgtggccttcgaggttcttggcttccttgttggtgatcgggtacaccttggcgtacttgatggcggacagggagtcggcggcgatggacagaccggacatgccgcaaccgagggtgcggtacacctccttgtcgtgtagggccatctcgatggactcgtaggcgtacttatcgtgcatgtagtggatgatgttcagcgcttcgacgtaggtttcggacagccactcgagcgccttctcgtagttgttcttgaccttctcgtagtccaaggtgccgtcggcctccggggcgatcgggtcgatgacgcccttgtcgatgacctgcatgccggtcatctcatcgcggccaccgttgatggcgtacagcagggccttggcggagttcactcgggcggcgaagaactgcatctgcttgcccacgcgcatcggggagacgcagcatgcgatggcggcgtcgtcgccccagtgggaacggatttccttgtcggactcgtactggatggccgaggtgtcgatggagatcttggcgcagaagcgcttgtagccttccggcagcttcggatcccagaagatggtgatgttcggctcagggccaggtccgaggtgctcaagggtcagggtgttgagcagacggaaggaggtcttggtgaccatcggacggccatcgtcgccgaagccggcgtcggaccaggtcgcccagtacgggtcgccggagaagatgttgtcgtagtccttggtgcgcaggaagcggacgatacgcagcttcatgacgatgttgtcgatgagctcctgggcgtcggtctcggtgatcttgccggccttgaggtcgcgctcgatgaagcagtcgaggaaggcggagttacggccgaaggacatggcggcgccgtcctgggacttgatggaggccaggtagcccatgtaggtccactgcacggcttcctgggcggtctgagcagggcgggacaggtccaggccgtactcgttgccgaggttgatgagctgcttcagagccttgatctgctcgtcgtgctcctcgcggaagcggatccagtgctcgatctccggctcggtgaagtcgttgcggtacgggatggagtccttgtcgcgcttcttgaaggcgatcagcttgttgacaccgtacagggcaacacgacggtagtcgccgatgatgcggccacggccgtaggcatccggcagaccggtgaggatcttgttgtggcgggcgaccttgatgttcttggtgtagacgccgaacacgccgtcattgtgggtcttgcggtacttggtgaagatcttcttgatctccggatccggctccttgccggcttccttgatggcctgctcgaccatacgccagccgccgttcggcatcatggcgcgcttgcagggcacgtcggtctgcaagccgacgatcacgttgtcgacttccggggagtcgatgtagccggccgggaaggcatcgatgccagccggggtgtgggtgtccacgtcgtagacgcgctgcttgcgctccacggccaggtagttgtcgtcgaggtacttccacaggtgcttggtcttctcggtggcaggagccaggaatgtctcgtcgccctcgtacggggtgtagttcttctggatgaagtcgcggacgtcaatatccttctgccagttgccctcggtgaagccggcccacgccttggcgtcaagctcctcttgggagacagctgcattttctactgcggtcatgtcactccttaaatggggttgtaggtttcgcatcttcacggaacccttggttcaacagtgtagttggcacttgcttgggaaaagccgaaattgggagtgagctatctcacattgttttttgtgaacgctaccattccaatggtttctaggtattgatggggctattgcacgtctccagatatgggaaaccgctcatactgtgatgttcgtatgagcggcttggtgagcggttcggtcttgagattgacagcagaaccgtatccgtctgttttggccgtcagtcttcatcgttcgcttgcgcggatttcacaccgtagttcttccagcgccagttctcctcctcccatctggcgttgcggtccaccacgatgtcccaggcgtgttcggcatcttccttggtcttgtacggacccatgcgctgttcaatcggtgagaccatgcccagctcggcctgcttcttgacggtgttgaaataccactgcttcttgttatcgtctgtcattggtacctcctcaacggtattacttgctcccgctggcgggagcaatatatgtttattccctgaacgcgttggtgacgggcagtcggcggtcgcggccgaacgcgagggccgtgaccttcggtcccaacgggtattggcggcgcttccattcggcgtggtccaccaatcgcatcacagtgtccacggtggcctggtcgaagccgtcggccaacaggtcggcgcggccgtgcgcgtgctcgatgtatgcagcgagcaccttgtcgagcagcgcgtattcgggcagggagtcggagtccttctgcccggggcgcaactcggccgagggagccttctcgatggatgagaccggaatcatcacgccgtccttcaacgggatgccggcgttgccgtcctcgttgcccacgatcttgagcccgccgataccgacgcctgcggccgcggccttgttacgccaacggctgatctcccagacacgggtcttgagcaggtccttgatgggtgcgtagccgccgaccgcatcgccgtagatggttgagtagccgcaggcgagctctgacttgttgccggtggccacggcgagcaggccgcgagaattggaactggccatcacgatcacaccgcggatgcgggcctgcaggttctcggcggagacgccatcaaggtcaagttgctgttggtaggcgttgaacaatagctcaataggctggacctcgtaatgggcaccgatgttggaggccaggtcagcggcgtcgtctttggaaccatcggaggagtacatggagggcatggagatgccccagacgttctcgccgccgcatgcgtcggccgccatggcggctaccagtgcggagtcgatgcctcctgagaggcccagcgtcacgccggtgaagtggttcttggccatgtagtccttgaggccgagcacgcaggcagtgtatacctcttcgtccgggtcgagttccggaacgatctcggccttgacctgatgttcggcggtggaatcgaagtcccagaacgtcaggttttccatgaacatcgggccgcgttcgataagcgtgccgtcggcatcgaccacgaagctgccaccgtcgaagaccaggtcgtcctgaccgccgacctgattcaggtagatgaccggggcgttgacttcggcggcacgacgctgggcgagctcgaaacgggtgttggtcttgccttcctcatacggcgagccgttgatggtgagcagcaggtcgatgttcttggtggccaggtcggccaccgggccaccatcctgccagatgtcctcgcagatggccacgccgatggtggcaccatccacgtcgagggtcacggaacggtcgccggcggagaagatacggaattcgtcgaacacgccgtagttgggcaggaagtgcttgtcgtagccggcccagaccacgccctgatgcaataccaccagtcggttgcgcggcttggaggtcttacgatcagtgcccacggtgccaaccaccacgaacagattgccgaggccgtcgtcgttgagctgggcggcgagttcgttggccttgtcccatgcggcttggcggaaggtgcggcgcagggccagatcttcgatggggtatccggtgagggtcatttccgggaaaacaaccacttgggcattccctgcggcggctttacgggagtagtcgagcactttggcggcgttggcatcgagcgcgccgacgcaggtgtcgatctgggcgagtgcgaagcgaagctgtgtcatagcttcttagtgtagccgcgtatggcgtcggattgcctgttcttccggcttggcgtcattcattaggtcgtttttgcgttcattaggtcactgcaatgcgatatcagtcgttgcaatggcgcgattccaacaaccagtatcgccgttcaccgacctaatggacgatgaatcgacctaatgaacgaatgccactcccctcagtcagcttcgctgatagctcgtcctgcacttatggacgggcgaggcccgcgcatatctggttcggctgtcgcctcactttcggctgcagacagcccattgggctgtctgcctaacgcctcagcctccagaggggagccaaaaaaggatttacctcagctcgttgagcacgcgcagggcggcgttgacgtagaagttgacgaaggtgggaatggattcgtcgagacccacgaaatgcgggctatgccagtcggcgcaaccttcctggccgtttgacccgacgaacgcgaacaccggcaacgtcaccttggcgaattcgcagaagtcctcccccgccatcgactgacgtatcggttcgagctgcgcgtagtcgttgacatccgccgccacggccttggcaagacctggatcggagaccagcgggtcttggaaatcatcccagaccacatcggcgctgataccgtatgcctcggcggtgtgttccaccacttccttgaatcggcggccgaccagattgccatccgacttgtggaaatagcgcacagtcccttggaatccggcttcggcgggcaccacgttccacacatggccgccgtgcacttcggtaacggacagcaccagcgggtggaagggcgtgacgttgcggctcacgatggtctgcaggctcagaataatactggcgagcgcttcgatgggcccggtgcccttgtacgggtagccggcgtgggtgccttgggcgtggagggtcacgcggaatttcacgcagccggccatcatcggctcgacgccgatggccagctggccggacgcatagttggggttgttgtgcgtgccgataatggcttcgacgtcatccacgagtccggcgtcgatcatggcgcgagcgccttggccggtctcctcactcggctggaacagaatcttgattgagccggcgaacttgtcacggtgctcggcgagccagaaggcggcaccgagcagaccggtcatgtgcaggtcgtggccgcagccgtgcatcacgccttcattgacggagctgaactccagtccggagtcttccacgatgggcaggccgtcgatgtcggcgcgcagcccgatacgcggcccgggaccggcctcgccctgaatgagccccacaacaccagtctccagcgggttgtgcaggatctcgatgccgtgcgccttgagctggtcggtcagatagatgctggtgtcgaattcacggaaactacgctccggatgggcgtgcaggtagtggcggatggtgatgagttcgtggtcgatgtcgatatgttcactcatggttcccgattctagtagcgcgaagaatatattgcggccctcgcttcatattggcgagggccgcgatctatggggtcagtatgccttgttattgctggcgtttgagcagtcgtttggcgatggcgttggcgatgccctgcaccacctggaccagtacgatcatgatgatcacggccgtccaggtgacggtctggtcgaacttctggtagccgtaggcgatggcgaagttaccgagaccgccaccgccgatgtagccggccatggcagacatgtcaagcacgccgatgaacaggaaggcgtaggccaggatcagcggtgccagggcttcggggatgagtacggtgcggatgatggtgagcttgccggcacccatcgaacgcgcggcctcgattactcccgggtcgaccggcacgagattctgttcgaccagacgagaagtggcgaaggtgcacatgaccaccatcgggaagatggcggccacggtgccgatggacgtgccgaccacgacgatggtgagcggctgcatggctgccaggaaaatgatgaacggaatcgggcgcacgatgttgacgatgatgtcaaggatgcggtagacgaccgcgttctcgaacaggttgccggggcgggtgccatagagcaccacgccgaggatcaggccgaggaatccgccgatgacaagggtgacgagcaccatggtcagggtctggccgatggattcgaacaatagtgggcgcagcacgttccagtcgctacgcgagttggcgaggatgatcatgcgttgtctccttcatgtgcggcggcggatacagcgggcgcggtggcagtatcggccgccagtgggtcatgggcgcggtcttcggcgtaggaggcatgtccggcaactgcgtcggcgtaagccacgggctttgcggcggtgccgaagtcaatgacgtcgctattggcggcgagctcgcgcaggaattcgtccacgtgccagccgggcccgttgaattcgtaggtgatggcaccgatggcggtccccttgaccgtgtcgatgccgccgtagagcaggctggattcgacgccgtatttggcgatgagttcggagatgttctgtccggatgccttgagttcgtggccatggctgccggaaacgtccttttggcggatgagcacggtgacgatgcggcccgaccattcgtggtgcaatcgctcgacccggtcttcctcgggcaggccggacagggcggtggcgatgaatcgcttggtcaccggctgctggggcgcggcgaacacgtcgtatacgtcgccggattcgaccacgcgtccggcgctcattacggccacgcggccggcaatctgctggaccacgttcatctgatgggtgataagcacaatggtgatgccgaattcctcgttcacacgcttgagcaaggccagcacttcggtggtggtttccgggtcgagcgcgctagtggcttcgtcggcgagcagaatctccggattagtggccagtgcgcgggcgatgccgacgcgctgcttctggccgccggacagctgcgaggggtatttgtttgcgtgctcactaaggcccacgaattcgagaagttcgttgacgcgacgatcctgatagtccttgcgccagtgatcgagttgcagcgggtaggcgatgttctgcgccacggttttggtggagaacaggttgaactgctggaaaatcatgccgattttctggcggatgggccgcagcttggtctcactcaaagaggtgatatcggtgccgagcacggtcacggtgccggaggtgggtcgttcgagcgcgttgataagccggaccagtgtggatttgcctgcaccggaatagccgatgatgccgaagatgtcgccgcgatcgatggtcaggctgacgtcatccacggctcgtgcgatgttcgcgccgcgtccgcgtgttttgaattccttcacgacatggtcgaaggtgatgatggggtcgctcatagtgctccctgatgctggttgttgatgtccggtcacggaagcggagcgaatcccgattgttggctcgggtactcgctccgcttggtggtaatggctatggacaggttagtcgtgcactcgtatcagccacggctcactgctgggctttggcgtccttctcaatgtcggacaggaagccttgcagctcgctggcgctgaacttgtcggcgaacaccgcggtaccgccggagttctcctgcagggcgtcgagcacatccttctgctggtagatggaaacgagcttcttgtaggtctcgttgttcacgtccgccttgcgggccacccacacgttgatgtaggggcgagcttcttcggattcggcgtcatcctggtagatggcgtccttcgggttgagaccggcgtcggccacgtagtcgttgttgatcacaccggcggcgatggtcgggtccttcagggtggtggccacctgttcggccttgagcggggtgaccttgaccttgctcttggcttcgtcgatgtcggccggagtggagaaggcggtccagtcgcccttgagcgtcacgagaccggcggccttgagcacgccgatagcgcgggcctggttggtttcgtcgttcggaatggtgacggtgtcgccctgcttcaggtccttgatgtccttgaccttggtggagtacacgccgagcgggtagatggcggtgccgccgatgggctgcaggtccttcttgttgctcacgttgtagttggccaagtagagcaggtgctggaattcgttgaggtccagctcgccggagtcaagggccgggttttcggaggtgtagtcctggaagtcgacgatgtcgacgtagatgccggccttctcggcgtcctgcttgaacttgacccattcggggttggtagcgccgaccacgccgatcttgaccgggttgcccttgctgcccttggcggacgactcgttggcaccggcaaacgcgcggtagccgaagaacgcggccacggcgataatcgccacgaccacgatggtgatgatgacgttgcggacggtgtggttcacacgcaccggctcgttattgttaggagcggccggagttgccgactgggttgctgctgtcattggatttcctctctccaaaattgatgtcgggtaacaccataacgcgcttgaaccgcgaaagtgacggaaaatggccgattgccgtataggtgtcttttatggcgcgcatgcaatggccgggattcgtgcgtttgataacccgctataggcgtgccgaacacgccggaaagcacgtcgagaggggctttgacaatggaagctatgactaccgatactgccaatgccgatatccgagccgtattcttcgatatcgatggcacgctcaccagtttcacgacccatacggtgccggattccacaatcgaggcgattcaccggctgcaggccgcaggcgtcaaggtgctgatttgcacgggccgcgcgccttcacagatgcacgtggtgctggataccatgccggtgacgttcgatggcgtggtggcgttcaatgggcagtattgctttgatgacaccggcttctttgcctcgcaggccttggatactgctgatattgaggtgattctcgactggctggaccgtcaccccgatgtggtgtgcaatttcggcgagaaggattacgtgtacttcaaccagtccaatgatctgcttcgcgccacgtggagcaaactgggcaaaaccgcaccgacccggtattttgaggacccgcgcacccgcgcgctggatcatgagactttccagatcagtccctttgtcggacccgagttggaggccgaactggtgggactgtgcagcaatgtgcgcggggtgcgttggcatccggatttcacggatctgattccggccgatggcggcaagccgcgcggcatccagcggttcatggcgcattacggcatcacgcgcgggcagaccatggccttcggcgatggcggcaatgacacggatatgctcgcctacgccggcatcggggtcgcgatgggcaatgcgaccgccgagccaaaggccgccgccgattacatcaccgacgacgtggaccacgacggtgtgcgcaatgccctactgcatttcggggtgctacgcgattattgatgccgtagcgcctcgaccgggtcgagctttgccgcgcgtctagctggatagtagccgaaaatcacgccgacagcgatgcagatgcccactgccagtccgatggactgcacggaaactgctggcgcgatactcatgccaccggcgatgccggacaccaatccagcggcgcccaacgacagcaagtagccgatcaacgtgccgataagacctccaagcactgtgattgcaatggattcggcgaggaactgcgcggtcacgtcacgccgagtggcacccaatgcccggcgcaggccaatttcgcggatgcgttcggtaacgttggtgagcatcatgttcataatgccgatgccgcccaccagcaacgagaccccggccaccgaacccgccagcacctggaatgcgctcatgaagctggaaagctggtcgatggaggattgggcgcttacgaccgacagattctggtcgatctgttcggttgggatacgcatgatgcgagcgacaacggtcttcgtctgttccgtgagctggtcgatatcaaccccgtccttggccagtccgtagatctgcatgtatcccatgttcgaggacgcaaaccgcagcgccacagtggtggcaggcatatagatattcacgccgtcgccgcccatgccgcccatcaatccagacgactcgaccacacccacaacggttgcttcattgccgtcaagcgtgacggttctgccgatggcgtcaatgtccgcgctgccgaacagcttctgcacgccctgcccgtcgagaatcaccaccattgcaccactcgttgcttcactcgatgtgaaggcccgtccacgaccaatcgtcactccggatacatcgaagaaatgctcgtcgacaccggtgatgctcgccgacaccttgtcggtggtaccgggcgcggcgattgacgaggcggcaccatagttcgtcggcgagaagtactcgtagtcggtcagttcctcgcgcatcgcagtgatctgttcgtcgtcaagggtgccgacgtccgtgtaaatcgaaatcgtgcgcgccgcgttcatacccagttcgccgaccagagagtctcgaatgccaccgatcagtgaggtcatggtaatcaccgcggcaatgccgatgacgatgccgagaatggtcagtgcgcttttgcctttgttcgccctcagtgcggagccggtttccgccagcagatcccgtgttctcatcggtacatcccttcacgcagtacgccgtcacgcatgtgcaggcatcggtcggcgcgttcggccacttcggggctgtgggtgatgagcacgatggttttgccttgctgcttgagctgttcgaacgtgtgcatcaccgcatcgccggttttggagtccaggttgccggtcggctcgtcgccgagaatcagcggcgggtcctgtaccaacgctctggcgatggccacgcgctgcatctgaccaccggagagttcattggttttgcggtcgaacagttccggactcaacgccactgattggaatgctttgatggcacgcccttcccgttcacgcaccgggcagtcggaataggccaggggcagcatcacgttgcgcagcacgctggtgcgcggcagcagattgaaggattggaacacgaagccgatgagccacccgcgcagttcggagcgttcgtcatcactcagattctgcacgtccatgccgcacaggcggtaggtgccggatgatgggcggtcgagcaggcccagcgtgttcatcagcgtggatttgccggaaccggatggtcccatgatggcgaggaactcgccttggcgcacgttcatggtgatgcctttgagcacatgggtgtaggtgtcgcctgtctcgaagatgcggttgatgttttcaacctcgatgacgttggctgtggcggtgggcacggcaatggtctcattacgccgtttgccgcgatttgcccggctcgcgtcggaacgaaacgggaacatatcagcgtgccctttcgtccgaagccgcggtttgcgaggtggaagaagcagcatcgccagtattgtcggcagccgaagcgccatcaagcatgatgacatcgcccttgctcacattgccttccacaacggctttggtgttgttcttggctttgaccgtgactcgcacccgcttgaactcatgggtttcggcgttggtctcgagcatgaccgcgctgctctccttaccctcatccacgatggcggcgagcggcaccatcaaagcgttgtcaatgctctgcatggtgattttcacactggccgtcatgcccggcttcagtttcggatcaggggcgggaatgatgagacgcacggcgtatcccacgccgccgttgccactctgcccgcctgccgaggaatcagccaactgcgacgtggtgctggcgatggtatccaccttggcatcgagcgtcagtcccggcaccgcggagaacgtgactttggcgctctggtccttggccactttagtgatatccagctcattgatgttgacattgaccttcatctgactcaggtcggcgatctgacacaatggtttaccgtctgcgccggcggaagtggatgagccatcggaggaagctccgatggcggcaccgggcaccgcgctcatggtcagcaccgtgcccgagaccggagcagtgaccgtacgcttgttggcttgggcgaccgcctcgtcataggtggcttgtgcttgctgaacggcgacctgcgcactctccacgccgctttgtgcagcgggcagctgtccggccgcatcatcggcagcggcttgaccttcctcaccatcctgattacgtgcctgacctatggtcgcattgatttggttcacctgctgctgggcggcattaaggtttgagttcgctgctcgcagagccagatcggcctgattcacgtcgctatcgagcttgtcgttgttgatggtaaacagtacgtcgccggcgttgacggttgcgccttcctgcaccttgacttcgccgatggtgccgtcgatctgcggggcgacgacggtggagttgatgggttctatggaaccggtggagctgacttggtcgacgaaatggccacgttccaccgttgccgtggataccggagacacgcccccatctgacggggtgataatcgcgtgcaccaccataaagccgataatcagtaccgccacgacggcgacggcgatgatgcgatgcaccacgcgctttttcttgcgcgtctcacgttcgcgcattaatcggttgaattcggcgacttccgcgttctccgcctcgccttgggcaagggcgtcgacacttgattccacggtgtcggtagcgtccaacggttgtatgattgcggtctgctgctgatccttctgcatgtgctctcccccatggctggctccgagcctcgtgcccggatactggttccaagcctatggaggaatggcgtggtttccatcatgcgcaggattgaattgatggggagttgtcatccttaaggattagttggggtggggaatttatgggctgttttcagtcttagctctcgccttcgcttccgcttttctctcccccagtcatgcttcgcatgacagcctcctcgtcagagggggcttatgaataagcaaagggctcgggacgaatcccgagcccattggcgttagcgaactaacaacaccgtggaggtgttatcactcgttgtcgccagcggtagcggcggtagcggtgacggcacccttcttgtcggtgttcacgccggagtacacccagtcggtgtagtccgggtggtcgtagcccttgtcgacggcgaactggaaggcctcatcacggaacttctcgagctcgtcgatcttgtcggcgtacttgtcggcgtcgatcatgcgcagggcctcagcggtcagctcgtagcggtcgatgcggttgacacgaaccatgtcgtacggggtggtggtggagccctcctcctcgtagccgtggacgttgaagttgtcgtggttcggacggtcgtagatcaggccgcgcacgtcgtgagcgtaggagtggtacgcgaacagcaccggcttgtcggcggtgaagatgtcggcgaactcctcgtcggtcagagcctcgtcgttctccttggcggactgcagggagagcaggtcggcaacgttcacaaccttgaacttgacgcccagttccttcagcttgtcggaagcagccatgatctcctgagtcgggacatcgccggcggcggcaagcacgacctcggcctcatcgttgttcttggcggtggaagcccaatcccaagcggcggcacccttctcgagctcggcacgagcctcgtccagggtcagccaggtggcagcaggctgcttgccggcgatgatggcgttgatcttgttggtggacttgtagcacttctcggcgatggccagcagcatgttcgcatcggtggcgaagtagatgccgatgacgtggtcattgtggaagcacttgttcagcaggacggaggtgacacccgggtcctggtgggagaagccgttgtggtcctgacgccaaacgtgggaggagaccagcaggttcatggaggcgatcggcttgcgccacggaatctcgcggacggtagcctcaagccacttggcgtgctggttcagcatggagtcgatcacgtggacgaaggactcgtaggagctccagatgccgtgacgaccggtcagcaggtaggcctcgaggaagccttccatctggtgctcggacagctgctcaacgacctggccggagacgtgcatgtgctcgtcgacctcgtcggagatgtagccggcatcccactgcttgttggtgacttcgtaggaagcctgcagacggttggaagcggtctcatccggtccgaagatgcggaagtcgcgcgggttgttcttgatgatgtcgcgagtgtagacacccagacgacgggtggcctcgagctggccccagccgtggccgtactcagccacttccttgacctcgtagtcttcaaggttcggcagcttcaggtcgtcgcggatcacaccaccgttggcgttcgggttggcaccgatacgcagctcgcccttcggcatgaaggcaaggacgtcgtccttgacagcgccgttggcgtcgaacagctcttccggcttgtaggactcgagccagttcttgaggacctcgaagtgggcctcggtgtcgcgggcggaagccagcggcacctggtgagcgcgccaggagccctcggtcttcttgccgtcgatgtacttcgggcaggtccagcccttcggggtgcggaagatcagcatcgggtagaacggacggtgcacgttgtcggtctgagcggcggccttgatgtcgcagatctcgtcccagatggtctcccacagctcggcgaagcggcggtggatggacatgtggtcctcatcatcgaagccagcgacgaactcgtagggctcgtaacccatgccgtggaagaactcgtggagctcttcgtcggagatgcgggacaggatggtcgggttggcgatcttgtagccgttgaggtgcaggatcggcagcacgataccgtcggtgcgcgggttcacgagcttgttggactgccaaccggtagccagcgggccggtctcggcctcgccgtcgccgacgatggccgggacgaacaggctcgggttgtccatgatggcaccgtaagcgtgggacagagcgtaacccagctcaccaccctcgtggatggagcccggggtctccggagcgaagtgggacggaataccgcccgggtaagagaactgacggaagaacttctgcagaccagcttcgtccttggtgatcttcgggaaggtctcagtgtaggtgccgtccaggtaggactgggaggtaccggccgggccaccgtggcccgggcccatgatgatcacggtgttctggccgtggtcagcaatgaaacggttgatgtggccgatgaggaagttcaggccaggggtagtgccccagtggcccaccagacggtgcttcacatcttcgcgggtgaagggctccttcatcagcgggttggaacgcagataaatctggccgatggaaaggtagttggcaacgcgccagtacttgtcaacgccttcgagggcttcctcggaaaccggagcgttgagcttcttccaaggggtgccaataacaggactcgtcatgtgtactcctgtactcctgcacgtgatcgtgcgattgattatttctgttcggtcacggttcctgacccttgcggtgccaaggttttccgttcccaatcaatcgtcatggtacgaggacaacgcgacttttgaacgatttcttgcgggtgtgttcgaaattgttgcggaaatttcagtatttgtgcggttcacctgaccgtttgtcaacattagttttttcaacatactttttcagaacggcggaagcatgcggaaatctagcatctggctagaacagcgcacgttcgatttcccatgttcgaaatcggcgtgttgtccgactacaggcatgtagtttgttcgatttgcgcacatagtccctgcgtgtcggccttgtcgccttgaccagtgataatcaggggtgttcagcccacgtaaaattccaatgaacgttaggggaatatcaatggcaaacggtcctgtgcttgtcgtcgacttcggcgcccagtacgcccagctcatcgcccgccgcgtgcgcgaggcaggcgtgtactccgagctggtccctcattccatgccggtcgacgagatcctggccaaggatccgaaggcgattattctgtccggcggcccggcctccgtgttcgagcccggcgcgccgaccatagataccaaggtattcgaatccggtgttccggtgcttggtatctgctacggcttccaggtcatggcctatgagctcggcggcaaggtggataaggccgctctcggcgaatacggcaagacctcagccaccatcgacgacgccgacggcatcctcgccgactcccccgccgagcagaccacgtggatgagccacggtgtggcggtcgaacaggccccggccggcttcgaagtgctggcccacaccgaaggcgcgcccgtggccgccatggcggacgaatcccgcaagctctacggtgtgcagtggcacccggaagtcaagcactccccgcttggccagaagcttatcgaaaacttcctgcaccgttgcgccgcgctgcccaacgactgggacgcctcctcgattatcgaggatcaagtcaagaagatccgcgagaaggtcggcgacgccgaggtgatctgcggcctgtccggcggcgtggactccgccgtggccgccgctctggtgcacaaggccatcggcgaccagctcacctgcgtgttcgtggaccacggcctgctgcgtaagggcgaggtcgagcaggtcaagcacgacttcgttgccgccaccggcatcaagctcatcaccgtggacgcggccgacgacttccttgaggccctgaagggagtctccgagccggagcgcaagcgcaagatcatcggtgagaagttcatccgcacgttcgagaaggcccagcgccaagtgcttgaagaggccggcgcgcgcggcaaggaagtcaagttcctcgtgcagggcaccctctaccccgacgtcgtcgaatccggcggcggcgacggtgccgccaacatcaagtcccaccacaacgtcggcggcctgcccaaggacatcaagttccagctcatcgaaccgctgcgcactctgttcaaggatgaggtgcgcgccatcggcaccgagctcggtctgcccgacgaaatcgtctggcgtcagcctttcccgggcccgggtctgggcatccgcatcatcggcgagatcaccaaggagcgcctcgacctgctgcgcgaggccgacgccatcgcccgcgaggagctctccaaggccggtctcgaccgtgacatctggcagtgcccagtcgtgctgctcgccgacgttcactcggtgggcgtccaaggcgacgagcgcacctacggctcccccatcgtgctgcgtccggtgagctcggaggacgccatgaccgccgactggtctcgcgtgccctacgatgtgctcgccacgatctccacgcgcatcaccaacgagtgccgacagatcaaccgcgtcgttctcgattgcacgagcaagcctccggccacaattgaatgggagtaattgctctctgtgacgaatgggattctccatcggggaatcccttttttgttgccgacgatgcccggtataatttttccgcttacgacgtcgtccggaaagggatgccgacctctttgcgccagggattcgacaacgaaaaatacatcgaactgcaagccgccaacatctcaacagcgtgaaccgacgcttgcactcggatgaaacgctgattgcattgtcaatcaccagcgccaccagtcctgtggccgctcgcgtcatcgacgggctcaaacagttgcagggctgcgacgcctttttctccgttatcatctcatccacggacgaggcgttgtatcgcaaactcggcatcaacgtgtgctgcgaaccgaagtacgaacgggtgagtctgtatcaccggtaaacgccaccgataagcgcggtatgccgcgaatcgtcaagccggtaatcatgcagcatgcggcctgacgattcgctgctgtcgcattgtctctcccctcgaccatgctgggcttgttttccgtttgttggagagaacgggggatgccatcagcactacggtgagagaaggattatccgtgaagcggttcgtgggtctagacggtattaaaggactggcgctgctggccatcgtgctctatcactgcatgcagcagcgtctgccgggcggattctacggcgtggacgtgttcttcaccgtctcgggattcctgaccgccacaagcctcatacggtccctgaacacgaccggaacgctcaacctcgtgcgattcatccccaagcgggcggtgcgcctctaccccgcgttgctcctgctgatcccgatcatcgtcagcgccggctggctgttcgatcacgatatgctggtgtccatccgcgatcaggtcatcaccgtgctgctgggctgctacaactggtacgccatcggcacgggacaaagctacttcgaccagatgaatccgcaggtattccgtcatctgtggttcatcggcgtgcttatgcagttctacgtgatcgtgccgttcatcgtatggctgatgtggcggattcggcgcacgcggtatgcctcactggtccctttgtcgctggcggcggccagcggccttgccatgggactgatgtatacgcccaagggcgatcccacccgcgtctacttcggcaccgatac

SEQ ID NO: 390 - DNA, 26764 bp, Unknown
  R42_10m  MAG No. k141_49364
gcctttgctccaatctccgaatctcttgaactgaccatcccagaaatccctcatcaccgtgttgtttgggttaggatgagcggcattcgcggcctgtttcgcatcctgccaaccggaaacgaaacgattccatgccctgccgccgttcttcaacgaatgcccaacattatgcattcccttgcctaaagcatcccaaccctgacgagccaaattagcggcatagtttcctattccatcatgacgtatagcactcaatacgttctctccggattgcattgctttgccgccttcgctaacaagcatcttccagaaaccacctgcagcatccttagatttcaataaccgcttaccccatttagtaggcccccacatctgagaacgcaaaactctcttatagattccggcggtaaccggagagtcaaaaatgcccttgccgtttttcagagcgaccttattagcaattgttgtagcaacgctcttggcatttgcaatcttgcttacagctttcaagccggccccaacatccaataatgcccagaaaccggataccacaacttcccaccacgacgcatcaccgttcgccttggccaacagcttgtccacgaacagcagcgcggccaccgccgcggaggcaacggcaatccaaccgccgaagaacaacccaataacaccaaggacaatggaggcgacctcaagaatcttcacggtaatctgccaagcatcggaatactgccattgctccgcaaaaccatgcaacttcggcgattcacgcgtggcagcggcaatagccttggcctgctcatcgccagccttcttatagttgtcgacgatcctatgcaccgctgctttggccgcttccaaatctctattggccgtggacagtccttgctcatactggtcgaccatgctctgcgcccgtctgcgtcgatcccgtgcacgctcataatcctcgtcactggcatcagggctgagattggaatacgcactttgcacacgatcgaattcacgccggcttgatgctacattctgttgagcattcgcctgcgctctcttggcattctccacctccacgaaggcactggaagcctgacgctgatagctatcgatgtctgaactccacgtgttcagtgctttcgcgacatccccaaaccctgtggcaaagttgcggaaatccttcggcatggtaccaattttgtcaacgaacttggtcacccattcgccgctcatgccttccttggtctgcaaatgatccaaatcatctgccatcttattgaaagtgccttgcaggttcgagtatcgccccgccaagtcggcagtgaatccaccattcccaggaacctgattccccgaatacccgacaaaaccccaatcctcaccatcgagattcacgatatttcctccccactcgtcgacgcatacgcgctggaattcacaaactcaatactcaccgtatccgtcatcgaagcaaacaaattaaacaaaacatcagcaatatcaatttgcggagtggcaccagttaccacaaacacatgctccccatacgggatgaaagttcgaagcgacgccacatgacgatcggttttatcacccttgtcatcaaccaacgacgttattgattgcgcctgaaccgcagtccccattttcggcaaattcactttctgcaacgacatgaattcaccatcaccaagttcagcctgttcgctggaaagcgtttcaataactgcgtccaattcatcatccaaatcacctaagacactggcctgaggtaattgtgcaatcatgaatgtcgccattacctgcacagcatcatcaggatcaatatccgtcgcaattgcatatcggacaccggacttccacgcatcggcatatgccttcaccaagtaacggcgcaacgcgggataaaccgctcgccacgatggcacaacatagcgcaattgaccaagctgacgttcaatttctatctcgcgatgttttggatccacttcaatctcatgccacccttgtggtggaaccatggagataacatattgctcgtttgtcaatcccatcccccttgaagatacggcctaaagaagctcaatgcctcatgcctgtagaatcaatcatctaccaccagacacgtcagctcccactgccagaagtatgatcaaccttcaacgaagcctgaatctgctcatcgactttatcggaaccggttttgacattctgtagaaaatcaaccaatttctcggttttaatcttgtatttattcttcgtggatgaaacctgagtattgaatttgctcaaggcattaataaccggggcgtatcccacattgcccttgtcaggtttcatatcatcattgccacgtaaattcagtgtctgctgaatgttctcaaagccagtcttcatacggacaatggactcatcaataatgactatcttggactcagccatacactctcccaatacaagtactggaaaacagtacaaaataagcaacggcctgcaatgcctcaaaccccctgcatcgcaggccgctcacttgccaattcaggcagtattactgcagcgcgttggccaactgagaatcgagttcggtcaaagcatcctgcgtcttttgcaggaactgctgcatgccattaagaccattcacagtatcggttgcacccttagtgaactgctggtacgaagtctcaaaagcaccggaagccttatctgtgacgaagccgctcgtcaccaactcgctcacggtcttgttcaactgatcaagcgtatcgacaagactttggcggccactctcaaggctgctcttcacacgctggatgtcatcatacgttacatttacgttggccataggactaacccttcccatacggaaccttacgccaccggtccataccgccgccgacgccgaatggacaaccatgcccatccatgagtaagaatacccccgatatacggtcttgacaatacattgagccagaataagaacagtagaacgatgctcctaaaactagctgacctgcaccaactttgctctcatgccgccgaaacgtaacacatcacccggaaccatgctggtcctggtaagcttaggcagttcaattctggaaccatgagattccaaccatgtaccattggcagaatcacagtccatcacccagacctgccctatagcggtcacaccaaattcgaaatgtctgcgcgaagtctgctggctggaatcatgcagcaccgcaaatgcctcatatccatcttctgccgtagatggcatccgcccggcaccacatctcgatttcacctcaatgcgctgcccatccgaaaactccatcacataccgcggaattttgcgatgcaagggcagattcacttcggcagagaccggttgaccagcacgtactggtggttcgccaaatgaagacccttccaaagcggcacgactccattcatctcggatactggtctgactggttcttggcagcacaggcagttcccgatacacctgcgcggggctcgtaccagcaataatgcctgatgcctttttcttcttgccaaacataatcgtcatctccccgtgcgcggtgctggaggtatcgctggcgtctccgattgcggctcttgtggcataggtggagccggtattgcttcgactgcggtaagcagtgtatcctgaggctcggcttcaggaactccatccataggttcgctggacgccacctgcatagtaacggacaatgctcccatatgtacaaatcctcggccagatggcacatcagccgtcaactgcgcgcggcgaagacgaatattgatgagatcttggtaaatcacctcgtccggtttcaacaacacgccttgacgaatcgtcttaaccttggatccccaattgccgaatccagtgggaaattccgccgcatctccagcaacgacgaatcccgcagaattagcatcaagtacaccgatcttcgattgcaaccagttcgaagctggaacatccttcagcagttggcagtcgtcgaacacaaataacgttttgggatcatctgcatattgagagagcagttcctcggtaagctcagatggcagagtgattatccgttctacacccggcttatcgacaaatgcacgcaatgcattgttcttgggggctgcgagaatcacgcgatacccaccggctagcgcgccattgacaatggtgaccagcatagtggtcttgccgctttgcgacgtaccgtaaatcggcaacatgggcgtctcacctggatcgaacaatattggctcgttgtcttcgccaccgatgccgagcggaatgcggtgttttgttccacgttccggaagataatcatcgccatagtcgctgatacgagtgtgcactgcggacaaagtaatctcttcaggcagctgctctacagtgaagggcatgaccgcacgtggcaatccgcggtcacgaccagacttcagtttggttccgctagcacgaatcaattctgattcctcttggccggaaagaccttcgtgaatctttgcaacctggatttcagcgccatcttccgatcggtatccacgcccatcaggaatgttttccggcacatcacgtgacgacatgccgacttccgtgtaatcggatggatcgaccaaacgcagcagtatcttgctgtccgaaagcaccgacatgcgaccggctagtagtagatgatctcctgtgagaataaagtgaacacctgaagatgggccttcgcgcatcagtatctgcagacgctcaatcagggagccaccatcgtagctctggaatactgagttgaaaccatcccatgaatccagcaataccaatatgtgcggtaatgcgccttcacgtgcagctacatcgctcgcattgtattcatcgatgctgctgtaaccatctttagacagcagactcgctcggcgtttagtttccgcttcaagtttgcctatcagacgctcaatcttctgcgtctcactgcgtaacgccaccgcgcctacattcggcaaagcagtcaacggtgaaatcgcgccattgcctgcgtcgatgcagtagatgtgcagttctctcggcgtataagccatgctgcctgaataggcaatagtgcgcaatgccgtagatttaccggaacgcgacgttccgacaatgaacatattgccaaaggaactggcatctatagacactactgtctgttgctggcgttgaggatagtcgcccaaagcgaatgggataatcacatgcccctgactatctttatcggtcgaggcctcaaactctttcagctggttcaaatccacatgttcggacaatgccggtagccaaggctgccgctgctgagggatatgctcacgacgcgcgacttcgttgatgctatccacaagcatcttcaaatcggtcacattcacatcgcccttgtccttcttgctcttcggccgttgtggcaccgcgccgccgagttgagagaacgccattgaacgaataaacggagtctgagtctgctgtgatcccttattctttgacggattgatatatcttccgcccacacgcgccgattggaacgggatcagcgagctggaacccaaacgtaccacagcacggcccggtgtggattttgaaatcagtgcggcatcttttgcatcgatcacatcctggctctctgaggaatcagtcatgcgcaaggcaatgcgcaagttcgtgttcgctcggatttccggggaaaccacaccacccggtcgctgcgtggcaagcaacagatgaatgcccagcgaacggcctcgctgcgcaatgttcaccaaaccggtgacaaagtcaggaagttcacgggcgagcgaggcaaattcatcgatgacgatgagcaatcgcggtatctctggaaggctgggcttggcctcacgcatatcgatataatcttcaagatccttggctccagcccgtgccagtaaatgctcacggtagttgagctcggcacccagcgaagtcagcgcacgggaaacaagatgattatccaaatcagtgaccatgcccacggtgtgaggtagtttcacacaatccttgaatgccgcgccacctttgtaatccacaagcacgaagttcaacgcttgtggcgtattggccacagccagagatgcgaccaaggattgcaataattctgacttaccagaaccggtggtgccgccaatcaatccgtgagggccgtctttggaaatatccaatccgaatggaccatccacggattcgccaatcacacacgctgtagaacgtgggtacattgcccatcgcgcctcgatttgctccggcgtaggcgtcaaatccagcaaatccaacagacgactgtgatcgggaatggcggactgcccttcggcagggctgccatcttcaatgggagccaacgcaccagccacggcaccaagccaatcctgcgataccaaatcaggcatgatgtcaaacacatcgtcggctttgttgctttccacacgaaggtctttcgcggtagcagtaatcacggtctggcattcctcaggtaataatcgctcatccgtgtcgatgcacagtgcgtatataccaagtgccggcccctcctgcaggagtcgtatgatgccaggcatggagcgcagcacgtgcgcatgttccatgatgacaaccaccgctggccccacccagtgtttgatggactgccgcttttgctcactgctgcgttcatccagcatcgtcgtcagctcagaaatacgcagagccaaatcatccgcactaaccgccatggtacgcaccgcattctggccgaaatgcggcgcaaaatgcggaaaccactgcgcaaacgaccaatcaatgccagcaatcgcctgacctcgatccttaaggcgaggagacagcagatacaacgtgagatcacgggtggaatgcaatgccgccatctgcgcggtcatccatgacaccaccggatacaacacgtcggcatttccagtgcagccaacacatccggcatccggcagagataccgctaccggaaaattcttcaactgccacttggtgacccgctcaaactccattttttgggggtcttccaatgtgatgtgcgagtctatggttcccgtgcccacacgcaaacgcagccacgattcatcagtggagcggcggttccacaaccgtgcggtgtgacgagcgcagatatccaatacctgtgtgggatcaggatactcccgtcgtgactgggccacctcagcatcaacagctttttgcgcctcgccgcgaatacgcttcgtgttttccgcaaagcgtttcatctgctgcttgtatcgcttctttccggcacgattaccggaaatatacgagccaatcatcatcgctgggctcatcagaccgaacatgagataggtatagctcttcagaagcacgcacattactgcagccattgccagaggcagcaggctcgtgagcaggggaatcggcgctttctctggcttctgcggttctccgggcagcgtaaactttcgctgtttgaccacctcgcgaatcttcggcggcctagcgaacagccagcgaccttccatttcttcagtatccaccggcacggaagtctcacggccgtgggtcacggtgacaatgcattccggcagcacgatttcggtgctgttattcagtgataccggttctatgacttctttgccatcgatgaaaacaccggaatgaatttcccgcttgcgcttgcggtaccatgcggtgcgcttctgcagcttgccttcacgcacatgcggaatcaggcgtacgtcactgtctgccccgacatccaacatgaaatccgcattcatggagtttcgttcaggattcagcaatgtgcctatcgacatcgtgccgacagacacatcatatacagcgcccgcattctcgccgctgacaaaccgcaattgcacataaccatcattgagaccggtattggcataaggattcaatggtttccgatcacgcttcaacagcgaaatccacgagccctcgtgcaaacccgcctgcgacacggtaatggtcggaggcacagttctaccgtctatggccaaacccatggaatccaaaggcgactgaaatcccacaatattggacagcgaaggaagaatagcggatatcgacgtatcaccggacacatccagataggcagtgaaacgcacatccgcaatgccatcgtggatggtaaccaaacccttcatcagtttctcccctcgcctatcttctgattaatttatatcatcgctctgccccatagattcgcagcaggcatgcacaaatgaaagggactccagcacatcctcgaacacacacaacgtctacgcacgacaagcgatgccgttcaacaccacagccggtgaccagacaacccatacccagccaacaccacatcacgcaatccctcatcaacggtagtgggccagcccagaatcaattggactggcccactatggcatcagcaattactcaccgcaacgccccgcaaacaaccctcgttaacgggaaacgagtgcagtcacctcaccgctcgaacgggttcttgcggtacgcaaactgctttctgcgctggttcaccgcgacaatcgctccggcgatggcggccaagaccaccagtgcaccgaagatcatcgtgttgcgcagccacggggtgtgggtggcgtactgccaccagttggaggccacgtagatgttgtcgtaggtggacgtcgcctcgttgcctgccttgtcgatcgtgtggatcacgatctcgtggctcttggcgtcggcgtcgaacgtcagactcggcgtggacttgagcgtggcatcgcccttccagctgtctttgagctggccgtcgacatacacttcggtggacttgatgccgaggttgtctttggcgtccaccgatgcgggctgtccctgctggctgtagtacacggtgccggacttgatgccgagcagcgaagcagtcggcgcggtcgagtcgacggcgaagttcacttcggcagtgcccttacggtcggcgttcttcttgtccatggtgttctgcgagaggttgcccgcctcgtccatggactgcacctgcacacggtagaagccgtcagagttaaagcgggatgccggcacggtgtacaccgtacggctccatcccttgtcgtcagaggtcgcgaccttgtagtcgttgttggtgagcgtggtcgccttgtcgtccttggcgatcacgatctggcgcttgctcaggtcaagaccggagacgttgatctccgttatctgcacgtcctgcgccttcttcaggtaggtgccgcgcaggttcgtggtgtccgcatcgaacgtgtaggtggagccgaagcggttcacggagaaggtcttcttggtctcgaacgtgttgccagccagatcggtgccgtgcgccttgatggtgtacacgtcatcgaagtcgaccttgcgttcgaagtccgtgaagtccacggtgcggtcgttggccgcatcggtggtgacgttcttgggcatcttgtcgcccttgagttcgccgcgatggtcgccgaccagcgtgtagctcacgttcttcatgtcgatgttgacatcgttgaagtcgatcaacggtgccacggtaccggcgtacgcagtcttgtcttccacgcggtcgatcttgatctgcggcttggtcttgtcaaccacgaactcgggttcgctcacctcttcggccttgttgccggccagatcggtggcggtggccttgatggtgaagtgcgcctcgcccgtgaatgccacggagttcgtccactcggtggattcgcgcgtgccgccggtgcgctgccagcccgccgggccgggggctgcggtgtccgcgccgttatcgtccttggcggtgacggtgatgaccgattcgtccttggagaagttgcgctcgacttcgcgaatggtagcgttgcgatcggccgcgtagtatttgccgttcttcacgttgttgttgtcgaaggtgagggtcagcttcggagccacggtgtcgaccgtgaactcctcatgaatcgtattcgacgggtgatcgcccggatcggtgtaggcggcgtccacagtccagtcgccgtcgctgtcggcggcgaaggtggccacgtacgtcttcaggtcaccactcgcgttcttgaaggaggagaccggaatggtggccttcttgccgtcgaccgacgtggtgacgaccacacgatcgccctcatacttcttggagaaatcgaagttcgattcggtcagtgtcacggtaccggcacggtgggccttgtagtacttgccgttgcgcacatcattgttgtcgtaggagactgcgatggtgggagccacggtgtcgatggccacgccgttcaatcccttcagtgcgttggcggcttggttgccgttcacgccttcgtaggcgttgagcctgccggtgtcgaccgggttgccggcctcatcgcgaatggtgaggctggtttcaccaaggtagacgcgctggctgtcgccatccatcgtgaagctgatgctgccggcggccgcgtcgcccgcatagacgggagccgggtcgttcttgccggaaagccagttgtcgaagtgcttggtggagaacgcggtggagtccgcagtcacaccggacacattatcgctgatgccgttcagcgtggccgtgaagacatcagtggagaagatccaatcccacttcttcggtgcttcactggaagcggtcaggtcgcccagcttcggagcggtccagtcgagcaccacgtctttggactgggtggatgcctcattggcctttgcctgtagaccggcataggcgaggtgcagcgtgtaattgccttccacttcgtcggtcttgccgttgatcaacagcttctggccggagagcgtccacgtgtagccatcgccttcagcccactgtgcatcgctggcatccaacggcttgatgttctgctcgttctggccaccggtcaacggcgtggtgttcgaagtactaccagcgagcaggttcgtcttgccggcgttgagcttggcgtaaatcgggaaccagtggtcggtgatggtgtaggccaccttgaccttgccacggaagtacttgttgttgttatcactggagtcgggcacggagttgtcggacttggtgaccgcgaaggatgccttggtgtcgtcaccattcacatcggcaacgacggcgtcgtaatccttgacattgtcctgaaccggagctttcttgaagctttccttgtccagcgcgttgccgaggttgtcattgacgctcaccgtgatcttgctcaggtcgtagaagccttcctgatcaagggtcaactgtcccttgccttcgttgtcgagtgtgacattcaccgtcttgccctcggcaagcgtcttgcccttcagatcagtgccgtcaggaatggtcagcttaacggagtcatccttgatgccggacgtatgggcttcgttcttggcggagtcgttcgaggactggccgttgggcagcaagtccttgatccagaccgtgaacgtctgtgcaccggccttggcgaagaccgtgtagctcttgccttgcacggtggtatcgacgatggtctcgcccttggcaccggccggaccgctgatcttggtcagcactgggcgcttggtgtccaacaggtagttggtagtgccggtgctttgagcgttgaacagctcgacattgttgccgaagttcttctggagcgtcagctggtagtcgccgttgaactgcttgccggtggtatccttgtcggttttggtccgcttgggcaggtttgcggtgcccagcgtgatgacgccgtccttataggtggcgtcactgatcttgaacgtgaaggacttcgaaccggcgtcgccgtattgcaccgcaccggtcagcaagttggcatcggcatagccggccttgaccacatcccagcggtaggcgaacgcggggtcaccggcgaccttgagggagatgttggtgagatcttccttgtaggtattctgcgggtcagcatcgttgagctgcagagtcgccttcgcggtctgcttgctcacgcccagcgtatccggcagctgcttggccgcagcggccacggtggtatcagtggacttggccagtgcggccttcaccgtggccaatgtggtttcggcatcgctgacattgggcttcgtggtcgccttatcggtggctctgagggatacgccggccagcgtgtacttgccgtcctggtcgccgagcgtcagttggaccttgttggggtcgttgttcacgcgctgaagttcggtccacttgccggtgaccttatcgccattccacgtggtgtaatcgaccttggcttcgacctttgccagaccagaggtctgtgcatcgtctttgccggcacctgttgccgtggaatcgggcagcagatcgcgcgcgtccaaagtgatggtggcggcagaacgggacacgacactgatggaatcgtccttggtggaggtcagttcatctctgcctgcctggtaggcggcaccggtgaagctcggagcctgcgtatccacgccgaaggtcttggcgttattggtcacgtcacccaacactgccagcaatgtggggttatcggttaccgtaatggcatactggccgtttgtgttcttggcgtcaatcaacggcttggcggcatccgctgcgatgacgatctcgtcaccggcgccgttcaccgtggcaccggccaccgggaatgtgcccccgtacacggtcttgccgccggcggtcaatgtgctggtgagcaggttcaggcccttggtgccggcaccttcttgcagacccttcagttcgtccgccagccacgggttgttcttgacggtcagtgtgaccttgggagtgccgttgatgtagtcggtgccgcttaccgataccgtggtcttcggctggacattcttgccgatacgaatcttcgtgtaggtgaacttatcgccggcaattgcgtttaccttttcagccttggactgcgtacctgcattgtccgtggcttggatggtgaagtccgtcaaatcgtaggttccggccttggtgagcgggaatgtgtaggtgccgtcaccgttgttggtcaacgtgaccgtggcctgcttgcccgtctcaggatcgataccgcttgcaatcaccttgcccacaccggcaccatcatccgtaacggtgaaggtcagggcacgttctttacggtcgactgcgaagagtgtctttccgaacggaatatcaatgccgccgttcttggagtagcccttccacgcaacggtaggagcggtggtgtcgatggcgaacgactgcgttacagtcggcgtgcccggcagcgcggagttcaggcttacggtgtggttaccggtcttcaggtccagtccggcatcgccgcagtccatggcaccattcgtaagattatcggcatcgcacaccgggattgtggcaccggtgccgtcggcagccggaacggtcagcaacttgataccgttcgccttgagcagggcgagttcatcggcgaagtatgcgctcgtgctgctcaccgagaagccgccgaccttgctgtaatacgtggtgccgttgttgacagcacccttatccggggtggtaccggtcagattcagggacagaccagtgccggcattcgggtcaacaataacggtcttcgcgtcgagcaaatcgctcaacggcttcgcatcggaagcgctgccgaaccaattggtgaccgtaaccgtggtcttggtcaggtcggtcttgccgttaggcacggtccatgcttcatctgccttgaccgtatcggtcttggtgccgttgccattcggatacgtcacctcataagacacgacattggctgcctcagccgcaaccggagtaaaggttacggacggcgacgtggtcgtgaaccaggtaccgtcggtcgcgtctttgtctttgcctttcagccaatcagtatcaacaacgtcgccgaacaccgccgtatccacggcggcgggcttggtgctgtcataagacaattgaggagccgtgatggtgctcgtgccgtcgccatccttgaactgattcaggtcaatggcggcatctgccgctgtaggatcagccggcgcggcaactgtcacatcgagcgtaaccggatcaccgctcagagcgaacgccggaccatcattcggctcaacggtgtaggtgtagccgtcctgcacattgcctgtacggtggaagtcgccatacttgacttccttgacgcccaagatgcccacggtcacggtaaaggcaatcttgtctttatccgcaccttcgtattgtccgttacggtcaaattggcccgcggggaaaccatcaaacccagtaatcgtcacgcccagacgaacattcgaggcattggtgcggccatcggtcagcggctgggcattatcggccaccttgccgtccttatcggcggcataccaagccagatccatcttcggcgtagtggcggcagccggctgtgccttgacggccttgaaggagcgtgcggacaccacggagccggtggtctgctcgggcttgaggtcggaagtcgaatcggcgctggctaccacggcggtagcacccatggcaagagccgccacagccacggccgcaccgatcaacgacttgcgccagaaactggaattagttacgaagctcattacttgttcttccctccacgaaccaggatggtacgggattcatcgtcgtcggacgatgcttcattcgtcttgcggaattgcatcagcgaggtctcgccctcgtccgccaattcggcggcggaagccatggacaccggaatctcaaccacagattcgagtgcggccttggtacccagacgggtgctttcgtcttcctcgtccaccacagccggagcggcggaagccttttgcttggcaccgggcactgcggacggcttgtcttcgccggggcgagtaatgccacccttggtgctggcggaacccagagagccggaaccggtaccggtcaccgggcggaattcgatgtcgctggtgtcatgcgtaccggtggtggtatcggaaagggcacccttcttgcgcttgcggcgcgagccttcgcccagattctcggcgttggcccacgaaccggcgcgcactccacgcagttcggcgatctcacgttccgcgcgcttgccggtcagggcgtcacgcacggcgggaatgttgaacttgcggaacagcactacggccacgaccgcaagaatcacggccaaagccaggaatacgactgccagagtcctatagatatcggcgttcacttggcgtcccccttgatatcaacgaaagcgttggcgatggcgtccttggtgggcttttcggcctgttgcgcggctttcttgctggcatccagctcatcggtggtggtttcggtcttgtcggcaagcgatgcggcggcatcggccaaatcgctcatctgctgttgcgtgatgccgtccgcgcggaacttgcgcgggtacacgcgcaacgcatccaaggtcaggttcgcggattcgaggctgatcacaccgttatcttcccgagcggcggacttcaccagttcgttcagcttgctgaagtacggcttgtacttgcctgaatcggatccttcgttgatcagcggcacgatctccgtattgaagtcggcgatgtcggcgtagatcttggcgagcttgacgttgctgaagctactctcttgtgccgcgttgtgcatccactgcgaagcggcgcggatgcgggcgtatcgctgtggatcggtgttggcggcggacgcgctttggccggccatcttggagccggagtagtagtaccaatacatgcggccggtgtcgaagctcagctcggcccacttggtggagtccttgcgcaacgagtcggcgtgctggttgatcagcgtgttgtagatctgctcttcgtcgtcgctgaaatcactgtcagcggtgtaacgcttgatcagctgctcgtacggttcaatggcattggtcttgatttccactgcgcgcacgtaggcggcttctgcggcggatgcgtcggtggtctgcgccgcctggttcatccagtagtcgtaatcggtgttctgcgcgtggttggctagcaccaggctgccgccggcgagggccaggcagaccacggaggcgatcgccgtgccgaggaagccccaccacttggaattcagcgccttgcggtatgcggcgtcttcctgcttgtagtgtttcagcgcatacgcgaagtcggcgcaggtctggaagcgatcgtccggattcttgctggtggccttggcaatcaccagttccaagccctgcgaaagctccgggttgatctcacgaatcggcacaatgccgttcttgcgcgggtgtgagccagtcagcaggtagaacagggtggcaccgagcgcgtagatatcggtacgtgcgtccacggtgccgttatcggcgaactgttcgggagcgccgaagcccggcgtaccgagctggcggtcgtcaccgaccagcggcttgctgtccgcatccttaccggtctccagtgcaatgccgaagtcgataagcttgattgcgccctcaggggtcagcatcacattcgagggcttcatatcgcggaagatcaccggatgcttgcggcggtgcagatagtcgagcacatcgcacagctggatgccccaatcgaccacgtcttcttcggactgcgggccttccttcttgagcaggctcgccaaggtctggccttcgacgtaatccataacgacgaacaggctgcccttttcttcgatcaggtcgacgatacgtggaatcgccgggtgatcgaagcgcttaatcatattggcttcgacggtcaggctcttaatgaccaagtcgcgctgcaccggatcagaggcactgcgaatttccttgatggcccattgcttgttcagcgaggaatccattgccagatagacggtggacataccacccttgccgatctgggcaaggatcttgtaccgcttgccgaccaatgtgtttaaccccaccataggtggccctccaacacttgtctcttctcttacgacttccgtgcacgtaccgagccacaaaccactgggagcggtacccgcactcctaagttgccacactacccccgtaaatcgacaagaacaatactgctgtctgaaaatgcgagatggcccggaaccacacgagttccgggccatcttatcggggggggaggagggttactcctcgatgtcaggctgaccgccctgatcggagtagaaatcatccgggttgaagtcgtcgccgagcttcagatcaccgaactcgagattcgagaagttcaggtcggacaggtcggcgtcggagaaggtcgcgtcgccgagatcgccatcgccgcccagaccgaagttcgggtagatggtgtcgcggatggccttgtcgggctcgaccacggcgttgcggtagcgggcgaggcccgtaccggccgggatgagcttaccgatgatgacgttctccttgaggcccttgaggtcgtcgaccttctcggagagggcggcttcggtgagcacgcgggtggtctcctggaaggatgcggcggacagccaggagtcggtggccagcgacgccttggtgatgcccataagcgccggacgaccgacggccggacggccaccgttcttgacgatgttgcggttgatctcgcggaagcgggcattgtccaccagctcacccggcagcaggtcggtgtcgccggagtcgatgatggtcacgcggcgggtcatctggtgcacgatgacctcgatgtgcttgtcgtggatatccacaccctgggagcggtacacggtgtgcacttcctccacgatgttgacctgggcggcgcgcttgccgaggatggtgaggatcttcttgggatccacggaaccttcgaccagctgggtgccgaccttgatgtggtcgccgtcggcgaccttgagcggcacgcgcttggagacctggtaggtgatcggcttgatcacgccgtcttccttcggcgcgccggaatcggcgtccggggtcaggatgatctggcgaccgcgatcgttctccacgatcttgatgctgccggcgaactcggtgatcggggcctcacccttcggggtgcgggcctcgaaaagctcggtgacacggggaagaccctgggtgatatcggaggccgcggccacaccaccggagtggaaggaacgcagcgtcagctgggtaccaggctcaccgatggactgggcggcgacgataccgacggtctcgccgacatcgaccagcttgttggtggccagggaccagccatagcacttggcgcacacaccgcgcttggactcgcaggtcagcacggaacggcacttgacttcctcgacaccgtgggccacgaggtcgttgagcacgtccatggacagggcgtcgtcgcgcttgtacagcacggtctgtccgtcggccgggtcgatgacgtcggcggcgagcagacgggagtacgggccaccgtcggcggccttgacgagcaccaggttgccgtcgttgtcgcgctcggcgacgcggatgggcagaccggccttggtgccgcagtcctcttcgcgcacgatgacatcctgggagacgtcgaccagacgacgggtcaggtaaccggattctgcggtacgcagtgcggtatcggccagacccttacgtgcaccgtgctgggagatgaagtactccagcacggacaggccgtcgcggtagttggacttcacaggacgaggaatgatctcgcccttcgggttggccacgaggcctcgcatacctgcgatctggttgatctgcatcatgttgcctcgtgcaccggactgcacgatgatggccaggttggaggtcgggtcgaacttctcctcgacttccttggacacctcggcggtgcattcggtccacaggtcgatgagttcctgacggcgagcttcctcggtcagcagacccatctcgtagttggcgttgaccttgtcggccttggcctcgtactcggcgatcttctcgtcgcgctcgggcggctcgttcacgtcggagaacgcgaaggacacaccggaccacggtgcgcgggtgaagccaagatccttcagggcatccagcgtggcggccacctgctgggtggagtaacgcatggcgatgtcgtcgacgatcttggacagacggcccttggccacctgctcgttgacgaacgggtagtcggtcggcagagtctcgttgaacaggatgcggccgtaggaggtggcgaacagcacggtgccgtcgtggaagcgctcttccttgacgacctcgtcctcaccttcgcgcgggtcgagcaccttgacctcgccgggctcccagttcttcggcagcacgaagctctcgggcaggcggatgagcaccttggcctgcatgtcgatctcgtggcggtcgagggccatttcggcctcttccagcgaggagaacacgcggccctggcccttggcgccttccagcacggtggacaggtagtacagaccgaggatcatgtcctgggacggcatggtcacggtgtgaccgtcagccggcttcaggatgttgtcggaagccatcatcagcgagcgggcctcggcctgggcttcggcggacaggggcaggtggactgccatctggtcaccatcgaagtcggcgttgaaggcggcgcaggccagcggcggcaggtggatggccttgccttccaccaggatcggctcgaatgcctgaatacccagacggtgcagcgtaggtgcacggttgagcagcacggggtgctcggagatgacctcctcgagcacgccccacacttcggcgtcgccgcggtccacgagacgcttggcggacttcatgttctgcgcgtagttcaggtccacgaggcgcttgatgacgaacggcttgaacagctcgagggccatcggcttcggcagaccgcactggtgcatgcgcagggacggaccgaccacgatcacggaacggccggagtagtcgactcgcttaccgagcaggttctgacggaaacgaccctgcttacccttgagcatgtcggacagggacttcagcggacggttggaggcaccggtgaccgggcgaccacgacggccgttgtcgaacagggagtcgacggcttcctggagcatgcgcttctcgttgttgagcatgatttcaggggcgccgagctcgatcagtcgcttcagacggttgttacggttgatcacacggcggtacaggtcgttgaggtcggaggtggcgaaacgtccgccgtcgagctggaccatcgggcgcaggtccggcgggatgaccgggatcacgtcgagcaccatggcctccggcttgttgccggtggtcaggaaggcgttgacgaccttgaggcgcttcagggccttggtcttacgctgctcggaagcgtccttgatctcctcgcgcagttccttggagatggtctccaggtcaagggactgcaggcgcttcttgatggcttcggcgcccatgcagccgtcgaagtaatcgccgtagcggtcctgcatctcgcgccacaggtccacgtcgtcgaccatgtcgccgggcttgagcttcttgaacttgtcgaagacggcgtccacacgggcgatctggtcgttgtagcgggtgcggatggcggccatatcgcgctcggcaccgttacgcagcttggtgcgggccgggcccttggcctcgccggcctcctcaagggcggcgagatcctcttcgaccttcttggcgcgggcttcgatgtcggagtcacggcgctgctcaaggcgtttgatctcggaatcgaactcgtcctgcaggccgggcagatcgttgtggcgctcgtcctcgttcacctcggtgaccatgtaggaggcgaagtagatcacgcgctccagatccttcggggtgacgttcagcaggtagccgaggcgggaaggcacacctttgaagaaccagatgtgcgtcaccggggcggcgagctcgatgtggcccatgcgctcacggcgcacgcggctgcgggtcacttcgacgccgcatcgctcgcagacgatgcccttgaagcgcacgcgcttgtacttgccgcaggcgcactcccagtcacgggtcgggccgaagatctgttcgccgaacagaccgtccttctcaggcttcagcgtacggtagttgatggtttcaggcttcttgacctcaccgtggctccaaccacggatgtcatcggcggtggcaaggccgatgcgaatcttgtcaaatgcgttgacgtccagcacttgttaatccgtttctgttcttgagaccttcccaagctccccttgtcaggggagctgtcagccaaggctgactgaggggtagtgcaaaccggaaaggtctctgtacgttatctatttcacgttggcggagctacacgcggcgtattgaccgcatgcagcccgagggatcactggtattcgggctcttcggccttctggtcttccttggcggccgcgtcggggcgggcgccaatgttgaagccgaggtcgtcagcggagctggccggatcgtcatcctcatccttcatgtcgatggccacgccttcggcgttgagcacttcgacgttcagggacagggactgcatttccttcaggagcaccttgaacgactcagggatacctgccggcggcaggttatcgcccttgacgatggcaccgtagacgcgcacgcggccgtcaacgtcatcggatttggtggtcatcatctcgtgcagcgtgtaggcggcaccgtaggcctcaagggcccacacctccatctcgccgaagcgctggccaccgaactgggccttaccaccgagcggctgctgggtgatcatggagtacgggccggtggagcgggcgtggatcttgtcgtcgaccaggtggtgcagcttcagcatgtacatgtagccaacggaaatcggcttggtgtacggctcaccggtacggccatcgaacagggtggccttgccgtcggggccgaccagacggtcgccgtcgcggttcggcagcgtagtggacagcagacccttcaggacctcaggcttgacaccgtcgaacaccggggtggcgaccggggtgttcggctcggccttctcggcaccggacggaatcagcttcttccactcggcttccatgttcgggtcaagggagatatcccaaccggagtgagcgatccagccgaggtgcagttcgagcacctgaccgaggttcattcgggaaggcacacccagcgggttcaacatgatgtcgaccggagtaccgtcggcaaggaacggcatatcctcttccggcaggatgcgggagatgcagcccttgttgccgtggcggccggagagcttgtcgcccaccgtgatcttacggtgctgggcgatgtagacgcggatcatctggttgacgccgttgggcagctcgtcgccgtcctcctcggcatcctcgcgggtgatctccttgacgccgatgacggtaccggtctcgccgtgaggcacgcgcagggaggtgtcgcgcacctcgcgggacttctcgccgaagatggcgcgcagcaggcgctcctccggggtcagctcggtctcgcccttcggggtgaccttaccgaccaggatgtcgccggcctcgacctcggcgccgatgcggatgatgccgcgctcgtcgaggttggccacagcgtcctcgccgacgttcggcaggtcgcgggtgatctcttcggcgcccagcttggtttcgcgggcgtcgatctcgtactcctcgatgtggatggaggagagggtgtcgtcctgcacgaggcgctgggagatgatcacagcatcctcgtagttgtagccgttccacggcatgaaggcgatgagcaggttcttgcccagggccaggtcgcccttctggatggcaggaccatcggccagcaccgagccggcctccacacgctcgccatcatggatgatcgggcgctggttgtagcaggtggtctggttggaacgctggaacttggccagcttgtaggagctggtggtgccgtcgtcgttcatcacgcgaatcaggtcggcggacacgtaggtgaccacaccgtccttctcggacttgatgacgtcgccggaatcgttggcggcgcgccattcggagccggtgcccaccagtgggcgctcggattcgatcagcggcactgcctgacgctgcatgttggtacccatcagtgcacggtggccctcatcatgctccaggaacggaatcagggaggcaccgagggagaccatctgacgcggggagacatccatgtaatccacggagctcaccggcacatcgaccgcctcttcctcgccgactcgggcaagggcggacttggagacgaagttgccgttctcgtcgagttcctggttggcctgggcgatgacgtggtcgagatcacggtcagcggtcatgtactcgacctcgtcggtcacgtggccgttgacgaccttgcggtacggggtctcgatgaagccgaacgggttgacgcggccgaaggtcgccagggagccgatcagaccgatgttcgggccttcaggagactcgatcgggcacatacggccgaagtgggacgggtgcacgtcgcgcacttccatggaggcgcggtcgcgggacagaccgccggggcccagtgcggaaagacgacgcttgttcgtcacaccggacagtgggttgttctgatccatgaactgggagagctgggaagtgccgaagaactccttgatggtggcgttcaccgggcggatgttgatcagggactgcggggtgatggcctcggcgtcctgagtggtcatgcgctcgcgcaccacgcgctccatacggctcagaccggtacgcagctggttctggatcagctcgccgacttggcggatacgacggttgccgaagtgatcgatatcgtcgacgtccacgcgcaggtcaacgtcttcgccgttgcgcttgcccgggaaggtcgccgcaccgtcgtgcagggccaccagatacttgatcgtggcgatgatgtcttcctgatggagggaacggtcgttgaaatcggcctcgacacccagcttgcggttgatcttgtagcggccgacgcgggccagatcgtagcgcttggtgttgaagtagaaggagtccagcaggttcttgccggcctcgggggtcggggtgtcggccggacgaatcttgcggtagaggtcgacgagggcctcgtcctgggtctcgagggtttccttctccagggcgtcgagcaccagcgggtagtccttgaaggcctgggcgatctcggacttggtcatgccgatggccatgaggaacacgatggcggactgcttgcgcttgcggtccacgcgcacctgcggctggtccttcttgtcgatctcgaactcgagccatgcaccgcggctcgggatgatcttcgcgccgaagacttccttatcggaggtgcggtcctgctggcggtcgaagtagacgcccggggaacgcacgagctgggagacgatgactcgctcggtaccgccgatgatgaaggtgccgtgcggggtctgcagcgggaagtcgcccatgaacacggtctgggacttgatctcgccggtgtcgccgttctcgaattcggcgttcacgtacagcggagcggagtaggtgtaatccttctccttgcactcctgcacggtgtggcgcggctcctcgaagtacgggtccgagaaggtcagggacatggtctgtgcaaagttctcgatcggggagatctcgttgaagacctcgtcgagaccggaggtgtgggccacggtgttggtgccgttagcctcatcctcttcgacacgcttcttccagcggtcggaaccgatcagccaatcgaagctgtcggtctgtacgcccagcaggtagggcacatcgatgggttccttgatggaaccgaagttcacgcgatccgacgccttgtgcagatcaatgtcatgctggtcggcgcgtgcgatgatggtggtggtgttcgtcgtagactcagtagccaatggacgttccttatcgctcgctaatatgtggtaattcccctgggagcgccggcatggccaccatatgcctatgcggacgcttcattgtcgacggcatgcccgcaatatgacacacctcatgcgaagtcaaaagaatactgatatgcgaggacatttttagctcccgctgacgagggagctgtcgagcggagcgagactgagggagagacccagcgtccaaacaccaaccgcaggtcctaccccaccgtaaacgtcaccggatcgctcttcaccttcggatgatccttcaaactcagctgcgccacgtacgttcccgcattgaccttggcccaatccgactcatccgtgcattcggtgagcgtggcgttcgcatcggtattccacgtgaccttctgaacgtccttatcacccttggacatcagcagcagacgtgaatccgccggacacacatcggacttgtaaatcgtttcctgaccggaagtaatggtgagcacacggccggaatcggccccgtccaccaaacagttgcctgacccctcgtgcacgatggtcgcggtgaaatcaagcgatcctcctaccggcacggattgggaggccgcggaaagctgcaatgtcacatcactggccgagcaatccttgacgttgctgactttcttcggagccggcgtggcgtcgcgggaaatcgcatacacctcgtcatggtgaatcatcgtgttcacggcaccgataccccggccaaggctgtacacgcagaatacaatcagcgcgattatcagcagcaacaccgtgccggccacgatacgccgacgacgatagatggcctgctgctttttgctgatcctgcgcttgcgcggcttgccggaacggtcgtttcgggcgggcccgccggatggcccattggccccggtgccggctccgcgtgccgttctcgcgcctgatgtgttcctctgcactgccataacccttccagtctacggtcaccacacccatacacgcttggggagcccgccattttcacaatgtcagctgggtaatcgcaggccgccgtccagaatctcgatcaggccgtcatcgtcaaggctggcgatgcaggcggcaagctgaatctggtccttccaaagcttgtcggcatcttccctgggcaacgtgactccagcgggaagctcgcgcagcgcggcgagcaccagaccgcgcacctgtcgatccgtgccttggaatcgttggcgtgggcgggtgcgacgctcccccagtccggggcggccggccttgaggaacgcgcaatcgtcggcaatcgggcaggtgtcgcataacggcgatttggccgtgcagatcaccgcccccagttccattaccgactggttccatgtgaccgatgggcgttcgccacgatgcagtcgggagcgtttgccgccacggatagtgctgttcacggtatgttcggcgctaccggcattatcggcgacgtcagcatcgcgcccgagaatctcgtctttgggcagcatgcggttcgccagcgcgcgttcggccgggctggccgctcccccgcgcgattcgacgccaaggaacacacggctcagcacgcggcggatgttggtatcgatcacggcgattcgttcgccgaacgcaaagctcagcaccgcggaggcggtgtaatcgccgatgccgggcaatgcagtgagttcgtcatacgtacgcggcagtttgtcggcgtactgctcggccaccacgcgggcgcattcctgcaatcgcagcgcacggcgaggatagccaagccggccccatgcggtgatcacatcggctttaggtgctgcggcaagagcacgggcgtcaggccagcgtgccatccaatcgttccaatac

SEQ ID NO: 391 - DNA, 8700 bp, Unknown
  R42_10m  MAG No. k141_51447
ccggtggcgcaggagttgtgcggttttcttgccggccgcgtgtgatgtgtattgtgtacgcggcgatgctggtcgtatggtggtgtcatgccgttctttgagaggtcgtcagggcccacgcgtcatattttcaagtatggtccgtctcgtatttattgttacgatcggccggattcgctgttgatgccggtgggtgcccggcgcacgtacaggtcattgctgaagtgggagcggaagttgccctgtgccacgccgttggatgggatcgcgcgtgatctgggtgctttctggctgttggaccagtggttcacggtcggtctgcatgggtgggccgaatcgatgatcagctccagcatatcggatcgcaatcgtacgttctgccagtccgtgttccgtgcgtccgataccgcgaaccccaagtatgtgccgttattgcaggaacatcgcgatatgctgttcgaccgggtgcgcggtggtgtggcggggttggatccgtctgcgatggattatgtcgggtttcgcgcggcccgttgccgtgcggggcttgcggattggctgttcggcccggatcgggggatactgctcaatgatgttccgggcactggcgcgtggaacacggacccgttcccgcctgatggctggcgcgagcagctgggctggacgccgccggtttagtatgccgcacgccatctgtacagtctgtacggcatcgttgggggcctcgtcatgtccggtccggtatctggtttgccgggcctgggcatctgctgctcgtccttgttccctttcttgacaatgacaggggctttggctgaacagaatgtgggagtatgcttagtttcttgtagggggttcttttattgaagctcctcggcgtaatcgaccaatgacggcgtgagccgggaagagttaaggagatgggccatggcagaacatatttccgctgaagccggcgcgcttgcgaagggccagcaggccgttgcggaggcgaggcagggcatccagcaggagatcaccagggttcgtggcgagatcgagcagatgggatcgtactggtccggtgacgcggcgaccgctttcacccgcatggtgaatgcttgggatgagaagacttccagcatcaacaaccagctgaaccagctggagcagtccctgcggtccacggagcaggagcaggagcgttacgagcaggagacccagcagtccacctcgaagatcgccagcatgctgagctgattggttcggggaaacaagtatcaggcagataaggaaagcaaggaaatattatggctattggttcttttgccgtgaatccggctcaggtgcaggccctgtccgagagcattcgtaatggtgctaacggcattcagcagaagctggatgatctggacgccaaggtcagccagctgaagcagaactgggatggttccgcgcagcaggcgtatgctcaggcgcagagcaagtggaacgccgatttgaacgatgtgcgcaacattcttgcgcagatcgcttcggccactgctgagatttcgagtggctacaccgccagcgaccgcaaggccgccggtttcttcggctgattgagccgattctttgatgtgctgtgtttgccgttccattgcggtgttggtgtgggacggcaaacgcgtgtatatgcggtggatgcgttgatgtgagtggacgggggagaaccatggcggaagagattcgttacgatgccgatgaggccaatcgactggcggcacgcttggaaacagcatcggagtcagtcaacgattccgcgagtgagacttatggcgtgaaggtgactggaggatggaaagatccacacaccaagcgaatcaatgaggtattggcccgcagcgtcgcagtaattcgtgaagaccggacgcgctattcgcagaatatggctgactatggtaagcgtttggcggatgctactgcccatacctcgagattcgaagaaagctttcagactcaattgcaaaacaagcaaaatgagattgagtcatttgaagtacatgagatttaaatagttgctgttatcttgacgttgtgcagcgctgtgaaaagaggagtaatgaccacagatagacctgtcttctccgtgtgttcaggggtattggcggcttctttgttgttggtgttgtcgccgtccgcgtatgcggatgatatgggtggcttgtggccggtgaaggacagtgcggtcgtctcggcgcatgaggctggtctggatggttctggggtgaagatcggcatgctggactctcgtgttgtttcggattatccagggttgtcggatgcggacgcgaatgtcgaataccggttggggtcgtttgccaatgcgactaccgacgaaccagctaagtgtctgatagaaggtgtaccgcttcagaagacagtcacttccaaagaggggaatatctattcgtcgcatggcactttcatgctcacatggctggtgggcaatggcaagagttggggtgccagccaaggggtgacgggtttggtgccgaagtccgatgttctgtttctcacgctaggacaagatacttccagaatcaatatgctcactccttgtgatgattttgctatgccggatatcgacaaggacgttagtaccgcggtcgactggggcgcacgcatcatcaacatgtcaaatgaaggtggcataggagattatggtcttgatgggatgctcaaggcgctacgccatggcgtgatcattgtttcgtcccgttcgaatgacaaggagactgacgccattgtcaatggcagcagtacggatgtgatgatcggcgaccctagaatgtggaattcgttcccaggtgtgatccgcaacaatgaggtcggtcccgacgggcagatcgccggcatttcggatgtggctgatgcgaacgtgaacatcctttccccgggtgatcaggtgcttcatccgcaggttaattcgaaaatcatttcggtgggtacgggaggtacgtcgactggtgcggctgtgttgtctgggtatttggcgttgactgtgcagaagtggccggacgcgacgggtaatcagattctgcagtcgttggtgcgtaacacgaagggcaatgattcgggtgaggcgaagctggacccagagcataagaggggttatggccaggtcgatccgggcaggctcctgacggtggatccgacgcagtatccggatgtgaatccgattttggaggcgcaggtgaccactgcgtcgaagctgtcggatgatcgttcgaagtggtatacgcaggattgctccacgaaccccgacggcgtaggcagcctgctcgacgacgactcgtatcccgttttttgccaggccggtgagatcggcagggagtatgagcgtcagaaagccgcgtggaagaaggtggagcagtgcaggtcggatggcggttcggattgcatgaggtattccgccaccgcgaccgcggacgagactgaaggcaagtctgatggcaagtctgacggcaggaccgtgctgccggataccggtgacggtagggacggcgtgaagtcgtccggcgtgccggtgtgggtgtggctggccgccggtggcgtgggcgtcgccgttgtggctggcggcatcgtgttggcggtggtgttgtcgaagcgtggaaagcagggtcgtcgtccgttgccgggtgccgttgccgctggcccgtcgccgtatgcgggtccgcgacagcccgtgccaggtatggcgtatccgaaccgaccgtattcgccgcagtatggcggtcccgggtcccggcctgtgccgcagtatcaggctccgggcccggctcaggtgccatcgcagtaccggcggaatgtcggtccggtatctcctcggtatgctcagcctcagcagcaggcgaatccggttccgcagaatccggttcagccggcccaaccctatcctcagcctcccgccagtcaggttcccaatgtcgcaggcgtctatggtcaggaacagggttattccccacaacagtatccgccacaatccgatggtcggaataagcccggccagggccggcatgcacggtaaaccatagagagtattaggaagggaaaggagacatcgatgtccgacaaggataaagacaagaatgttgtcgagcaattgcttgattcagtgataacaagttctgattccaatataggtcccattgagcagcgtctcaatgagattgccaagagcccgaactgggagttacagggaaatattctgtctgttgataatgctgaacaagcagaacaagcagtgaaatatgtggttgaacgtgtatccgatactgatgttttctctggtcaaactgcgcttagtgcaaaacagcatggagaagatttgcttgccgtaaattatgcggatggcctatccagtcaaattgaagcgatgcagcgcatcattgatcacgccaatgatgctcttgagtatgtgaggaagcaaagggagtcattgccggggaaccagcttgatgctgtttcatctgctgcgatacgtatagcagatgtgggtgcgactgttctcttgccttttccgcttgctgctggtaaagcaactattcagattcttactggttggactgacccggtagggaaaatcaatgagcagttatgctcgaatagagagaataaggcgcaagaactacttcttgatttttataagatattgcgtaagctagatagtgtggatccggtagacccagtagtctccacaccagggaagcatcaggatattggctcgacggatgttgatatttgggatcagtctggtgttggtggtcgtgttcctggtcctggtacgtatttgggtgatggtgcgtatgatctcaatggtgatggtttgccggattattacgattacaacatggatggcgtgccggacgtgtgggtggattccgatggggacggcattccggatgtctatgatacgtatgatccgaatgacgtggcccagaaccggaagtatgccgaggctgttgaccagataggccggaaccgccggaccagtccgtacgacaatgatcggggtggcaatggctctggtggccaggacgtcgatgatcgtccggggtatgtggttcctgatgattctcgtcgtcccgcgcctccgagcccggacccgtacaatccgtatgatcccaacgacccttatgatcccaatggtccgtacgatcccaacgacccttatgatcccaatgatccgtacgatccgtcgattccgattccgtcgcgcaagcccaccgataacgacgtcgttgacgtcgattccgatttggatctgtcgccggttccggttgtgccgaggccgtcggtgtccgcttccggtttgggtggttcctccgcggggctgggtgctggtgcgtcccttggtggcgttggcggtgccggtctggctcttggcggtgccggcgtcggtatcggcgcgggtgtgtcgggtggctcgttcttcacgaacgcgccggtccatgcgcaggtggtgccgggtggcatctcgggcgccaccggcatggcggccggtctgaagtccgctggtgccgcttccggggcggcggcttccgctggccgtccgggcatgatgggtgctccgggtgccgccggttcgaaccagtcgaagaacaagcgtcagggtttggggtacatggctcccaagctcgaggatgatgacatcgcgatcaggtccgtgggtgccatggctggccatcgtgccaggccggccggcgactgacgcccggatcggctaggggaaaggagcgttcatgagtgatcagattcaggtgagcaaaagcgcgcttgccagtttggccaagggctacaatgacgcggcctcggggttcaccaaaatggggttcggcttgcaaagcagacaactggaccccagctttggtttggtgctgcagctggtgaaaggcgattacgacagtgccaaggagaacacgctggattatctgtccagtctgggttcgctgatgagcaccatgtcccaggacatcaccgatgccattgccgcctataccgagggcgaccagaagaactccgattccattcaggacctgctcaacaagatcgagaaccttgaacagcagaacaggcagttgagcgacaaggtcggtgaactggaggagaaggtcggtgaactggagcagggccagacatccggcggcaccggtggctattcgggcggtggcggtggaggctattccggtggcggttccggcggtggctccggatattcggccggtggctccggtggtgcggcgagcgctccctcgatgccggactatcagatgccgagtcggccggcctatcagcaggatgcttctgggaattatcggaatgatgctcccgttgatgtggattccgatatggcgggtggcattggcggcagtctcgacccggatacgaatgccaccgatattccggatattcccactccgcccagccatgacggcaccacgattcccaagccggaacgggtggacaccacggaaagcgtggatatcgatatggatggcgatggcgtggtcgattattcggtgaacgccgacctggattccaccggtgtgcgtttcaacgatgacggaaccgtgacgctgagcaagaacggtggttcgttcggtgctgattccgcgcagaccagtggcatctccttcgacaccgacgacgatggcgccgatgatgttcatctggagctcaaggacggtcaggatgccagcgtgcgtgtcgttcccggcgccgagggcagcggcacgcgatacgttcaggtggatacggatggcgacggtgtctatgagagtagctatgccgtgcgcgacggtgccgcagcatcgggtgatgcgggctcgggggtatcggacggtgcttccgccgcgactgggacgacggccgaggacagttaccggaccgaggtgagcaagggcgaggaacaggcttggcggacactggccgagaccgacccgttgcaccgatccgttgacgagctcaaggaactgttcaacagacgcgaagagatcgagctgccggaaacgaattcgctttcggatggcgtctggggcggtgccccggcaaatggctcgatcacgattacgtttggtggtaacaagggggtgacggcatgaacgaatggctgaggcatgcttcggctcgtgtggtgttcattgtcgcggcggcgaatggtggcggcgatgtcgagcacggtaacctgtacgagaaccaggattacaatccggacgtcatcgatattggagacaatgacaacactggtaccggcatacaggccaacgagggggacttaatatcttctggatacaaattggctgaggccggtgagaagttccagtccggcaatattgccgatattcgtgacggggttagcgatcttctgggggccacaaatattcagagtatgaatagctctcttgatcgatggtgggacaacagcacatctcccctgagtatcgcggctggtagaacgcaggatcttcgagatggcatgagccatggtttggtgagtgctagaaatgtcactcgatatttttctagtggtttgtcttgggctcgtatgggtattggtgtgatcgacacggtgtgcaatgtcttgcatatcacgaaccccgtcgatgagattctgcgcaagccgttcggtggcgattgggatgaattgtcccagtccgctcaggattggcgtggcatcgccaccaatctggagacgatgcatacgggattgcagcaggcccagcggcagatccggacatcgtggaagggcgaggcattcgaccggtattcgttgtgcaacgaccagatcggtcagatgttcgagggcggtcccgatatctgccgtgagatcgcggatggtcttgatgcgttggtggatgtggccaagaagtgcttcgactatgcgctggatgtcattgaggagctcatcgacctgtgcatggacattgttgaatgggcgtggaccggtgtcggtctagccgtcgtggcggccaagcatgcaggacctgtcatttccctcattcagaatggttacgatattgttcagggcttgtatgatgccgcgcagtcgttcaaggcggttacggcggcggcttccccattggcccagcaggcgaaatcatttgctaccagtcttgaacgcacctgagccacggagcagaggaggatatacacatggcttcacaaggatttgaacaattcatggcgcaggtccggcagctgagcacgttggtggataccaagcagaaggagctggatgagctgcgcaagaagaatgccgaggaacgtgaggagcgtcggaagcagtacgccgaggaccgccgtgcgggcaagcagggccgtgcttggcaggtgctgcagcagcgcatcgatatggggcagacctgcgagcgcgacatcatcatgggcttggatacttctgccgaggcacgtgaggtgcgtgcccaggcggccaaggcattggatgccatgcgcaccgcggtcagcgagcttccggaggacgattccacggcgcagcagctccggcagcttcgcgagcgtcagcaatcacgctgattccattgtcgtcgataaaggtgatggtatggatgttgttgaggtttgggatcggtccatgcgggcttgtgggtgggtgccgattccgtcttggccgtggacgttcgataaggtcctgttgcatgatgccatcggcatgcgtgcgcc

SEQ ID NO: 392 - DNA, 16480 bp, Unknown
  R42_10m  MAG No. k141_52683
acggtcgcagcagcggtggccttccagttcgcgcgacgcgagtgcgtgttggcgcgcgaggtcttgtacttaggcagtgccatttgagtatcctctatttcgttcgaacaattgagcttaagcgtccgttatcttaacgcatagctcgtacaaactccgttcaggcgcgcgtcactcggcctgctcgccgttctgctcggcctcgagctgggctttgagccccgccaatccggcaaaacggatatccgtcacatcgtgatgatggtcgggatcctcgttcagatcggcaccgcactgcgagcacaggcccttgcaatccggtcggcacagtggctgcaacggcagcgattcgaccagcgtgtcgcggatcatcgcctcgatgtccgcgaatgcgccgttctcccgcagcggatacgtgtcttccgactcgtcctcgccggcgatgatgtcgatctcgtcgtccttcttgttcttgccgcccttgccgttggccttgtcctgacccgactcatacgggaagaacaccgtcacatcaaccggccagtcctcgtcaatcggcttcaggcagcgcgtgcactcgctgacgaatggcgcgaccaggcggccggtgaagatcaggccgtccacaatcgaatcgaactgcccgctcacatgtacgggctcaccatccttgatgccgacgatgctgtcgccaatgccggaaggggccgggaaatcggcgtcaatcggcttggattgaccggcgcgcgaagcaatctgcgctaccggaatggcccacggggaatcttcaactcgtgccatggtatgttcttggtgcctttcgtatgttggctggagttattcgttactggcgttattcgcgttactgatgttgctggtgctgctggcgttactgggcttcgggatagtcgttcagcgtcaggtgcggcatctgttcgccggccgcacgctggcgctcttccagcacgttaagaccggcctgcacatcccgactgagtttgccgagctgctgggacagccctttcatcaccgtagtgcagtactggtccgcgccttgggtcagatggtcggctctggtctgtgcctggtcaagaatcgcgcgcgctttctgccgtgcaagctcggtgacgttctcttggccggccaggaactgtgcctgttcgttggcgtccttgatcatgtcggctgcgcggctttgtgcggaggcgacgatggcgttggactgggtctgtgccgattccagacggcgctcggcctcgcgcatgagggcggaggcgcgctccaactgcaccggcagcattttcttcaactcggaaagctggtcggtgaattcgtcgcggtcaaccttcaccatgccgggggcgaatatgctggacttcgcttcgcccagtgccgcctcgagctggtcgatgatgtcatacaccgtggtgaattcctcgcggctcttgaccgtggccgggtcgtcgtccgtggtttctcgcaggtcgggcatttcgttcatgaacgaggggcgagtgccggcggcctgagcggtctgagcttgtgcccgggtctgctgagctgcttgggcctgcgctttggcctgcatctgtgccggagtaggggtaggcgcggcgggcggcgatccggcgagaacatcggcctcttcggtgggtgccggcgcggcttgcgtagacgcggtcggttccggggcggacggctccggagtggacgatgcggcgtccgcattcggtttggtcagatcgacgtatccagtggggtggtcatcgctcatagtcattagtgcatcagtccttccgctgacgttcctcggccagggcatcggccagcatcggcacgacacaatcgggcaccatgccggtcacgtcgcctccatggcgggccacgtccttgacgatggaactggagatgtgttcaagaatcggatcggccggcaaaaacagggtttcgatgccggcgagcttgcgattgaccagcgccatgccgagctcggcttcatagtcgccgttctggcgcagacccttgacgataacggtggcgccgaccttcttgcagtagtcggtgatcaggccgtcggtggaagaaacagtgacgttcttgcaaccggctttgtcaagggcacggcggatcacgtcgactctggtggcttcggaaaacatcggtgttttcgcggcgttgacggccaccaccacatgcacctcgtcgaaaaaccgcgccgagcgctcgattacatccaagtgtccggcggtaacggggtcatacgagccggggcatactgcgatagtcatgccttatagcctaccgcgaatggtgtgcttcgtgctgccgagcgtgcattgttgtcgcgtcggcgtatgaggcagtgtgtgcggtgccgtatgtggcgtcggtgcggcgttgtgtgcggcattgttatgtggcattgtatgtggcggggtggcgtgatgcgcgacatgggtgtgtggaggtgtgcggattacgcgccaatgggtttcgcgggtaacgacgggaatctatgatggagtgcagtcgaatcgttgaatacgaggaaagaagtgcaccatgacttttgccgagatgttcgttgatgatgccgaaccgctgcgcaacccggaccaaggtgccggcacgtcggtgctggaacgcccggaaaccaaggagtctccggttcgtgacgatggcggcgacgcggatcgattcgcacattatgtttctaaggaccgtatcgccgaatcacgcgcgaccggtcgcccggtggtcgccctgtgcggcaaggtctgggtgcccaagcacgatccgtccaagtacccggtttgccccgattgcaagcgcatctacgaagaaatgacgcgctaaaggtggtacttggctcccctcagcgagggaagccaaaatggtcaccgagccgaaatctcgtcgatcagcttgagctcctcgtcgctgaagtgggtgttcttcagcgcgccgatgttgtcgagaatctgctgaggcttggaggctccggtcagcacggaggtcaccttaccatcgtgcagcagccatgccaggctcatctcggccagcgtctggccgcgttcggcggccagattgttcaggtccacgacctgcttgtgcagtttctcggtcagggcggaatcgttgaggaatcgcggatcgtgagccatgcggctgtcggccggaatgccgttgagatagcggttggtcagcaggccctgtgccagcgggcagaaggtgatgaggcccttgcccagcttgaaggcggtctccttcagaccgttctcctcgacggtgcggtcgaggatgttgtatttgttctggttgatgatgaacggcacgtgcaggtcggcgagaatcgcggcggccttctccatcgtcggaccatcgtagttggacagacccacgtacagggccttgccggagttcacggcctgagccagcgcgcccatcgtctcctcaagcggggtttccgggtccgggtggtgatggtagaagatgtccacataatccaggcccaggcgttcgagcgactggtcgaggctggcgagcaggtacttgcggctgccgaggtcgccatacgggcctgcccacatttcatagccggccttggtggagatgacgagttcgtcgcggtggtgcctgaagtacttggcgagcagcaggccgcagttcttctcggcctggccgggttcggggccatagttgttggccagatcgaagtgggtgatgccgttgtcgaaggcggtgaagaccagggacttcatctggtcgaatggcgtgatgtcgccgaagttgtgccagaagccgagtgagacggccggcagcttgaggccggaggtgccggcgtggttgtaagtcatcgtgtcgtaacggtgcgggttgggggcatagatggcggttggctcgaacattaaatctccttacaatgtcatttttgttcttacgaatgcttacctgcgatgggcaaaccgacgccgattgagtggcattcgtaagtgttcttggatactatggttccagttcaagtgaacttgaatgcaaacggctgcgacgcttcggcgtgtcgccgcagtaaggagtcatggtgtcctacaccattcgtcaggtggccacgcagttccatatgcagccctctacgccggtgaagactggccggattggcgcgagtacaaaaaccgcgcctattccattgaatgctgaggccatcgagtgctgagctggatgccggctgggcactaagaccgatgtgcgtcgatcgtgggcgcgtctatccgagtaaggccttgctcggcagtgcgcggtcgagcagccagacaacgagcgatatcacgaagaacgctatggccagcttgccgcagctaatgccgaacccttgccagccgagtgcgtcgaggttgatgaagtcgtacggatacggactgccgccggccgccggtccggaccccggccaaatcgtcgcacgggccagcacgaagaccaagtatgcagggaagtacgccagccacgagaacatgtaatgccagcggaaacgccggtgcgggtcgaatagcacgaaatcgataaccgccataatcggggcgattttgtgcagcatcgtattggtcatgatgccaataacctgtggcacgtatgccgggtcgtccggaggcatcaggaagaacgccaccagtgcggtgactatggcgtacacagtcaggcatcccttaggccatgcaggcggctgaatgcctttgagcagtgtggccgcgccggcccacagcatcacgatgcccagcacgaaaccggtctggaacgtgaaatacacccagaactgcggtttggaccatgcctcatatgtgcccacgaagcagaaaccggcgatcgcaaagcgccacaacgccacgatgaatctcatgcatcgagtctaccgcttcgccagtgggctgtatggctttgcccggactacacttaggtgcaacttcaccacttatgtaggaaaggccttgcaatggtcgattattcgccggctctgatgactgacatgtatgaatacacgatgctcgacgccgctctgaaagacggtaccgccgaccgcaaatgcgtgttcgaggtgttcacgcgtcgcctgcccgaaggccgtcgctatggcgtggtggccggcaccggccgcattctggatgcgctggaacatttccacttggacgaagcggacctgaagttcctggccgaccgtcacgtggtaagccccgagaccatcaagtggctggagaacttccacttctccggtacgattcgcggttaccgcgaaggtgagatgttcttcccgaactccccgattttgcaggtcgaaggcacgttcggcgaatgcacgctactggagacgttgattctatccgtgctgaactacgattccgcagtggcctccgccgcctcacgtatggcgtcggcagccaaggatcgtccttgcatggatatgggcggacgccgcactaacgagtgggccgccgtggccgccgctcgagccgccgtagtgggcggattcaagggtaccgccaatctgctggccgcccagctgtatggtctgaaggccattggcaccgccgcgcattgcttcacgttggtgcatgattccgagcgtgacgccttcgaatcgcagatcgaggcattgggcaagaacaccacgctgctggtggacacctacaacatcgaggaagccgtgaaaaccgccgtcgaggtggccggtcccgaactgggtggcgtgcgcatcgactccggcgacctagccgccatggcccagcgtgtgcgcaaccagctggacgccctgggcgccacgaacaccaccattaccgtgaccaacgatttggatgagtacgcgctcgccgcattgcagaccgcgccggtcgactcctatggtgtgggcaccatgctggtcaccggctccggcgctcccacttgtgcgatggtgtacaagctcaccgaacgtgaaggcgatgacggcacgatggttccggtcatgaagaaatccaaggacaaggccacagtgcccggtcgcaaactggcattccgctcctacgaatacgcgttagccgaagtcgaacacgtgatttccggctcggaggagaagctggccggtttcacgcctgaaccgacgtggaagaacctgctggtcgactttgtggatcatgggcagatcgacgctcagtggcagggccatgacgccatcatggccgcccacgactaccacgccaaggcgttgtccgaactgcccatcaccgcgcagagcctcatgaagggcgagccagtgattcctacggagactcaggttctctgaccgtatctcactggccgcatccctttggttacattggctactcttccctctgtctgtgcccctctgtctgtgttggccgcactcctgtgatcgccgccgaggcggggagatccaaccccggtcgcacccccgtgtttgcacctcctgtggctgtgtcccggggctgtattggccgcgtcccctcgggctgaactgcgtcccggttcgccggacgtggttccagctgagggtggcccccctgtttttttttgggggggggtactgttcactggggaaatatgtatatgtgcatgctgttgcaatgtacattttgttgtcagttgacaacgtcttgattcagatgaattggcgggaaatggccatttgtcttatccaattgatttgaagaacgttgtcagttgacaacgttttgtacatggtgcggaacgacacatattcctatcctggtcaggatgccgacgaggtggagtgaaaaaccaaaccatttcagaggatattgcaccgagacgttgtgggattgccgtgttgtcggtgatgttacagagatggcgcagtgttgcgtgaggggtgttgcgtgaggggtgttgcgtgtgatgttgcgttgggctgattgggaggaatagtgtgccgatagaatgccgcgatgcgtgcagagcaatcgtttgcggagcaatcgttgaagaatcgtgtgaactgatgcgatacgaatcataccgtctctgaattgtgggatatgacgaatcgtatcgtcatgggattgtgggatatgatgattgcggtttgatgaaatgaccgggaaatcggccgaggcaaggtgacttcgatgagtgaaactctcaatgatgagaacgcggcgggcaacgatgacgtatcagagcggcgcgctgtagagcatcgagcgttagaacagtgcgatgtcgtgcatcacggtgtggtatctggttgccctgttaattcgtgtgcggctgtgctgaatgaagtgatgtcgcagactggttggaatgcctatgagcttgcacagcgtactggtttggatcggtctgcaattggtcgcgtattgcgtgggcaaagaggtatgttgtttgatgttttggccgaggggcttgagcgggctggttttggtcttcacctagaagccgtggccccctcgcaaacgattccggaagacgaattgcacatgttgttggcgcaactgcgtaggcctcctgatttcgatgcaatagaaagcggagcgacctggtctacgttgaagatgctctgcgtcaatctgattcatgctcggaatgtccaacatcaacgtatatcgttcgtccgagcggttgcacgggtgaacgatgcgtgctggattgcgtttctcgctggtttataccgttttctgcgttgggatatcaacccaaggaacagacgcttgacattggttcctccgtaccggtatggcttggatggatggtggtccccactgccgagcgcggcaattatgcacgtgcttcatcgatatgaagagccgttgcatgacatggactatacatatttgccgttaatcgattacgaactcaacgctatgcagcgcaagcaattcaaccaagatttcatggaatatggcattcttattccagcggacgatctttcccaatcctcatcaggtacgcaggcattgactctgtaagcgagtggtgcataagaaaatagtggcgtgcagccaagtgtcatggaatggatatgtaagcagggaatgacattgcgctggggtttgatgatggttgacgagttgctatccaggcatagagcggatggcgtatgctggggcgcatggttgaaatcaaagacatgcttggcaatcaccaaataattcgtgccgacggccgcaaggtcgacgagctgcgccccgtgcgcatcacccgccacttcaccgacgcccccgaaggctccgtgctcatcgaatgcggtaacacgcgcgtgatgtgcaccgccacttttacccccggtgtgccgcgttggcgcaaggactccggcctcggctgggtcaccgccgaatactcgatgctgccgcgtgccaccgccgaacgcaccgaccgtgaatccgtacgtggcaaaatcggtggccgtacccacgaaatcagccgactgattggccgctgcctgcgtggcgtcatcgatatgaaggcgctcggcgaaaatcagattcagcttgactgcgatgtgcttcaggccgatggcggcactcgcacggcttccgtaaccggtgcgtacgtggctttggtcgacgcagtcaattgggcggagaagcaccgccatatcaagtccgccagccgcgtgcttaaggactatgtgtccgccgtatcggtgggcgtgatcaacggcaccccgatgcttgacctgccatacattgaagacagtcaggccatgaccgacatgaacgtggccatgaccggttccggcaccttcatcgagattcagggcaccgcagaacaccgtccgttcaaccgtgccgaactcggcaccctgcttgacttggccgaaaagggcaacaaggaactgcaagccgcccagcgtgccgctttgtccctagactaagccagctccccttcctttaggggaggttgtcggctggaagccgtacggtctgcaatgtccagctcccctgacaaggggagccttcttaaaggagaacccatgcaaatcgtcgtcgcaacccataacgaaggcaagcttgtggaaatccgccgcattctcgaagaggatcttggcgcggatgccgaaaacatcgaactggtgtccgctggcagccttcacctgccggacccggtggaaaccggcgtcaccttccaggagaacgcgctgctcaaggcccgcgccgtggccatccgtaccggtctgcccgctgtagcggatgattcaggtctcatcgtcgatgtgatgggtaacgctccgggcattctgtctgctcgctgggcgggtgctcacggccacgacaaggccaataatgcgctgctgctcgcccaaatcgaagatattccggatgacaagcgtaccgcgcgcttccgctgcgccgccgcgctggtggtcccggacaccgaggccagtgccgacgtgaccggtggagtggctgccgacggcatcaccgtttacaccacggctgcagatgggagccctgccccggtgcatgcccggtacgccatcaagtcggagacagtggaactcggcgacatgccaggtcgtatcatccgcgaggctcgtggcgaacacggtttcggttacgatccgctgttcgtcccggacgaccagcctgccggtcgcgtcagcactgagcctgaccatgaaggcgagccgctgaccagcgccgaaatgactccggccgagaagaatgcgatttcccaccgaggcaaggcgctgaaagccttggtccccgctatcgaggcgctgctgcactaagtcgtctaggctgtctaactgcactgagccgcgactaagccacagttgagtcgcggctcagcaactcagcccctcccgaatcgggcaagtgtctagcaagcgcctatgacctagcaagggcgatacgaaagaaggccggcgcttagtgcgtcggccttcttgatgaacaagagccacccgatagaatcgaactaccgaccttcccacgaacgagggggatgctctaccactgagctaaggtggcgtggctccaagagccaagtagagaatatagcactgcgtttgattcaacgcaagccggacgttcagcatcttcgggccattgttctttgagccattgtggaggcaatagtgcgaacgatgtgcacacctcatctgctcggaccccattcgtcgtgtgcgcgttatgctagcatggtgagcctgattgactcggaggcagagggaagcatgcgtgattttgtgctggtgaagttgacagacgaagagttcgatgatttctccgccaggcatccacaaggcaatttccaacagacctcggcgatgggacgccttcgcgccgcgcaggggatcgacgtcgaatatctggccctcaaggagggcgagaagatcgtcgcggcggcgctgttcgaaactcaccgctctcgattctctacatttgcggccatccatgatggcccgatgtgcgactatcacgacaccgaagcattgaccttcttcatggatgcgctgaaacgccatgccaaggcaaagggtgcttcacagctggaaatcacccctgaatccccgtatcggtttcgcgacaccaatggagcttctttgccggatgaccagaacggcgctcccgacaataagctgatagaacggctcgaggcgatcggcttcactcatggcggtttcaccgtgggctacacggcggttccacgttggcgctacctcaaggatctgaccggcattaccgatgagaaaagtctgctgaagtcctatgacaagcgcacccagtggagcgtgaagcgtgcccaatcgatgggtgtgcatgtgcgtgagctgtcggacgacgagttgggggtattcgcacgaatcgagcagcaaaccgccgaacgtcgtagcttcgaataccgtggcgaagcatatttccaccgtttcaaggaagcgtttggcaacaaggcgcattttatggttgccgagatccacatcgacgaatatgtagcggacatgacggccaagcgtgaagcactttcggccaaggtggcggcattgaccgccaaaaacgccgaacaccccaccaccaaaaccgaacgtcagctgggggaggagacccgcaatctggcggcagccgaaaagcgcctgaacgaggcggccgagttcgccaaagacggggatgtgctgccggctgcggcatcactattcgtggagcatccgcgcgaggtcatctacctgttctccggtagcgtcgagcagtacaagcccttctacgcctccgcgctgattcagcatgaagcgatgctgcatttctgcgtggaacacgggctgtctcgctacaacttctacggcatcgacggcgtctttgatgatcccgatgacgagggtcgtggtgtactggagttcaagcagggcttcaacggatatgtcgaggaacttccgggcgagttcgtgctgccggtcaaaccggttgcctatgccatgaagcaatttgcgcacaagctgctgtcgcggtaaacggacgcagcacacaggccattccagagcccagagtaacgatcagagtaacgacaagtaagaaggttcgattatgacgcaatccgatgcaggcgtcgcctcgctcacccctaccaagatcactcctgccgagctggatgcgttctccgcagctcaagtgcaaggtagtttccagcagacctcgcagatggccgccatgggtgcgttcaacggtccggtggactatgtgggtgtcaagcgcggtgacaagctgattgccgcctgctacgtggtgtacacgcggtcccgtttcggtttggaaggctcagtctggtgcggaccgctgtgcgattatgacaatccacaggtggttgaggcgatgaccgaagccttgcgtcgttcggccaaggcccatcacgccatcagcgtatcctgctggccggccgcagtctaccgtctgcatgatctggacggcaagccgaccagcgacccggacaccacgatgatggacaacatggcccgcttcggttggaaacatggcggcttcaccgtgggctacgaatccgtggtgaaccgctggaacttcgtcaaggggcttgacggcattcataatgagaaggaactgctggcctcgttctccaagtaccgccgtaagaacatccgcatcgcccaggattccggtctgcgcgtgcgccggctggaacgcggcgaactgagcactttcgtcaagctgtgcgatatgagcgccgcacgtcaaggcttcaagagccgcgatctggcctactatgagcgtctgttcgataccttcggcgacctgatcgagttcaaggtggtcgaaacccatttcgacgaatatctggacaccctgcaatccaagctgaatgcggcctccaaagacaagcgcaacctcgaacgcctgctccagcgcgcgcaacagcagccggaaggcacggccaagaagggtgcttccgacccggcaacgctggaaaagcgcatcgccaccgcagacaagaagattgcggcgctggaaaagaccatcggcgaagtcaatggcatcatcgcctcggacggtccggtcattccggtggaagccggtgtctacttctggcatccgaacgaggtcgtctgcctgtccagcggcgaggacgatcgtttcatggattactacccgtcttccctaatccacttcgaggcgatgcttgactgcatcgcccgtggcgtggagcgcttcaacttctatggcatttccggcattttcgacgccaacgatccttcctacggcgtctggcagttcaagactcgcttcggcggattcgtggaagagcttccgggcaagttcacgctgccggtggacggactgcgcttcggtgtatccgaagccgcacacaagctgctgcatcgctgacaaacagtggcgagcacggacacagaaataaggcacaggtgacgacgagatgagcgcgactgtgaatcgaacagatacgacgtatacgtttggcgtgattacgcccgaagagctcgaccggctttccgaagccacaagccagggcagcttccagcaatggtccgggcaggtccgtcttgccaagattcgtgggcatgaagccgaatgcgttggcgtgtgcgacgcatccggcaatctggtaaccggctgcgtgattctgtacctcaatggtcgtttcggtgcagatggctccgtatatttcggccccatcggcattagcgatgatccggctctgctatggaccatgaccgaggcgattcgtgaatcggcccgtcgccaccatgctgtttccgtggcatgctggcctaacgtcgcctaccgtctgtattcctcggacggacagcccgacggcgagccgaacgatgcactgctgaccggattcgccgatgcaggctgggcgcatggcggattccataccggttatgacgtggtctgccagtggatgtacgtcaaggatctcaccggcatcaccaacggcaaggaactgctggcatcattcggcaaacgcgctcaatggagcgtcaagcgggcgcagtcgatgggtgtgcacgttcgcgaaatcggccccgacgagttcgacgtgttcgccgatatcgaacggcggaccggtgaacgccgcgggttcgcgacgcgcggcgcggactatttccgccagttcaagcaggcgtatggcgcggatgcgcatttcatgctcgcggaaatccacatcgccgaatatgtggcggatatgaccgccaagcgcgaggcattgcagactaaggtcgcacagctgcaggcgaaatacgatgaacgtccgaccacgcgcatcgaacgtcagctgggggaggaatcgcgcaatctcgcggccgccgacaagcgtctggctgaggtggagggatatgccaagaagggcgatgtgctgccggcagcggcttcaatgttcgtcagtcaccccaatgaggtggtctatcagtattccggttcgttggaggagtacaagccgttctacgcctcggcgctgattcagtacgaagcgatgctgcacctgtgtgtggaacagggtgtgagccgctacaacttctacggcatttccggcgtgttcgacgatccgaacgacgagggccgcggcgtgctggaattcaagcagggcttcaacggctacgtcgagcagatggtaggcaaattcacgttgccggtggacaagttccgcttcggcgtgagcaatctggcgcacaagctgctgcaccggtagcagctggcggccgggggacgaacctatgtgggctgcgtctcgcctgaccgtgtgcccgccgtgcgcccgtcgtgtgcctactcgcgcatttgctcacacgcccatcagcacgtgagcaaatgccatcatcaccagtgaaatcatcgcggtgattgccagcgagaagccggccagtttggcgttgccgagtactttgtcggtgaacagcgtggagaaaatggcgattggagccaacgcgcagatcaccatcacggcgcgaatcgaagccgagaacggcagcaggaaccacgagatcaacgcgaaggcgacactgaacggtatacgccaagcgatgacggccatgacttccttcacatcatgcttggactggggcaaatccatgagcatgcccaccatcagcatcgacaccagcgcgttggcaccgctcaacggctgggttatagaggcgatccaatcgggaatcttcacgttggcgacggtcaacgcgatcatgagcagatacgtgtcgaacggcaccgagccgaagaagctcttgccgatggtgcgcagcaatgcgcggcgggcaagccgtttggcgtcgcgatccttgggcttttcgtacggcaaggtgggaaccgaaccggcgtgttgttcggcaagtgttttgccgggctgaatatgcagcagttgctgggtgagcacattggtgccggcggccaccatcacgcagttgccgatatcgaacatcgcagccggcaccaccgcgcccgcaccccagaatgactggacgaccgggaaagagaaacaaccgagattgaagccggcgccattgagcatcaggaaggcgcggtcggtcacattgcgcttgcgggtggccagaaagatgaacacgatcgggataaaagcaaacaggaatgcgaataccgaaataagcagcagcgagatgtcatgcggattggtggcgaacgagtatacgatggcaccgggtagcacgatgttgaattccgcggtttgcaacacgcgataatccttctgcccgaacaggccgaaccgcttgaacagatagccggcgagaatgatcagcaataggccaaccggcgtaagaatggcggacatacacttctctccttggctcacacaggctcacggcgcacaggctcagacccacaatgctgtgaccattatatttgccgccttggcattgccatatgtagaggcgtccgcaagggcttgcaattgcctcacgcatatacgaagagcctcccggaatcgttggcgatccaatgtttccaggaggctcaagccggtgcgcgagatgggacttgaacccacacgtcaaagacacaggaacctaaatcctgcgcgtctaccaattccgccactcgcgcatgcatatccgcgtttccacaggtgtggaagatatacaaaaccctaggccggacagccattacagaccagccagcctagggcatccgagccacttgtcagaatcgaactgacgacctgctcattacgagtgagccgctctaccgactgagctaaagtggcttggttcgcggaaggcatttcgccagccgcgcacaagaaattaagtataagacatctccgcgaaaagtccaatcggcggcttggcagttgtgtcgtgaccgctcggttgaagatgacggttgtgccgcgccacgaactgttcgataatgcaaacgatggcaatccgacatcgctgactgatttttgttctgttcatgtccgaatttgtgagtattctgtttggtgatacggagcgcatccgagccgtgagcgaaggcgctccagtcactgatgaaaggaatggaatcctatggccatcaatccgcccgttgacgccacccagacccctgagtgggctgccctgcagaagcactatgacgagcttcaggccgaaggcgtgagcctcaagaagtggttcgccgaagacgccgagcgtgtcgacaagctgtccttcgacgccggcgacctgcacttcgatctgtccaagaacctgatcaagccggaaaccctccagctgttcgccaaccttgccaaggccgtcaagctcgatgagcgcaccaaggctatgtacaccggcgtgcacatcaacaacaccgaagaccgcgccgtgctgcacaccgcgctgcgccgcccggtcgaggatgaaggcaagtacatcgtcgacggccaggacaccgtcaaggacgtgcgcgaggtgctcgaccgcatctacgccttcgccgacaaggtccgttccggcgagtggaccggtgtgaccggcaagaagatcgaaaccgtggtcaacatcggcatcggcggctcc

SEQ ID NO: 393 - DNA, 45543 bp, Unknown
  R42_10m  MAG No. k141_52928
aaaaaactcccgacatgcatcgggagtttggtggcgaccccggccggacttgaaccggtgacctccgccgtgacagggcggcgctctaaccaactgagctacggggccgtgcgtgcctcgctgaggcacaagaggatatgttacagcatcatcggattacgacacgccgtctgatacatcgttccttccaccggcgaaccgaccgcaggtgtggtggacggtatgcggaccatatcgttcgaccgcgcacggccgcactccccataagacagtagccgtcatgcgtcaacgcacgttgtgcgacgacgcggcacgacgcacggccaccgaggccagcaaaccgatgaacagcatgatgccggcgaccagaagcgtccactggccgccttcgacgaaccctgaagtcatcgcatcggcaatcttcggcgcctcgtcgccgaattgggccgccggtccatcaccgctgcggaacacgccgatcactccacccgccgaaccactgaccgcttgggccagaccgtcgccgaccttggcgggcagcccgagggattcgagccgcgccggcaatgttccgttgacggccatggccagcgacgctccggagatggccgaaccgacggcggtgccgagctgtcgaaccgtggactgggtggccgacccttcgccggactgcatgatcggcacttcggagagcaccacgctggtcagctgcgcggaggcgaagcccagacccagaccgtatgcggccatgggaacaagctgccaccacaccgacaatcccacaggcataaggaccgcgaccaaggcgacggcgatgatctcgatcacaagaccgagttgaatcacgccggccggggtgagcttggcggccatgacatgggcctgcgcacctgcgacgatggaccccagacccatcacggccagcatcgcaccggcctgcagcgtgttgagcccgcgggcgttgatgaggtacagcggcagcatgaacaccagcgcgaattcgccggcggcgatggccgcagccgccagattaccccacgagaacgtcctgatgcggaacagggtcatgtccagcatgaccggccaaccggctttgccccgcgcggattcgaagacgatgaagacggccatcagaagcgcgccggcgatcaggcagatcggcaccggcgacaaccagtcacgattccagctcaacccgcccagcttcaactgcgttgaggtctgcttccaccagccgtaggtctcgccttcaataagaccgaacaccagcagggccgaggtcagggcagacagcaccacgcccggaatatccacaccgacacgatgggatcgggcatcccgtgcggcatccgcggcgccggcgaccgaggcgttcccaccggtttgcggcaccaggaagatggccgacacaaagaccgcgatgcccagcggcaggttcaccaggaagatccaacgccatcccaaggtctcggtgaacacgccaccgagcagcggaccaagcgcggcggccgaactcatcaccgcgccccagacaccgaacgccgcggcgcggtacttgccacggaacagggcggacaccgtggacagggtgttcggcatgatcatcgcgcctccgatgccctgcagcacacgggcggcaagcagcatccccgcaccctgcgaggcggcggcgagcgccgaactcgccacgaagatcacggtaccggcttgaaacaccagtttgcgccccctggcatcgcccaacttgccgaaaggcagcaacaacgcggcaagcacgatgttgtagagcgaggtgacccactgggcgtcggtcagggtaatgccgatgtcgtcgatgatggtggggatggagacgttgacgatcgagctgtcgagcacgatcatggccaatcccagggccatcacccacagcgcgccccacggcggcgcctgggtgggcagcggcgacgaggccgtcggattcgttgaagagatcgaagacgcatcggcctgagtctgatgctgagatcgggatgcatgatccataacggggtttcctctcattgccatgattgcggcgaccgacacgcctatgcgccattcacggtacatccgcggcctagaccgtctcgccggatttcgcgggacattccgggcgttcagccatgggcgtaacctcggcggatcactgaagagaggagcaccaaagacggccgcgctattccagatgcgtcatttcgaaatgaaagcccggcagaacgccggaatcgcaacgatcgacaaatcgccagacgatacagggccgggctctcgctcaggaaacagggcatgcccagcgcccatttaccggcgtcggcattgacggcatcgccgccgccttccacgtctcctcccgatgaccgaatcgctaattcccgcccgccagaaccccattgcatcgtgtagacgggatatggaataatccacaaggtgcttttgcgtaggaccaaggcgccgcgatgacacggaaaatccagggacgggcggcatcaaacgggtcgttcggaacccccgaaaccggacgcatcgttccacagtgtgtcatcacggaatccaagcccggcaaaacgttgaaattgcaacgataagacaggataagacacttatatggcagaatttgtgtttcagatgatcaaggcccgcaagtcttacggcgaccgcgtgattctcgatgacgtgaccctgagcttcctgcccggcgcgaagatcggcgtcgtgggcccgaacggcatgggtaagtccaccctgctgaagattatggccggcctggagaccgtgagcaacggcgaggccacgctgaccccgggcttcacggtcggcatcctgcagcaggagccgccgctggatgacaccaagaccgtgggcgagaacatcaagatggcgttcggcccgattgccgagaaggtcgcccgattcaacgagatcggtgaagaaatggccaacccggacgccgacttcgacgcgctgatggaagaaatgggcaagctgcagaccgagatcgacgccgccgacggctgggacctcgactcccagcttgagcaggcgatggacgccctgcagtgccccgatccggacaccccggtcaacgtgtgctccggtggcgagcgccgccgtgtggccctgtgcaagctgctgcttgaggcccctgatctgctgctgctcgacgagcccaccaaccacctggacgccgagtccatcctgtggctggaacagttcctgcaccagtacaagggcgccgtcatcgccgtcacccacgatcgttacttcatggacaatgtggccgaatggatctgcgaggtcgaccgcggccacctgtacccgtacaagggcaactactccacctacttggagaccaaggccaagcgtctggagatccagggcgccaaggacgccaagctcgccaagcgactgaagaacgagctcgactgggtgcgctcctcccccaaggcccgtcaggccaagaacaaggcccgtctggaacgttacgaccagatggagaacgaggcacgcaacaacaagaagctcgacttctccgagattcagattccggccggcccgcgcctgggctccaccgtgctggaagccaaccacatccacaaggctttcggcgatcgcgtactcatcgacgacctgtccttcacgctgccgcgcaacggcatcgtcggcgtgatcggcccgaacggcgtgggtaagtccacactgttcaagaccatcgtgggcctggaaccgctgaccagcggcgagctgaagatcggcgacaccgtcaaaatcagctacgtggaccagaaccgtgaaggcctggacccgaacaagaacctgtgggaagccgtgtccggcggcctcgacttcatcgaggtggccggcatggaagtgccgacccgcgcctacgtggccagcttcggcttcaagggcgccgaccagcagaagctgaccggcgtgctgtccggtggtgagcgcaaccgtctgaacctggccctgaccctgaagcagggcggcaacctgctgctgctcgacgagcccaccaacgatctggacgtcgagaccctggaatccctcgaaaacgcgctgctcgagttcccgggctgcgctgtggtgatctcccacgaccgttggttcctcgaccgcgtcgccacgcatatcctcgcatgggaaggcgacgacgacaatccggccaagtggtactggttcgaaggcaacttccaggcctaccaggagaacaaggtggcccgactcggtgaggatgcggcccgcccgcaccgcctgcacaagaagctcgtgcgcggctgagatacgccggcattagtgccacaacgcgctttatacgtcgaaagccgtccctcaggggcggctttcccataattgcccccatgactgccccgccccgcatcccataaaatcccacagtcacctacggcaacgcaccggcaacacaccggcagtgcagcagcaacgtagcggcaacgcaccgcataaccaaccgtttaccttccaaacagtctcgttacatttcgctcccggaactcttaacccccaccggatagactgccaaccataggttggaatacgataaccgaatatcgaacacagcagaacaggaatcgaggaacgccatggctcaggcaaccaccgtaactccattggaccatctggtgaaggtgctgaagttgggcgagccttccgcttaccgcaatcacacatacatcaatggcgagagtatgtacttccccactggccgcgtctacggtggccaggtcatcgcccagtcggtgatcgccgcgtccaaaaccgtgggcccttcacgcctgccgcattcggtgcatggctatttcattgccgccggcgatattcgtcaagacctgctgtttgacgtcgagaaccttcgcgacggccgctcgttctccgctcgtcgggtcaacgtcacccaagccgaggggtcgattctcacggccatcgcctccttccaggagaccggtcaggagggtgtggaatttgccgatccgatgccggaaaacctgcccgatcccgaaacgttgacttccgccaaggaactcatgcagccgttcgccgaaaagtcgccgttcgccaatttctatgtcgagaaatcgccattcgatatccgccacgtgacgccgaccgtgatgctgcgcgcggacaaggattccgccgagcatgattccggcaagcagatggtgtggatgaaggccgatggccacgtcgatgtgccgcaggtcatgcatcgtgcgatgctggcactcggctgcgatcaggtgatgatggagccggtgctgcgccgcgccggactgtcgatttccacaccgggcatttcctatgcgtccatcgaccattcgatgtggtggtatcaggatatcgatatcaacgaatggcatttatatgtgcaggatacgcctatcgccgcgcacggacgcggactcggcatcgccaaagtgtatgcgcagaatggcgacttggtggcggccatcgctcaggaagctatggttcgcgtgccgcaggaatagcgggcatcggcgtggccgatggtgtggttttttcttcttctctcccccagtcggctacgcctacggccccctcgtcagagggggcttatcacggattatcttttgtaggcctgggctatgtcgctacggcgcttggcttccttgattttcgggttttcggggccttcgttcggcggtagctggcacaaccattcgccgataatgccgatgatcatgtcggcgatgcacaccacggccacgattgcgcactcggtgacggcgtgtgcatagaaatccgcctcgatatggctcaggctcatcacaatctgaccgccataccagccggcgagcgttgcgcccgccaatcccagtgcctttgccagcaccagcgtatacaccgcgatagtgggattgatgaagctatgcggacgcttcttggggtcggtattcgcgtatttatgcacttgcagggccaagatcagcacgataacgcccagcacggccagcaatccggtcacaatccaaggcgcaccaatcagcgacagtcccgagctttcgccgtaggaggccagaccgatacccgccaacaggcccagcacggcaccgatcacatactgccaccatggtgttcgccgtgttttcatgtccggtctccttatcgttgcgttgctgtttgctgtttgcgaacggccctcgcgcttgggctgttcatcttgatttggttttcgtcactgccgtgcccggctgttcgaggccggagactggtccgtcaccgtctggtttctagcctaccgttcgtaactggttctgccatcagctcaactgttcgacagtatccagttgtccgatagcaatccgacctgtccggcatccggtgccatggccaaaaggaaggccaccgggtcgccgcccagagaagcattcgggtccatatccagccaaggtgccaataccgacgcatggttacgggccgacggccaaggaatgctgcagttgggctcgtcggaagtcacgccttccatgtcgacaaggtcaaggtcgactgccagatcatgaacgctttcgatgctgcccaatacggcaatcaggtcggcgggcggcaacttggtttcgatttggatgaccgcgctcatcgcgtccgggccgtcgaaatggctgacatggtagagcggcgagatgccctgtacctgattgccaggaacactgtcgatggaaacgatggtttcgcggaacagccgttcggcatcctgcgaggtggaatccagcgaaataatcgccttgcgtgagacgggtgccgactccgacgctgattcttgcttgactgcatgcccgccgagcatccagtcttcgctctcgagctgcacggcgttacggtccggtgcggcggccagcaaatcggctacaggcccctcatgggctccggcaagtttggcgttcggattcagcgccgcccagggagccagcacaaacgcgcgctgccaagcacgcggatggggcaatgccagatccggatccgcgctggtgatgccatcaaagtcgataatgtccaagtccaacggcctggaatcccaatgattctcacgaattcgtccatggttcgcttcgatgttttgcaacgcggcaagcaattcgtggctgcccattgtggtttcaagctccaccacggcgttcaggaaatccggcgtaccgtcagccatgccccacgcggccgtgcggtaaagcggcgaaataccagtcacctgtgtgccgagcagcgcgtcaatctcccgaacggcggctcgcaaggtggattccacctcgcccacattgccgcccaaggccaccaccgcgttatggatggcatgctcttcagcagtgcgtccattatcggtggcacgcacgcgcgagatggagaccgatacatctgcaaaagccacgacgatgggtgcgtgaggcttgtgcacggtgacgtcgatggaggcgacggccggcgcatcggcaagaatctcgtccgcgatacgttgggccagacgctcgatcaggtccacatgagggccttcgatgacagccgtgatgtccttggccacacggccgtaatcgatggtgtcgttgagatcgtcggattgaccggctgcggccagatcaaggtgcagggtgacatccacgacgaaggtttgtggccgttcgtgttcgaaggcgagcacaccgtgggtgccgttggcatgtacgccggtaagtgtgatggtgtccattggtaaggctttctgctcaaatgctcccctcagtcgccttcggcgccagctcccctcgcccgaggggagccaaggcctagaagcaaccaaaacagggagccaggggaatcatgcgtattcgcgccaggtgttgccggcgatgacggcggcgcggcttttggccacgtcgtgtacgcgcacggcccatgcgccatgttcggcggacagggcggacaaggctgcggtcacgtcatcgcgctgggccatgatcggcccatcagcaccggcagcgcccgcctcggtaagcatcgccgaaatgaagcgtttgcgggactggccgatcagcaccggatatccggtggctcggaaggtctcgagtccggtcagcagcggcaggttgtgctcgatgccgggcttggagaagcccaggcccgggtcgatgataatgcgctcaggctttacgccggcggccagtacaccgtcgacttggcgcatgagttcgtcgtgtacgtcggtcaatacaccgtgctcgtagacggaggtgtcttgatcggggttcgcgcccttggagccggcgagccaaccgcgccaatgctgcacgatgtacaggcagtcgtggtcggcgaccacgtgcggcagttcggcatccagcgtgccaccggagacgtcgttgatgatctgggcgccctcgctcagcgcagcggcggccacggatgcgcgcgtggtgtcgatggacaatatggcaccggccggaatcaatgtcttgacggcaccggtgatgcggaccaattcgtcagcctcggacacgcgcttggcgccggggcgcgtggattcggcgccgatgtcgatgatgtccgcgccggcggccatcatgtcgcgcccgtgctgtgccgccttggccgggtccagccacaggccgccgtccgaggacgaatcctcggtgatgttgagcacacccatcaccatggtgtgcgtagtgtcatgcaacgcctgcaaatcagtcattatgtttccccttctatgtaggtcccaagtgagctccctatgatgagggagcttagtagacactatttatccaaaatgaggctcatggcttcggctcgggtggccggattgcgcagcatgccgcgcaccgcagaggtcaccgtgcgggcggaagacttcttgatgccgcgcatagacatgcacaggtgctcgcattcggtcaccacaatcacaccacgtgcgcccgcatactcgaccagcgcgtcggcgatctgctgggtcaaacgctcctgcacctgcggccggcgagcatacacctcgaccagtcgggcgagcttgctcagccccatcaccccgtccttggcgggaatatagcccacatgggccacgccgtggaacggcagcaggtgatgctcgcacaccgaatacagttcgatgtccttgaccagcaccagctcgtcggtatccacgtcgaagtgcttctccagcacatcggccggggaagcctgcagaccggcgaacagctcgcggcacgctcgggcgatacggtcaggcgtttccaccagtccctcgcgctcgggatcctcgccaatcgacttcaggaacaggcgtacggcttcgcgcacgccttcctcgtcgtatgtgcgtttctcccgctggcaagactctatatattcgttcatctcatctctcccttgtcattgtccacaacgacgtcggcccggcctgcgtacgtgagaaaccacatgaacaggtcgggcagaatcgtcatcgtgtctactcttccggcttcatgccgaccgagcgcttgaggctttcgggaatctccaccggcggcttgtccgagtcggggcgacggtcgttggacagccacaccgggcggaccggcgccttcttgatcggcgcgaagatctccgcaagctccttctcgttcagagtttccttgaccagcagctggcggaccaactcatcgagtatatcgcggttgtcgttgatgatggtccacgcctcggtgtgggcggtttccaccagcttcagcacctcgtcatcaatcacttcggcggtgcggtcggagtatttgcgcggctgcagaccgtccatcacggtggtctgatcgtcgtcggaaccccacttgatggcgccgagcttgtcggagaagccgtattcgatcaccatcgtacgggcgatgctcgtagccttctcgatatcgttcgaggcaccggtggtcgggtcgtggaagacgatttcctcggcggtgcgaccgcccatcgcgtaggccatctggtcgagcagctggttgcgcgactgcgagtagcggtcggaggtcggcatgacggcggtgtagccgagggcgcggcctcgcggcagaatcgtcaccttggtcaccgggtcggtgttgttcagggcggcggctaccagcgcatggccaccctcgtggtatgcggtgttgcgcagctcttccagagccatgcccttggacttgcgcttcggtccggcctgaacgcggtcgatggcctcgtcgatggcgcggttgtcgatcaactgggcaccggcacgggcgcacagcaacgcggcttcgttgagcacgttggccagatcggcaccggtgaagcccggcgtgcgcacggcgaccatgtgcaggtcgacgtccggtacgaacggcttgcccttggcatgcaccctcagaattgcctcacggccttccagatcaggggcggccacgcccacctgacggtcgaatcgacccggacgcagcagagcggggtcaagcacgtcagggcggttggtggcggcgatgatgatgaggttggtgtcgttgtcgaaaccatccatctcgacgagcagctggttcagcgtctgctcgcgctcgtcgtggccaccgcccatgccggagccacgcttgcggcccacagcatcgatttcatcgatgaagatgatggcgggggcgttcttcttggcctcatcgaacaggtcacgcacacgggaggcaccgagacccacgaacatttcgacgaagtcggagccggccatcgagtagaacggcacgccggcctcgcctgcgatggctcgggccagcaacgtcttaccggtgccgggagggccgtacagcagcacaccgcgcgggatgcgagcgcccagcgccttgtacttggacggatccttgaggaagtccttgatctcctcgacttcggccacggcctcgtcttcgccggccacatcggcgaacttggtggtgggggtctggccatcgagtagcttgccgctgttcttcttgccacccatgccgagcatgccgccggcaccacccatgcggctcatcaggaaccagaacagggcgaagaagatgatgaacggcaggatcgaggtgacgaggtagctcagcatgctggtctgctcgatattcgaggtccaacccttttcgagatcaccgttctccacggccttggccacctgtgcgccctgcgcgaaggtgtagtagaactgcacgttcttgccgtagttggtcaccttgccggtgtcggcgtttttcttggtgtagtcgttcttcagcttaaggcggacgacctgcttgttgtccgtgatctcggcgtaggtggccttgccctgattgatcagcgcgaaaccatctttggtgtcaatggtcttcgtgccaccgccggcgaacatctggaacatcagcgcgaccatgaccacgagcacggcaccccatagccaaggggactgccatatcgggcggttctcgttgttgttgcctttgccattggtcccgttattgccacggttgaacgggttggtgaacgggttgccgttgttacggttgttgttcgggttcggattattgccgttacccggcccttgcgggaagctcatgcttgcactccttggtagacggacggcttgaggaccgcgatcgaatcgaggttgcggtagcgctcgtcaaagtcgaggccgaagccgacgacgaactcgtccggaatctcatagccggcgtacttcacatcaacgtccacttctcggcgggaaggcttgctcagcaaagcgaagacctccacggaagcggcaccacgacgtttcagttctgcgaccagccacgcgagcgtgcgtcctgaatcaacaatatcctccacaatcaaaatgtgccgtccgcgaacatcggcggacaaatcctgcctgactgtgacctcaccgctcgacactgtgcccgagccatagctcgaaaggctcatgaagtcgatctgtacaggaatgctcatggcctgggtgaacgcgaccagcgtattcacggcccctttcagcaccgccacgagcagcggattcttatcgcggtaatcctcgctcgcgagagtggccatctcgtggatcttggcatcgatctgttctttgctgaccagctcgtggtcaatatcttcctcaacgtcagcgattcgcatgcgctccatcttggcacacgcgaatgacgtgtttcttgcgattggctgaataacctctgggaagtgagacgccgccttggccatgccaatcgacgaccagccggtcgatggcggcaatctgggcggcactggcgttcacaccggcctggctcagcgcgtgagcgatgacccgcaaccgaatcgcctctggctcacgtgcaatacgtttgacgccgatcatcaggccgatgccatggcccgaatcgttggtatcgtctgcagcacaggctcgtggcgtatcggtcgataccgctgccgacgatgccggccggtcaactgccgtaaccgcctcccccatcacctcgtcggatcgctgatccagatactccttgtccattctggccagctgtgcgctttcggcgaaatggcgggtgacattgaatccagcgaatcgttcgatggccggcagcaggtcgtggcgtacccgcgagcgcaacggatagtcgtccggcaactcgccgtctaccgcatcgccattggtggggtcatcccaatattccacacccaagtcttcacagaggccggtggtttcgtctcgagtaagggtcagcagcggccgcgcaaaagtcacgccactgcgtgtgaagacctgcggcatgccggccaacgcatccacgccacggctgcgcagcagtccgatcaatacggtttccgcctgatcgtccatagtgtgggccaacagcacggcaatggcacctgattcacgcgccgcggtgcacagctcgttgtaccgggcctgccgtgcggccgcttcgaggccctcaccgcgtgcctgcacggttgtgttgcgcacgatgaccgggcccagtcccaacgcacggcaacgatccgcggcctcgccggcgacctgttcggaaccctcctgcaagccgtgatccacaatcacgacaccgcaacgcacgcccatggacgtgcatacgatatggcttaccgcggccagcgccatcgaatcgcgcccgcctgaacaggccacgagcacgagtggtgcatcggaggcaacggcatggtccccatgctgcgcgaattcgggagcctgcacatcgcatagttccacggcgctcagcgttgttcggaccgcgcctacggccttgcgcaatcgtgcggaatatgccatgtactcaccacccttttctggttataggcactcgtgcgtttatggacgtttacggcctttgtagcccttgatggcccttgatgcctcttttacagccccgcgagcttggtgatgaacgagtcgatggcgctacgcgcggcggcataatcctcaggattgttgaccaccacggcaaacgacaacgctcccccattggtacgggacacattgccggccatcgacgtgaccgtgccgaggctgccggttttgacgcgcagcagaccggccacggcatcatccgtataccgatcctgcgccgtgcccaccaaccccgcgatggatagaccttccgcaccggccgcgccgctctcggtggtcagattacgttgttggacggccgccagcgtgcgtacggtgagccgggagccgggagacaggccggagcaatcggccatggtcagaccggatgtgtcgagaccgagatcgttcagagtggatttgaccgcttccgtgccgccttcaggactgtttgtcgctgatttcgccaaagcggtgagtctaccgaactcctcggccagcgtattgtccgaatgccgtaacgtgtatgccatgatttcggacagtgttgccgaactcaccgaagccaaaggcgtttcgccggatggagcggtgtttgccgtcacgtctccggtaacggccacaccgttcgattggagcagttcggcgaatttcgtggccacgtcgctggcggtgtgctgggacagttccgggtatccggccgaatcatcagggtcggccggcgcaggcgtatcggcggtgtgttggcgacctccatcaatcgccattgatgagaccggcgtgaagtagacggtgtagtcgcttaagaccgcgccgccttccgacagacctgcgggaatgcgtgagtcgccgaatagggtgtcgtcgtactcgagattgacggaagtgatgcctcgctgggcgagcgcggccacggtggccttggccaaggtgttcagaccggcacgtccgttggtatggttggcgtcggaatcgcctgcagacagcagcatgtcgccattgcctttgagggtcaacgtattggtgccgtcatcggattgggtcaggaacacttgggtatccaaggtggatgccatgttcagggtggatgaggcggcgagcgcggtcagcgttttcagtgtggatgcaggctcgcgtggagtgttcgactcatgttcggcagcgacggtgccttgggcgtcttcaatgatcaccgacgtatcgtttcccacgccttgcgtggacagcaattcgttgaccagtgcagaagcggccgtggaatcaatggccttgttcgcgttcagggcaccggcgatggtgccgcctgatttggcggtggccggattggcgaaaacaggtgcggtgacaggttttaacgtcaacaatccgggggccacgtcggtgatgtcggcggcgcagtaccccgcgaacagggcgatggtggtcagtgcggaaatgatgacggtcagtgttcggcgatgcgatcgttgggtccgccgttgcgcttcacgtcgctgacggcgtgataccgctgtagataccatcgtgctccttatgccaaggcaatcatttctgcaatgaggcgaacgagtcgagtgttgccacaatcgagagcattcgcgcatccatcagcttaccgcccagccatgtcccgagtgccagaatgccgatgccattggccagcgcgaccggaataatcgccagccacatgccgccttcggctcctgtcagcagcatgaccagcgccacgatgccagtgggcagcatgagcagcaggctgccaagcatgtagacgaacgggaagaagccttgggccatggcgcggccttgaggcgcggagaacggcttgtccattgaggcgaccgggtacatcagtacacaggaggtgacttcggccacgcccagtccgctcaaggcgatgcccatgcccgtggcgaggaagatcaggccggtagcgaggtcatcgggctgcgcccagcgtccggtcagtgcgccgaccagcacgatgccggcgagatagagcagcaccatgtagacgaccatgatgccgacgtagacgcgtacgcggccgattctgtcggtccggccacgcacgccggcgatgacttccatggtgaagccgcggccgtcatatgcgagcccgttgctttccacgacggacatgaaccagccgcaccagatcagcgactgccagacgaccgcgctgatgccgtgtgcctggaaggcgaagatgatcaggaacaggaccggcatggcgaaggtcatggcttggcgggggtctcgtttgagataggtgatcaggcgtgcggaaaccgcgccggatgccgaatcgggcatccatgcgaatgcgccgatgcctttggcggtctcggacggactgtttgcgccgatggtgagccgttcatgtctcagacaccaggtgcagacggcgaagcagacaatccatgtgacggcaaggatggcgatgcgggcgagcagcaccgcccaggctccggtaagcgcgtcgaacggtagttggaaggccgcgccgaacggcgtccatgcgacgatggtggtcgccgcgccccaggtttcggtgttgaggctgaaggccacgccggagttgaccagaatgttcggcaactgacagatgataacgaacgtcagcacgatgaagatatagaacgcgcctttgccgcgtttgctggtcaccagcgtggtggatagggcgatgagcagtttggagatgctcatcatggtgatgacggccagcactgcggcgaggagggaactgatgattacggctggtcccatatgccgataggccagtgtccagagcatcagtgaggccacgccggtaagggcggggatgccggacaggccggaaagcagcaagccgaattgcaggttgcggtcggcgatgccgtagagcgcgaatttgcgtgggttcatggtggagccttcgccaagcatcatgagctggatgaagccgatgaagatggtcatggtcgcgccgaccagcacgacgactatgttgacgatgcctccggaaccaaggatgttcagcggaaagccatccgcgttcacggtgaagggcggcagtatgccgatgaaccatgcgagcacgccggtgccgatgatggtgccggccgcgagtacggcggaaaagacataggcgacggtctgccacgccgattttcgcagggtggcgagcgtgagcgtccagcgcaggcggaccagggtgatggcgctgctgatcatcggcgggcctcatcggtgggtgtggcgggcgtggcggttgtaagcggaatgggctggaccggctggaccgaagttggtgcttgggcttgggcttgcccgccgtcgagccatgcgagatgggcggcttcgtggcggccgccgaccagttgcaggaagcggtcttcgagttcttcgccggcggcgacctcgtccaccgtgccggccgcgcacaccagaccgttgttgattacggccacatgcgtgcacatcttttcgaccaatgccatcacgtgcgaagagataatcaccgtgccgccggtcttcgcgtattcgatgaggatgtctttgaggttggcgctggacaccgggtccacggattcaaacggctcgtccaggaccagaatgcgcgggctatgaatcatcgcggaggccaggcagatcttcttggtcatgccggccgaataatcggtgaccatcgtgttggcggccccggccaagtcgaaagcattgagcaggtcctgggcgcgacgcgtggtctcatcgcggctcatgccgcgcagcatgccggagtagacgagcaattgcaaaccggtcagtcggtctaagatctggtcgggctggggcatgacgccgatcatgcgcttggccgtgttcacgtcgctccacacgtcatggcccaaaatcatggcggtgccggcgtccggtaccaatagaccggtcaccatattgagcgtggtggttttgccggcgccgttggggcctacaagtccatagaacgagccgaccggaatatcgagcgcgagtccgttgacggcgatcttccggtcgaagtgcttgaacaggccacgaatggacaccgccgcattcggattcggcggccatgcttgtggctgcggttgcgacggctgtgcaggcgcgggggcggcagccggcatcatcggcggctgaaatccgacattcctttgagtattgtctaagctcatacatccactctaccccaccagccaaccctcagcgaagcaaacccccgggttgctgttggattgccccgctgagcggctccaactagcggactcggtcaacccttatgcgcgatgggcttccactgggctttggagaagagggcctggaaggagatcggcacgtagctgagaatgtaaatcgggaagctgagcacataggcgagcagctccttgttcgtggcaccgatctggtcgcgctcgacaatgatggtcaatgcagccaatgccatcaggcccaacaccgatatgatgatgccactggaccaactggccagcgattgcagctggctcggccaactcacgaagccacacgcggcgaacagcaagcccattaccgcgcgaatcacgcccaacacggtaaacggacacagcatcaaggtgaagtcgatgcaggagaaatcacgttcgcgaaccgcgcgtttcagcaatgccgagccataataacggaatacctgcaggaatcccttgctccaacgcaaacgctgacgccaactttgcgagaaggtaaccggctgctcgtcgtagagaatcgcagtaccgcaatagccgatgcggtcgccatgcagaatcgaatccatagtgaattcaagatcttcagtgagcagatggaacttccatcccttgttccgcttcatcacctcgcgggagaacatgaatcccgtaccgcccacatggcaagaggaaccgagaatcatacgcgagttagacaggaatcgcgattcacggatgaaccacagcgcagaaccagaagacacccagttatccgccagattcaccgaattacggtagctggtcagaatcttgaatccggagcagaacgccttgttcatttcctcgaagtagtgcttgtccagcttgttatcggcatcgaacacgaagtaggcctcataatcatcggccacaccgatgtcgagcatatgccccaacagatacgtcagcgcatatcccttgccaaccagctcaagattgtggcgttccaccacatggcagcccaaagaccgcaccacgtcggcggtgttgtcggtgcagttgtcggccaccagccagatgtcgatgaggttggacgggtaggtctgatcgcgaatcgacccaataaggttgccgatcactttttcttcgttgcgcgcggagatcagcacggcataccggttggtcatcggggcgtcggggaagcgcacgggcttggcgaacagggacatcacgatgcacagtccctgatatatcatgccggcaccgccgacgatcatcagaagaatatcgagtacggaaagcagagtcatcagcgccaccctgccctaggattgctggaggcagattgatcagactgcttggtttgcttgcgttgctcgggctgctcaggctgttcggcggaccgctcaggctgctcgggctgctcagactgctgcgtatccgcggcaccacgctgcggaatcgccgccgtatccggctcatcaaagcttgcatccgcaccgactgtattatcggcgttatcggtatcatcggcatccgactccggctcagtgccgtgtaatcccttgcgagcgctggaggatagcacgttcttcggaatcgccacggtggcggaatcgtccaaatcggattctttcgtctcgtgcgacggaatcgcataaatctgttcctgcagcaaacgcagttcctcattcatcggcacgcggttggtggatcccctggccgcacgcggcatgtgctcgccgattggctgcaatacgtgctcgccgaacgcctcggacgcctcgacgatcttggacttcttctccggagtcggatcgttcatcagcggtgagtcaatcagctcatagcgcttggtgtacgcacggaagatggcctgcagcgatgcggtgaccggcagcgccaggaacgcgccgaatgcgccgaacagcgagccgaacgccagcaccgagaggaaggcgacggccgcgttgatatccatcgtgcgctgcgaaatcctcggcgagagaatcaggttctcgatctgctggtagacgatgatgaacaccagcaccgccacggcgtacgtccacccgcggttgccccaagcgaacagcaccggcagcgcaccgccgatataggtgccgaccgtggggatgaactgggataccacgccgcagaacagggccaacggcagccagtagggcacatgcaggatctccaagaagatggcggtgcaggtggcgttgatcagcgccagaatcgaacgggagaacaggaaggacgaaatctggccttgggccacggtccacaccagcaggaatcgacgctgcgtgttgggggccagccactggcagaaggagcggcgcagctttgggccggcggcggagatgtaatacgtggtcattaccacggtcatgaggttcagcaggaaggagaacaggccacccaccgtactcatggcggtgccggcgaaatcggtgacccacgaggtctggatattgttgaagatttccatgccaagattgctgatttccggcatcttgaacgtggtgtactggtccgcgaactcacgaatctgctcatacattgccggcaaaccgcggaccatggcaatcatctgctgtacaaacatattgccgaacagcgtgagcagcacacccacgaccacggccacgcccaccagactgacggcggaagccacgccacgcttccagccatgagccaccagcgccaccaccagcggttcgacggccagcgccaggaacagcgagatgatgatgtcgaacaccagataggagatgtcgccccacgagcgccagcagaacatgaatacgatgacggcgagggccacatacagcagcgcgcggccgaaccattccggtggcctgcgggaatctcccttggcggggaacaaagtaccaaagtcgatacgattctcgtcgttcgggtctgccccggcttctgcggcaccgcttctcgacgtgtcggtgctgtttatgtttcgcgcgcgttcgctcatggctccccattgtagcgaggggtttgaagctcggatacgccggcggcgtacacccgcttttctattgttgatgttatgctcaacgtttcgatcatcatcccagcgtggaacgaagccgaacgcatccgcgactgtctgctgaacgccactcgccagaccatcatgccgcatgaggtgctggtggtggacaatcgttctacggacaacacctgcgcgattgtcgaacagttcatcgccgaacatcccgaggccccggtcaaactgttgcaccagaacgatgaacaggggctgattcccacccgcaactttggcctgaacgccgcgaccggcgatgtgctgggccgttttgacgccgactgtatgatccggcctgactgggtggaggtggtctccggcatcttcaccgaagacccggccgcgatgggtgccactggtccggtgatgtattacgacatgccctcacgtcatttcgggttgaaaggcgacaattccttacgcaagcgaatctaccgtgccgatggcggccagccgctgctgttcggctcgaatatggccttgcgcgcttcggcctggcatcagatcgcgaatgaggtctgccgagataaggccgatgtgatgcacgaggatatcgatatttccctgcatctgatgggcaagaatctgaaaaccgtgtactcgccgcgcatgatcgccgcgatgagcgcgcgacggatggacacgtcgctgagttcattcctgaactacatgcgacgttttaagaatacgtttgatgcgcatccgcaacatacgcgcacgcataagccggaggtgttgttcaccgccatgtatccggcgatgcatatgttctacccggtgtggcagaaagtgctgaattccgcggatatcaatcctgctgaagccgcgtggatcaacgagcagatgaaactggcggaggcgcaaagcaagcagctgtacgacgagacccccaccgacgaagtctacgacgaaaagcacgaaaagtagctggatatacgagccccctctgcttatgcaagctccctctgatgagggagctgtcgaacgaagtgagactgagggagagactgcgacgcagccgctaaaacattgaatcggccgcaggccgatacctattattcagcggctacgccgcaacttctctcccagtcagctacgctgacagctccctcatcagagggagctaatgtttaccgtcatcgactgatcacatcagcgacttgtaaatcgcgagaatgtcctcttcggtggcctgacgcgggttgccgggggtgcacacgtcgttgaaggcgtcgtgggccagcggttccagatcagcctcggtggcgccgacctcgctgatcgtggtcgggttcttcagatccacggtcagcttgtggacggcctgcacggcctcttcgcgcaccttctccagatcgccggtgtaggcgtcctcgacgccgaacgcgtcggcgatgtcgcggtacttctcgcccgtgtagtccttgttgtattccatgaccggggccagcagaataccgttggccacaccgtgggccacgcccagacggccgcccagcgggtgagccatgccgtgcaccaggccgaggcccacgttcgagtaggccatgccggtgatgtaggaggcgtacgccatctgctcgccagccggaatgtcgccatcggcggacttggccaggttctgggcaatcatgcgaatggtctgcatggacaggcagtcggacaggctccaggcacccggggtaatgtaaccctcgatggcgtgggtcagggcgtcaagtccggtggcaaccttcaggccgcgcggcatggagtcggtcagatccgggtccacgaaggcgacgatcgggatatcgtgcgggtcgacagccacgaacttacgcttgttggcggtatcggtgaccacgtagttgatggtcgtctcggaagcggtaccggcggtggtcggcacgccgaagatcgggacggacgggttcttggtatccgcgacgccttccagggacagcacgtcggcgaactccgggttggcggtgatgatgccgatgcccttgcaggtgtcttgcggggagccgccgcccaggccaatcaggaagtccgcaccggactcggcgaacttggcgacgccgtccttgatgcactctaccggcgggttcggcttgacgttggagaacacttcgtagggcaggccggcctcatccagaaccttggtgaccttctcggcggtgccggtctccagcagtaccggatcagtgacgataaatgccttggtgaagccgtgctgcttggcgacggccgggatttccttgatcgcgccacgtccgaagtatgcagtctggttgaaaatcatgcggtataccatagggactctccttttgagctagtgtcttaactggtggtccactcactctttgagtggtccaacggttccccagtctactccgcgcatgagcattcacctgaaaacacgctgaaagaacaacactgaaaataatggcaagaaatggcggaattccgcacttgtcgaattattgtccattgaccaaaccagttcaatcgcccgagatctcaacgataagaccattttccggagtcgcttggtgctctccgagaaactcgtctctcatccgcttacttcgcgcgtacacaatcaatatgcgagatgcctaattccattcgtgtttcatcagccgaacgcgaactggttcaccagatggtgtattcaacggtttcagtctcttgaagaggactaagatacctcgacaattggggtgatcatcataagagaatgaggcagataatggcaaatggcaaggctatgacggtcggcgagatggcgtccctgtttctcgaccccgacactcccgttcgtatcgacgcttttgacggctcgcatttcggcccggcagacgcggatttgaaggtcaaaatcgccgcgccgaactgcatgtaccagctgctcgcgcacccgaatgaaatcggcatcgtgcgcgcatacattctgggcgatttcgacgtggacgacattgactacgccgacccgtatccggcgatgcgcaagctggtgtcgctggccaaatacgttcgcccgctcactcccgcatccattgcccgcgtatccgccggcattctgagtcacggcttcaagaagccgccggtgcccgccaccgagggcccgagcaagttcgcccgcatcaagcgtggcctgatgccgcacaccgaaaaggccgattcggaaaccgtcagcttccactacgacatgtccaacgagttctacgccgacttcctcggcccctccatgacgtacacctgcgcggtattcgacaacgagcacatgagtcttgaagacgcacaggccaacaaactgcgcctgattctcgacaaactggacttgcaacccggccagcgcttactggacatcggctgtggctggggttcgatggtcatcaccgccgcccgtcgcggcatcaaggcgctcggcgtcaccctctccaaggaacaggccgcgtacgccaacgaatggatcgcccgtgaggggctgcaggatctggccgaagtgcgcgtacaggactaccgcgaggtgcccgagcatgacttcgacggtatctgctcgatcggcatgatggagcacgtaggcgtcaagaactaccagagctacttcgaagagatgttccgtctcctgaagccgatgggccgactgctgaaccaccagatcaccatcagccatgacaagcctcacggcaagcccggcaccgacgaattcctcgaccgttacatcttcccggacggcgacctcggcgcgcccggcttcatcgaatcgtgcatccatgacgccggcttcaacgtggtgcatcaggagaacctgcgccagcactatgcgctcaccctgcatcactggaaccagaacctctccgagcattgggacgacgcggtcaagcaggtcggctttgaacgcgccaaggtatggggtatgtacatggccgcctgcgctctgaacttcgagctcgacggcatccagattcaccagttcctggctgtcaagccggatcgcgtgggccacccggacggcaagtggtaccctctgcgccaatggtggcaggcctgactccgtttctgtgggacggcacgcggtttttaccattgttcatctgccgtcccacaggagtgtgggatagcagatacatcaatcgtttgacgtatctgccatcccgcatgacataagccgagaaccgcagaatagagccgttctttgccctcagctctgagggcgttcttcgaacgctgtgggacggcacgtcgaaaatcggcaaaatcacgtgccgtcccacacgattcccttcgcacgcgcatttcgcaggtgctttttctgcaatactgactctatgagcgccacagccccagaaacggctggggcggacgatcgcaccgaccatgacacgcgcggataagacccacgtttctttacttaaccctaacccgatgttcgcattggtgctgttggcgtgcgtagttgcggtgaggaagacagttgttggcgaacgcgagccttcgcattgaccggccagcccgccggagtaggtacgtgacggatatgcaaaagccccgcacaaggcggggcttcattgtggtggctccgaacggcgtcgatccgttgacctagcgattttcagtcgctcgctctaccaactgagctacagagccatgaacagtcaaaaacccggataatccgggtttcataaccattccagcgaccccggccggacttgaaccggtgacctccgccgtgacagggcggcgctctaaccaactgagctacggggccattgttctcacttgcgtgaggcaacagatgtatatattactgaaattcgccggtcgtgcaaatttcggcgtgttccgcgtaatttcaggtttttgctatcaccagcacacggacacgtctgccataaacatccacaaacgacgaagggcgcgaccggaactccggtcacgcccttatgaacagaagcacttcacggcatccaccgcaaagcaatcgtcaatctcagtcagcctgcttccaggtgtcgacgtcgatgtggtgttcggggttggcctgccaggcatcccacgcggacttgacgatgtcttccacgtcgtacttggcgtgccagcccatctcctcgttgatgcgcttcggggagccgatcaggtgcggcgggtcgccggcgcggcgggccatgacagcctcggtgaacggcagaccggtgaccttcttgacttcgtcgacgatctggcgcacggaggtgccttcaccggtgccgacgttgaaggcgtcgtacttgcgctcgtcacggtcgaggtacttgagggcggcgatgtgggcgtcggccaagtcggagacgtggatgtagtcgcgcacgcaggtgccgtccggggtcgggtagtcgtcgccgaagatggcgggggccttgccctgcttgaggcggttgaacagcatcgggatgaggttcagaatagccgggtcttcgagttcgaccgggccgcagccggccacgttgaagtagcgcagcgcgcagaagcggatgccgaacggctgctcgcaggcgcgagccatccactcgccgaacagcttggtctggccgtaggggttgatcggcagcatcgggacgacgtcctcgggcaccacatcgaccggcggcacaccgtaggtggcggcggaagaggagaagacgagcttcttggcgttcttggactgggtcatgccggtgagcacgttgagcatgccgttgatgttctgctggtagtaccacagcggcttctccacggattcgccgacctgcttgcgcgcggcgaagtggatcacggagtcgacgccttcggcgtcgaggatttcggccagacgctcgccggcacccggagcggcgatatccatgccgtacagacgggagccttcgatgcgggtgggcttgccgtagctcagatcgtcgacgacgacgaccttttcgccggcctgatggagtgcgtgaacgacatgcgcgccgatgtagccgcagccgccggtgacgagaactgtcatagttgacctttccttgtgcgggttgcaagtgttggccgtcggaagttcagcggctgttcacttttggtccgctttgttaccttttgaaacaatttgagtatatcacacgaacataatcgcacaaaacggtggtgtcgtccggcaatatctgcattcattaggtcgatctggcgttcattaggtaggtcggcccggagccggcccgcacgaacaccgggtaaatggcttgatatggtggttggtatcgcacaccacccacctaatgaacgccaaatcgacctaacgaatgaacagcggtgcggcgcacaaggaaaatccgaggaatatatgaccgatcccgaatccacagcaatcgattccgtcaccgcgatggccgcggaccacaccgaggcaccggcgcaccccctgcacaaggtgctttccttcgtgcgccgctccggacgtttggacgatcgcctgcagcgcgcctgggacaactatgccgacacatatctgttggacattgcggccggcaacctgctggacgtgcgcgaaggcgtcacgctcgaccgcgcgttcgtggagtcctcatggggcaacgacaatccgctcattgtggaaatcggcaccgggcagggagaaaacgtggcggccgcagccgcggcccatccggagacgaacttcctagccttggaggtctatgaccccggtgtggcccacacgctgctgctcgccggcaagcaggggctgaccaacattcgtgtggcccaggtcaatgcgcccgagctgttcaaggtcaccgcgcccggcaccgtgtccgaggtatggaccttcttccccgatccatggcccaagaagaagcaccacaagcgccgcatcgtgcaggaggccatggccggcgacattcatcgcgcgctggtcacagacggcgtctggcgcatcgccaccgacatcgaggactacgccctgcacgtgcacgaggtgatggacggcctcgatggctggaagaacctgggcagcataaccgtcagcctcccgctggagcacgtgggcaagggcaatgccgacatggccgccgacatgccgcacgccgacttcaccgaatccgagcggttcgagggccgcgtgctcaccaacttcgaaaagaagggcctggccgccggccgcgcgatccacgacttcacctatcaggccgtcaccctgaactgattgcgacacgccgaaatgccgtcgatttgcataaccgaacaacctcccgtaaagtaattcgagttgttcgcccccatcgtctaacggttaggacaccagactttcaatctgacaacgagagttcgactctctctgggggtacttcattgaagatctcggtcatagcgaccgaggtcttttcgtattcgcgggaccaggcctgaaagcattcggcccgcttccctgaaggaaacgggccgaatgcttggactcgggtttcaacccggaaggcttcagtccagcgacttcaccacaacgacctcggtgggcacgttgcccgcggtggccttggagtaggggcacagctcctgcgtacgctcgacgagcttggcggcagcctcatcgtcaagatcgggcaggactacctcaatcttgcccttcaggccgaaggactcgccttcaggaccgagcgagatgctgacgcgcacctgactcttggccaacttggtggccgccacgcgctgctccttggcggcaagcgccaacgctccttggaagcaggcgccccagccgatggcgaacagctgctcggggttcgtgccctgacccttgccgcccatggcgaccggcgtgtccaggtcgaactccagttccggctcatggctcacggcgtggccgttgcggccgcccgtaacctgcgccgtagcggtgtagacgatttgcgatggttcgttaccttgatatgtgctcatgctttcatctcagcacgtgttcacgcccgccacaaggactgtcccaccgtagacgatgtgacatcatccacactgtgacttcgcgcacagagtcccgacaccgtcctcacctcgtttatcggcaccatgcgtgtataaccacatatggcattatcggcgaatatcggccggcagaccagttgcacaaggagaacatcatccacatggcagacaccgccaacaccaacgcctggttgccggcgctcaaagcggcgtttccgctgaccataccgatttgcctgggattcctgtttctcggcgcctcatacggcattctcatgggcaccaagggcttctcgtttgtatggccgatgtgcatgagcgcgttcatcttcgccggttcgatggaattcgtcacggtgaatctgctgctctccgcgttcaacccactcgccggctttctgctggccctgatggtcaacgcccgtcacctgttttatggactatccatgctcggcaaattcaaggggctcggctggaagcgtccgtacctgattttcggcatgtgcgacgagacctttgccatcaactccaccgcgaaaatccccgccggtatcgaccgaagctggttctacttctgggtcacgctgtgcaaccagctgtattgggtgaccggcgccacactgggcgggctgattggcgcgcatctgccgttcaataccgacggtcttgatttcgtactgaccgcgctgtttctggtgatcttcctcgatcagtggctcgccggcaagcatcgcgagagactgtccgccgtcatcggtgtgctgacgtcgctggcctgcctgctgatattcggggccaatgatttcatgattccctcaatgatcgccatgctgatactgttcgtcgcgttgcgcccgcatctggatgtgttgcggccggccgccgacgccccggaagccacggcagaccgtgccatgagccacgcagcggaccagcagaaggaaagacagacgcgatgacgatgaccatctggcaaggcgcgctcaccatcgtgacggtggtgctggggacgatgtgcacccgttttctgccgttcctggtatttcccgaatccaagcagccgccgcgcgtcatcgaatatttcagccgagtcctgccctatgcgatgaccggtctgctggtggtatacgcactgcgcaacaccccgattctgaccggttcacacggccttccggaactcatcgcctgcaccgtcatcgtgctgctgcacgtctggaaacgcagtatgctgctttcaatcgccggcggcacgatcgtatacatgctactggtgcagctggtgttctgaggttgggctcggcttctccttcgttgatctctccctccggtcgccttcggcgaccacctccctctgtgagggaggtgctgaacgcagcgaagcggaggtagagacccgcggtcgtaagactgcgaaacacacagcatcggccacaggccgattcctacagctgcttcgccacccaatcgacgatgtacggagcgacttcctcaatctggtcgatggcgacctcgaactcgtgcttgccgccgtaccacggatccaccaaatcaatctgatcctcgcggccgggcttcggcttgggcagattcgggtcgaagctgcggtacatgtgcacttcggcgcgcttgccggccggcagcatgcgcagcagggcgcgcatgtgggaggcggtcatcggcaggaacaggtcggtacggtcgatttcctcacgtgagatgcggtgtgcgaagtggtcacgcggaatctcatcaccatagccacgttcgcgtaacacgcgcacggcacgcgggtcgatcggatggctccactcctcgtcggacacaccgctggattccacgttcacctggtcgccgagaccgcgctcattaaagaagtgacgcagaataatctcgcccataggcgaacggcagatattgccggtgcagacggtcattacggtgtagggctgggtattgctcatagctttgaatcaatcctcaatcgggcttcaccgggccgcacacggcccgaatgtgtttttggggtcgaatgaatatgaatccggctcatgccgccataaaggacacaagccggattcgcatgcttacttggttttgaccaagatacggaaacgataggaatcgatgccggactcctccttggcgggcgtacgccactcacccacttcggcttcccgccacatcccggcctcgaccagcgacgccatatcgggcgcatagctgtcggcatccacagtgacggccagatcagtcacataggctttgtccgcgaacggcaacgcctcggcgaacagctgggcgccgccgatgatccaaatctccgaacgatccagaccgtcgtccggaatcgcctcctgacgggccatatcgagcgcgtcgtcaagactggtgaccacagtggcccccggcgcacggtacatcggatcgtgggaaacgacgatgttatcgcggttgggcagcggccggtacttgacccccagcgattcccaagtcttacgacccataatcaccggatgggagacggtcagctccttgagatgcttcatatcctcggcacagtgccaaggcatgccgccattgaggccgatggcaccggcgcgaccttccttgtcgcgggcttcggcccagataagattcaccgagaaggtcttgggataatcgtcaccccagtcttcttcagtggcagacagcccggcagatccgggctcgggttcgtgatagccgctacggctactgtcatgctccatttcgcttactcctcctggattgcggaactgggccttagtgtagtggacagcgaagactcgaggcccgtcaccttcacagtcttcgctgtccacgaaatggtaatcagcatcagaccgcaacaggtgccttaatagtggggtgatgctggtagccgacgaccttgaagtcctcatactggtagtcgaacagggaatcggccttacgaatctcgatggtcgggtacgggtagggcttgcggcccagctgctcaaggaactggtcgacgtggttgtcgtagacgtggcagtcgccgccggtccagacgaattcgcccggcttgagcccggtctgctgcgccatcatcatggtgagcagcgagtaggaagcaatgttgaacggcacgccgaggaacatgtcgcaggaacgctggtacagctggcagcttagcttgccgtcggccacgtagaactggaagagcgcgtggcagggcggcaacgccatcttctccacctcggccggattccacgcggagacgatcatgcggcgcgaatccggatgatgcttgatgaggtcgagcacattggagatctggtcgatggtgcgattcgggtcctcggggatcggtgcgggccaggaacgccactgcacgccatagaccgggcctaggtcgccgttctcgtccgcccactcatcccaaatatgcacgttgtgctccagcagccagttgatgttggaggaacccttcaaaaaccacagcagctcgtaggccaggcccttgaagaacacggtcttggtggtcagcagcgggaagtacttcgacaggtcgaagcgcatctgctggccgaacagggaaatcgtgccggtgccggtgcgatcggacttcagcgtgccttcggtcaggatcttgcgcaccaggtcctcatagggcatcggaatgtccgtttcgggacgtgcggggatacgggagcgaatatctgcgagttgttcttcggtcaaagccatgtgcaccagtgtagcttaggggcataatagagaagtccgatgatgcgggagagcggccaggtgccgcgctcccccgctggcatggcgatgggccagatcgccggcggctgaaaataaaggagcagctatgggtaagcgactgtgggttgaacgcaacaaggacggttcgtgggatgcgttcagcgacgatggcgcgcacattaagttcggcaaggatcgtggccagttcacgccgggcgatctgatgaaggtcgcgctggccggttgcgccgcgctgtccagccagttcgccatcgaacatacgctgggtgagggcaagggtgccaagatcgtggtggatggcacgtacgaccccgagaacgacgcctacaccggtttcgaggagcaggtggtgattgatgcttctgacgccagcctgtccgaagaggatgccaacaagctcaaggaacgcgtcacccgccatatcgacaagggctgcacggtcaagcacacctacgtacaggagaccccggtgcgcatgaacgtcaccgtcaagcactgacgtactaataaaccgacgtactaataaattgagctccctctgatgagggagctcattgtatacccggactttactgcctgtcgggatcgatggtcttttcgatctgctgggcgacttcaggctcggctgcggacaccggaatctcctcgacgccggcaatctcctccagcgacttggtaggcacttcggcgggcgagctcggcacggtgtcgagacgcgattccgcagcctcaacatacttgcgtggcaccacgtacaccgggccggccgcatgctgcagcagtccctggctggtggagcccagcagcagaccggtgaagccgccgcgaccacgggagccgacaacaacaacatcgtgatcgtagctggccttggtcagtgcgctgacggccgggccggaaacgatctgcttgttgattttcagatcaggatgcgattcctgcaacggcttgatacgcacctcaagatcgtccttgtaggactccatgatggcatcctcgccatccacgcccttcaggttcggcacagcggaaatcacgtccagttccgcaccccagcacgtggcgaagtcggcggcaatgtccagcgccttcagaccccacttggattcgtcggagcctacggccaccttggtaatcgtgttgttcaggtgcatcaggttgccgtcatcatcggtgtacggcaccactacaatcgggcagtaggcgtatgccggcagcgacgaggacgtggtgcccagcagacgctcggccagaccgcccttgccacggttaccaatgacgatcagattgtagttacgcgacaattcgacgaacaccgatgccgggtctccggtaacaatcagtgtggcggcttcgacgccctgctcgtctgcgatggccttggccttggccagaatctcctgagcatcggaatgcgcggcgttatcgtcccccatcgccgtgtaagttgcatcgaacgaaacggcggcatagctcggcagggaatatgcgcagacaatctgcagcgtcagccccgcgtgctttgcataattcgcggcccaccatgttgccttgtaactggcatgcgacccgtcaacgccgacgagaatggccttgtcgttaatcatgacgacctccttgaagttattgtggcacgaataccgcgtacctccaacaataccccgcgacactcggtttggccggtatcctccgctcaaaaagaaatccgcgtatacgaaaaaaggcacatcccaaaggacgtgccttaatacgaattcgcttaccgcataattcttgttacatcacgcggcgaatggaatatccagctccaccgaacacggaaacgttgcttattgccgttccctgcaccgggttcatagcattcatcacctgtccgttaccgatgtaaatggccgcatgagtaccattcgcaagaatgtcacccggcttggcatccgccaagcttgcgaccggagtacccacagtggcttgagcaccagaggttcgcggcagggaaatgccaaactgggagaagacgtactgtacaaaaccggagcaatcccatcctgccggagtgttgccgccggcaacatacggatagccttggaacttcagtgagaagctggcaagctcagcgccagtgccagtcattttacccaagtcaacctgtggaatcgacgcacgctgttcagagcggctggctgcagcagcagcggactgggctgccgcagcttcatcagcggctttctgagccgccgccgcagcagcagcctccttctcggcctgagactcggtctgtggcacatcaagagtctcgatgccaccccatttagagttctcgtcaaccgaagtggaggtggattcggcgaacagattcttcttcaccgaactcgccttcgggaaagaacgtgaggacaccatagcactcgtctgcgcggaatcggcagaggcaaacggggctacgcatgcaaacatggcacccgtggcgataaccgccactgatgtggaaataatattcttaacgttcgtcatcagcgccttaccttagcacacatgggtcgatttcataacaggaatgtcttttcgaagatgatgtcgcgggtgtatcactcggcaggagaacgcaacgggcctcggataccgattggcatccgaggcctgcaatatatcaatcaataagactgcgtcacgggatacgtaccacgatggtgagtttttcggtcatggcgctagcgagagccacgctgtagccgttccagccaccatggaccgcctgaccgttgccgacatacagcgccacatgatcgtagtgcgcgccgccattccatccaccggtgttggcataaatcagaatatcgcccggctgcagggacccgtctgtaactacgtggccaccgggaacattgacgtactcttcaggccaaccgtggaagttaataccacgggccgccaacgcttgactgaccaatgcggtgcagtccatgctctgtccgatcaaagaatacgcacggtcgatagaggcaccggcgccagcggaaaccgaaccactggcatcggaataagtaacagaagagcgagactcattacggctcgcggcgttggcctgcttctgggccgcctgagcctcggcctccgtctgcttcttggcctcctcttcggtagccttcttggccgctgcggcatccttttccgcctgagattccgtctgcggcacgtcgaggttctcaatgccgccccaatcagcattgtcctcaacattcgtggcagtggcttcagtcgtcagatctttgcgcacctgggtgtacgaggggaaggacttggtggaagtcacagtaacaccctcagctgcagtcgctgtaggaacaaacataaacgagcaagcacaggagacaatcgcggcaacaatggaagaagctacagttttggtcttcatagaaccatcaccttacacggtgcgcattaactcgtacaggatggaagaaataaaacaccccggagctattgggatatatcggcgtgtcggcacaggtcagttcggactaatacgcggtcgcaacacttgaaatgtcatttcgcgcgaacgattgccgatagggcgacgtcacatccgaacagtaatcaccgaatgtaagccaatgaaatgaatcagtagtggacgtactggaacttaccggcttcggcggcgctgaacgtacgggtcgaaatcacacccaatcccttggcattggattcggagatctcaatggagccgtcggcattgatcttctccagaacggcaacatggccgtatgtgccatcggcattggcctggccaggagcgaacaccacagcatcaccgacatggcgaggagtgttgtccacccaatagcccagagcggaagctgacgccgcccactcgccaccattgccgaagttgccgctggaaggcagtcccagttcggcacgacgctggtacgcgtaccacgtgcactgaccccacggatagttgttggagttggtgccaacggcatggttcgggttgaagccagccggcacagcatcgccatcggcatccatgagagccgacaccacaggattgttcgcattattgcgattcatcagcttggcgtccaaggtgctgtctgaattgctcagcccccaaccgccttcattggtggactgtgcggtaacggaggacgaactcagatcagtacgtgcttcggaacgagaagccgcagtcacatcgctgatgcgcttaatctgcgtggtcgtcgtggccggatcagccacgaacgagttcgtggcgtctttattgttggaaaatgcgagagcacctgcggccgtgccgaccagagcggccagtgaggccgaggcaagaatatggctacggcgttcagcggcacgagcggcctcacgaatggaacgacgagtctggggagcgatttcattgatcttctcggcaatgaccggatcaagccccaaaacaacggcgtcgctgccagcggattgcaccgcgcgcacggcacgaacggaatgagaacccttgccggaggcaaacaatgccttcgctaagctgaacttctggcgcgagaccgtggtcgctttatgcgaagcatgcttcatactacgttaactccttggatgggttcggcggggtcctttcaacgaccccgtatgaccggcacaattgagtactgtacaacgaacagaggtcaatcctcaatgcgatcccccaccatccgggcatgtcaaacgatttacgtaaccgtgcggcagggtgaaaaactgccttgtttccgcccgttcacgaacctcactatccggttatcggaagaatcactaactcatgtcattccgacacaccgtagccatgatgtgctgcgtacattctgcactgcattccgcattgccgctactaccgcccggcaccccggaattccgcagtagccccgcagcaatcccgcacaccgagcattatccgcgatattccccaacactggtctacccttgaaaccatgactatcacactgagtattcccgagtcgctgaagcccgaagatggtcgcttcggctccggtcccagcaaaatccgccccgaacagatcgccgcgctcgatgccggcgccaccaccctgcttggcacatcacatcgccaggcaccagtcaagcaactggtcgcttcgattcgtgaaggtctgcgcgagttcttccacctgcctgaagggtatgaggtggcgcttggcaacggtggcgccagcgcgttctgggagattgcctgcgcttcgctgatcacccgtcgcgccgcattcggcacgtatggctcattcagtgccaagttcgccgcgtccgccgcgaacgcacccttccttgaagacccggtgctgttccccggcgagccgggcacttaccgtctgcctgagctcaccaagggcgtggacacatattgctgggctcacaacgagacctccactggcgtggccgccccgattcgccgcgtgcccggcagtcgtgaagccggtgccctgaccgtcatcgacggcaccagcgcagccggcgctttgcccgtggacatcagccagaccgacatctactacttctcaccgcagaaggccttcggtgccgatggcggtctgtgggtcgccatcctctcccccgaagccatcgatcgtgcggcatgcgtcgaatcaagcgctcatctggaaggcgcacatcgctgggtgccgccgttcctctcgctgaccacggcactgaacaactcccgcaaggatcagaccctgaatacgcccgccgtggccaccctgatcatgatggaaaaccagattcgctggctcaacagcaacggcggcctcgcctgggccaccacgcgttgcgccaagtccgcatccatcctgtactcgtgggccgagcgctccgaatacgccgctccgttcgtcgtcgatgcggacgcccgctcgaacgccgtggtcaccattgatctggacgagcgcgtccaggcctcccagatactgtccatcctgcgagagaacggcatcgtggacgccgccggctaccgcaagctgggccgcaaccagctgcgcgttggcgtgttcccctcggtggaaccggctgatgtcatggccttcaccaagtgcgtcgactatgtggtcgagcacctgtgatggcggtctatgcctcgcatggccgaccatatatgccatgcacattgatcggtctcaactgataccgattgaataaatcgtagggagaggtgtttgacgcccctccctactcttactacagtgcatgagtatgaagttcgcgcctctcattgaccctgccgtccgcaaacccgcgcccaagcccgtacgggtggacctgcgtaaggtgtttgccatcggtaccggtctatggattgtggcgttgattgtcgtgctgattctgctggccgtgggctacagcgtaatgccgttggtgattatgtgcgtggccggtgtcattattggcttgctactgctgatttgggaatacttcgaccgctgggactaccgccgcctcggacagtaataaagttcactgcgccaacggcaacgtcaggctgaacgtactgccttgcccgggcgcgctccatacggtcacatcgccatgatgggttagcgccacatgcttgacgatggccaagccaaggcccacgccatccgccgtgcgattgctctgttccgcaccccggtagaaccgctcgaagatgcgcgcctggtccttcttcgcgatgcccgcgccctggtcgatcacgcgaatcaccgcacggtcgccatccttgtctttggatgccgacacactgaccacaccattttccttggaatagccgatggcgttttcgatgagcttggtcacggcgctgtcgatctgatccgcctcaccattgatgactagatcatcgtcgcccttgatgttcagctgcacgccagccgcggccgcctgcggctccagtcgcgccaccgtggcctcgagctgttccataacgttcagtcggttggcggaagacggcgtaatcggctcctgtgcgcgtatgagcagcagcaaatcggacaccatatggttgagcttgctgcagctggaacgcacctggcgagcatcggcagccacctgctgttcgtccagattgccggactccagcgaatcggcgagtttggccagagcttcagtggggcccaacaattgctcggatacattggtaataaacgagtcacgcacttgagcgaaacgaatcacgtcactgacatcggtaatcaacacgatgacgaactgctcgttgatacgccctacagtcaccttcagccagttggggcggtggacggactgcgtggcgacgtgatcgcccttgttctggtctgcgacgtaccgctccggagtatcggtggtcaagtcgaactggcgcttgccaccggacttgcgcgcctcgtgaatggcatccagcacctgctgctgggcgatggcgtcatctgacaccacacccaggcggtaggcggcgggattgcagcggaccacctcgtcgtgctcgtcgaccaccacggacgcacccggcagcatggacagcagcgtggcggtgtcgtcggacagatcgtcattgtcgtcatcatcggccagcggcgattccacagacactcgatgtgtcgcaaatcccacgatgagcgtgatgattcccaccacaaataaaacagccgcgacaataagagcaatcgcggcgacgagcggcatctgtgtcatgcccccattctttcacaccacacgccgggattgcggtttgccggcgcgccggtaacatgaatttcaggtgaacaacccaatgaacagtagaacaacttgaggttgccattacctacgttgaagtggggaacaagtactggaataatacactggtacaggttgcaataagcaagcatgaaaggctagagaaatgcgcgttattttcaacgaggagctgaagcaggttgctgacgacctcgaccgtatggcgcagaacgtgcgcaaggcgatcaaaggcgctggggaagccctgctgaatcaggacgttgaagccgcacagactgtgattgacggcgacatcgagattgatgccctggagtcctctgtgatcgaccagtgcgtcaagctgctcgccaagcagaacccggtggccaccgatctgcgtgtggtcgtttccaccatgcgtctggcttccacgttcgagcgtatgggcgatcttgcccgccacgtggccgaggccgctcgccgcacctacccggccgccgcgattcccgaatccgctcagccggtgttcgccgagatgatcgacttcctggacaacaccgctgaccagctggtggccatgctctccgatcgcgatgccaagaccgccgaggccatcatcctggccgacgacaagctggacaacctgcaccaccagaccttcgatctggcgctgtccgatgacatcacccgtcagcagaccgtggatatcgtgctgctgggccgcttcttggagcgtctcggcgatcatgccgtgtccgccgcccgccgtgtggtgtacatcgtctccggcttcgaccccaccaaggagccgacccgcgacgagggcaccgacatcgactgattggggcttgtcctcacattgggcgaataactgaacacttgtcctcctatggtttgaggaggatgcccgaaagcggcgatccggctacggctggacgccgtttttttgttgcttctgggcggtacaccggcgtatccatggggcggcaaaacacccatagggcggtaacttgcccatggggcggtttgaaagatatgtgaaaccgcggaattaagccattctggcataccgccccatgagagttttaccgccccatgagagttttaccgccccatgagggttttaccgccccatggggtaatcaccgccccatggggatttggcaggcatagcaaaggggagccacacattatgtgcgactccccttacagcttgtaccgtgttagcggcttaggctcacttctggccttgagcggcgacagcggcggcaccggcagcagcagcctccgggtccaggtactcgccacgcggcttgatcggcttgaagttctcgtccagctcataaagcagcgggatggcggtcgggatgttgaccttggcgatctcttcctcagacaggttgtccagcatcttgacgatggcgcggagggagttgccgtgagcggcaatcagcacggttttgccggccttgagctccggctcgatggcggactcgaagtacggcttcacacgctcaacaacgttggccaggcactcggcttccggaaccggatcgccggcgtagcgcgggtcgttgttctgggcgtactggtcgttcgggtcgatctcgggcggcggggtggcgtaagaacggcgccacagcatgaacttctcgtcgccgtactcttcgcggatctcggtcttgttcttgccctgcagagcgccgtagtgacgctcgttgagacgccagtcacgctgaaccggaatccacagacgatctgcggcatccagagcgatgttggcggtgttgatggcgcgacgcagcagggaggtgaacacgatgtccggaaggacgttcttctccttgagcagctcgccgccgcgcttggcttcggcttcaccctgctcggtcagcggtacgtcgacccagccggtgaactggttggttttattccatgcgctctgtccatgacggagcagtactagtttataagtcatacggttcagtctacagccgcgtgcgcccaaacacgagtattcgtcttattatttcgctctcatagcgccacggcaaccgccagcaccaccgcaaacagcaaggtctggaagctggcggcgggcagagccgggcggaattgacgtttattcacgctggagaccatgcgcacaggtattccggtgcccgagagcaacagcaccgcaccccacggccaccataatgtaccgcacatcagcagggcgatgatccatgcgatgacgcagcacacaatcagcaacgtacgcgcgccggactcccccagccgtacggccagcgtgtgtttgccatgctcacgatcctcgtcgatgtcacggatattgttcaccatcatgatcaggcaggagaacaggccagccgccacagcacccaatagtccgccgacgtccaccgtgccgcacagcgcgtattcggtgcccaataccgcagccaagccgaagaacaggaacacgccgacttctcccagcccgacatatccatacggatgcttgccaccggtgtagaaccagccggccagcaaggaggccgcgcccacggccagcaaccaccatgcttgggcgagcacgaccgccacaacaccgcatatgcaggcgatggcggcgcaaatcatcgccgcgaacagtacatgcttggctggtaccagtccggatgcggtcagtcgctggggtttgcctgatttcgattcgtccgtgtcacgcccggcgtcagtgccgcggatgccgtcggaatagtcgttcgcatagttgacggcgatttgcaggaacagcgcgactagcaggcacaggatggtcaccggccagaatcggtccatcagcagggtctgctgttcacgggccgtggcgcaggaggccggttctggatatattgcgatgcaggtgcccgaccgctcgatatgcacgtacgccatcaccgccccaaccatcaccgacgcgatggaagtgaccaaggtcttgggacgcgcgccccgaacccacaagccgatagacataagcaatccctttcatatataactctggctcccctctctgaggggagccagagtatgcctaatcagccaacgagcggcttgaccagcgggaaggtgatggtctcgcgaatcgtggcaccggtcaaggcgataagcagtcgatcaatgcccatacccataccgccggccggaggcatgcccacgccgagagcctcgaggaagtcctcatcgatgtcgcaggcctcttcgtcgccggcgagtgcatccttggcctgggccacgaaacgctcacgctgcacgatcgggtcgttgagctcggagtagccggtagccagctcgaagccgcgcacgtagagatcccacttctccaccacgccgggcttggtgcggtggcccttgaccagcggggaggtttcgaccgggaagtcacgcacgaaggtgggctcgtaaagcttgtcctcgtagaagtgctcccacaggtgttcgacgagcttgccgtggttctccacgtcgtcgcgctccacgccgagcttgtcggcgatggcgcccaaatgctcaacggaggtgccgggatgctcagggccgccgttcggcacgatttcctcgcccaatgcctcggacagcgaatcgtacatgctgatggtcttccattcgccgccgaagtcgtattcggtgccgtcgagcagggtgaccttgtgcgagccgtagacgtccatggcggtcttctgcacgagctccttgaccagctggccgatggaatcataggtgccataggcctggtaggcctcgaccatggtgaattcgggggcgtgcgtggcgtcgacgccctcattgcggaagtcgcggttgatttcgaacacgcgatcgatgccgccgaccaggcagcgcttgaggaacagttccggggcgatgcgaaggtacaggtcaaggtcgaaggcgttcatgtgcgtggtgaacgggcgggcggccgcgccaccgtgcagggtctgcagcatcggggtttcgacctcgaggaagtcgtggtcgtcaaaggtgcggcgcagggaggccacggccttggagcggttgcgcaccatgttgcggatgttctcgtccgcgatcatgccgatgtacggcttgcgggtgcgggtgtcttcgttcaggtccttgtgcagggccggcagcggctgcagggccttggaggcgatagcccactcagtggcgaatacggacagctcgccggtcttggaggcgatgacgcggcccttgaggtacaggtgatcgccaaggtcgacgagctgcttgaactgcttgagcgagtcggcgccaatctccttcttggagatcatgccctgaatcttggtaccgtcaccggcggacagctgcacgaagcacaggccgcccgcgttgcgcaggaacagcacgcggccagcaatgccgaccatgtcttcggtctcttcgccagcctcgagcttgccgtcatacttggcgcggaccgcctcgatggtgtcggtgacgtccaagtgcaccgggtagggggcgatgccggcctcaagcatcatcgcgcgcttggccacgcgcatctgcacctgctcggggtgagccagcgggccgaactccttgttggaggggtccacggcttcgtccagcgtggcaccggacttgatcttctcgcggatggtggcgtcctgctcgagcagcatttccgcacgttcgacggtgctcatctgcgggacggccggggtttcattctcagtgttttcggtattttcgacaacttcagccatgattcatcagtgtacgcaaggccggcgattatgagcccggcagaccgtacggccatctgaacacccgctcacatgacgcaaaaccggctctgcacaaggcttgagagacctgtacacacggcgaatccaccatcacgcaacactcgcgacatgccgatttgcattgtccaccaccacaatgtaatatctacgtctgttgccaaacgggctgtagcgcagcttggtagcgcgcttcgttcgggacgaagaggccgcgggttcaaatcccgccagcccgacaactggaccggattgttgagaaatcagcaatccggtttttcgtttcctaacccaacaatcagaccaagcgatcggacagcggtaaacaacccgccgcgcacagcgacaaaccgcgtcgcggcaaggcccgtatttgttggcggaccaccgtaatatatcgctcgaatcaatcgattgccgcactgtttttgtaagtaatactgaagtaattagaggaaccatgaagaagagtctgcttgcactggcttcgggcgcgttcattctcggtgccgccgagttcgtgatgatgggtattctgccgcaggccgcggccgccaccggcgtggacatccccaccgcaggccattacatttccgcgtatgcgatcggcgtgtgcttcggcacactgattctggtgttcggccgcaaggtgccgccgaagaacctcatcatattgtttatggcgattgc

SEQ ID NO: 394 - DNA, 6224 bp, Unknown
  R48_24m  MAG No. k141_597
gacttgccggaccccaggaacaatccggtgccgatggtgccgccgatggcgatgaactgcacgtggcggttgttcaggccgcgctccatctcgttggtccggtccaggctttcgacagacttgagtttgcccgtagcctgccgtgtaccaccattcacattcgtatcggccatactgatttcatttctcttctccgccgcccgattgttacgtaccggacgcgatactcgttcaaaacaagttcagactgtatcaccgaaatatgtcgcgaaaaccgctcagctcaagaatacatgcgatgatgctgtaaatattccgccaaaaagttcaattcaccaacacctaattgaacttctacctctattccacggacttgagcgagctgaccgggtctacgcgatcgagcactgggttggtgaacagctgcaccagcagcgcgaacgccagcgtcgccaccacggcaatcgcatagctgtaccagtgcacttccacttcgaaatacagcgacggcatattcaacgcagcagtcagtaatccgcctatccacctgccaagcggcagaccaaccaccacacccataccggtcaatatcatcatctcgcggttcacgtagttgtgcacctcgcggtcatagaagcccagcaccttcagtgtggccatctcgcggatgcgttcggacacgttcgtattggccaacgtaaacagcaccaccagcgccaggccgccggcgagccccacaatcagcgccaccacggcacccatcaaatcgaacttaaacgtggcggccagatgcgcacagctcacggccttgagcaccgacgattcctcgcccaaccgatccgcatattcggcctgttcggtctcggaacctttcagcttggcgagcatcgcgttccacgtcaaggtcgaggcagtgccatctcccgaagccgaagacgtcacaccgccggccgcaaacttctggtcgtacagtcgctcactgatgtacacatcagagccaataagattgcgcgtcacggccgtgacctgcaccttggcccggctgctaccgccattgcccagcgtgacggtgtcgccggcatgaatattcagcgagttggcggcggactgcgatacaatcacgccactatcgtccagcgctacagtgccgccacccgctttgccgaagatattgggcagcccaaaccatccatcatcgccagcttgttccagcgtgaccatatcgttcaagatattcagcgaatcgttgggcacggtcatcagctgcacggtttcgctttcctgcgccgcattgctcatctcgccactatccacgcgcagattcagcgtttcggtggtttggccatcttgtgccacctgcttgcgcatcgcggtggcgtcatcgtcattggccacgaccatcaggtcgtactggtagatctgctcgtattgtttgacgccaatcgtgtcgacggtgtcattaatcgcaaatccgcagataatcaacgctgtgcaaccggccacgccgcccacggtcataatcaagcgcgacttgaatcggaagatattgcgcgcggtgactttgccgaggaagttcagccggctccataccgggcgaatccgctccagcaatatgcgagcgcccgctttcggtgccttcggccgcatcagcgcggcgggcgtgtgccgtatctcctcgcgacaggcgagcgcggtggccacgcccacgccgaccacgaacagcacgatgccggccgaaccgtacagccagtcgtattcgagtcgcacaccgggcaatatatacagtccctcaatcaccaccagcaggaatgccgggatgccaaggaatccgaccagcagaccgatgccgccgccgaccaggcaggcgagcaacgcgaacagcagataccggctggacacggcgagtccgccatagccgagtccaaggtaggtgccgataagtccgcggtcttcctcgaccatgcgggtcatggtggtcaggctcatgagcacggcgaccagcaggaacacaatcgggaatgcgcggccgatggattcgatggaactgacgtctgatttgagcgagctgaatccgtcgatcgaagcgcgcgtctgcacataccaacgtgcgttggccacatcgtcgatgcgccgttgctgcttggcgaattcgctttccgcttcgcttcgcttcgcatcgagttcagactgcgcatcatccagtttcgccttgccgtccgcgagctgttgttcgccttcttccagctgccgctcgccttcttcgagctgctgcttgccgctggccagttgggcggcctgcgcttcaagttgcgccgactgggtttcgagggttgcggcattcgcttcgagttccgcggatttggtattgagctgtgcctctcctgcagccgcttcctgttccttggcggtcagttgcgcgttctgctggtccaaggtggattgtgcgggggcaatggtttcgtttaatgtgcgctgcaaatcggctttctgctgggtcagactgtctcgctgcgtttgcagttccgtttgcttggcggccagctgttgccgcagctcactgattgacggcacttcaggcagggtaatgccaaggcgcgcgagcagttgcttgatggcctgccatgtgggtgagttgaagtcgatattcgggtcaagttgcgccagtagattgtcggcctgttgaatcatggacagcatctgatcaatttgtgccacgccttggtcgatttgggtaatgccctgttcgattttcgtgcgattggcagtcagttccgtttgcgccgcatcgagctgtttgcgagccgaggtgagctgcgctttgcccgattcgagctgggtgcgcgcttcggctatctgctggcgaccttgcgcgatctgttgacgggccgatgcaatctgcgcacgtccatcggcgagctgccgttcgccatcggtaatggttgtcctgttgttctccaattcggtacggctatcttgcaatgtcgttttgttggcttccagctcggcccagttgtcgtcgatctgcttctgggcttcgtccagctgctcgttggcctcgtctttggcatcatccagtttgcgctgcgcgctggagacgatctgttgacgacgggctttctggcgtgtggcctgtatctgatgttcgatacggtcggccacggttttgatggcttcatcgtaggcatcggaaaacgtgtcaaaatcggacgcaccagtgacggcaaccgatatcgcagtgtatatattgccggtcacgccgtcgctgggtgcaaagaacgtatagtcctcggatgaggtggaccggaaggaggtcatgcccgaatagccgtctggattgttgaggtcgcgcgggtcgagtacgacgccggtgatggtgagtttcgtggggaactgcggggattgctcggcgtcggcgtccgtattggcgtcggacttcgcatcggatgtcgaggcattggcggcgacacctaccgtatcggcattattggaatcgtcagtctccgtggccgctaccgatatgacggatgaagaggtgtcttgtggcgtcacagtaatggtgccgccaatcttgagtccgctatcgttcaggaattgctgcgtaaccgccacttcgccggccttgttcggcagtttgccctgccgtatgtacggctgatcaagcccttcggtaccgatttcctgcatggtcacggttttcttggtgccgtccaccaacgtggtcaccgtctgagaacgttcgggctgcacggtttgcacaccgtcgattcggcgcagtgccgttgcatcatcatcggtcaggccgtatgtggatagcacctgcaggtcatgcagtccctgctgatcgtaaaaacgaccggccgccagaaaagcatcgcggcatccggcgtagatgccggtcagcacggccacgccaagcagcgtgatgacggcgatcgagacgaacctcttccagctgcgcagccagcaacgcaacgtatctttggcaaataccgcagaaacgcccgctcctcgaccgccgctatcgtcgaggttccgccgcttcacagaatgtttcacaggttgtttcacgaatcgcctcgcttgtttcacggggcgtttcacagagtgtcttgcagtgagcatcgccaatcacctaccattcgatatcggcgatgggccgcggcgttgcgttgacctcctcgctggtcaccttgccggagcggaagcgaatcactttgtgagccatcggtgcaagcgcggaattatgcgtgatgatcattacggtcatgccttgtgtttggcaaatatcctgcagcaactgcagcacttccttgccggtctcgtaatcgagcgcaccggtcggctcatcgcacaacaacagcttcggctttttggcaatcgcgcgggcgatggatacacgctgttgttcgccgccggacagttgcgcggggaagttgtccatcctctcccccagtccgactttgcgcagcgtttcctctggatcgaaatggtcagggcagatttgcgaggcgagctccacgttttcgagcgcggtaaggttaggcaccagattgtagaactggaagacgaagccgatatcgttgcgccggtaggtcaccagttcctttttccgcagacccgtaatatcgcgtccgccgaccactacgcggccggttgtggcggtatccatgccgcccagaatgttcaatgccgtggttttgccggcaccggactgccccagaatcacgcttaattcgccttgttcggcggtgaagctggcctcgtcgagcgcgcgaatcacactgctgccagaaggatattccttgaccacatggtcgaattcgatatacgccatcgcacacctccaacgcgctcgtggcagccacctagccccatgggccccgccagaacttcctgctatactcaagtaaaacaacactgtgtcggttctgcaaccaacagttggattgtgggttgtcggaacttggggagaaggccatggccaaagaattgacggaaagccgccgcacccgctacacgagacgtgccatgcaggacgcgcttatcgagttgctgcgcgatcagccgctcggctccatcaccgttaaagcgttgtgcgagcgggccgatgtgaatcgttccacgttttacgcgcattatgcgagcatcgaggaactgctacacgacattgaagacgaaaccatggcctgggtcaccaccgcactcgaacagctactcgcccagccagatcctgccggcatcgagcatgttattgagcgcatctgccagtacattgccgacaatcgcaatcatctccaagtgctgatgagcccgaaagcggatatcggtttccagcagcagctgctgggattgatttacagccagcgcggtgtaggcgaacagttgcaatcttcggcgggttacccagccgaggcgcagatgcgtatgcgattcgccgtgtccggcagcattgggcttttgcaatattggctcgccaacgatctcgcggcctctcccgaatcggtgtcccacaccatcttcaccatgtgtatgcctgccacgcagtgagcacagtgaactcagtgaactcagtgaagcgtgcggtttcataagcatcgctcgctatagcttcgcctgctcaccggccgcgcccacgcccgcgcttgcaatagcgcacaaatagacgattgaccatttctgagacgatacggcggcatagaataacgaacgttgcgcatcacggcaagccccgcgtgcgccaaacccaagaaatgtgagagaagagcacaatgagtactactgatgcgcctaagaagccgcgcgaaaccgacgacgtgccggtgccggccacgctgcgcaagtcattgaaaaaccgccacatccagctgattgcgctgggcggcgccatcggaaccggcctgttctatggttccagtgaatccatcgcgctggccggaccctcgattctgctcgcctacttggttggcggcctcgcgattttcgcgattgtgcgtgcactgtctgaaatgtccgttgaggatccgaaggcgggcgcgttcagctactatgccacccgctactggtccaagcgcgccggctttatttccggctggaactactggttcaactacatcctcgtctcgatggtggagctatcagtggtgggttcgtttgtgaactactggttcccggcgattccgacatgggtgtcggcggccgtgttcttggtgatcatctgcgccgcc

SEQ ID NO: 395 - DNA, 25214 bp, Unknown
  R48_24m  MAG No. k141_1157
gattgaaatgcgacgatgaccccagcgatggcataccaagggcgtcgcaccccacaggggtgcgtggattgaaatgccgtcggttttttcgtccaattccgggttttcaagtcgcaccccactggggtgcgtggattgaaataacgacgcgatcatgaaactcggcttccaggacgcgtcgcaccccactggggtgcgtggattgaaatataaaaaatatggcgcaacatgaatatgcatgtcgtcgcaccccactggggtgcgtggattgaaataacgacgagattcccacggatgctgatttcgagaaggtcgcaccccactggggtgcgtggattgaaatatgttgtggccgggccagccgtagttaatgacggtcgcaccccactggggtgcgtggattgaaatcgcaagtggaagattgacgtggactcgctgtatcgtcgcaccccactggggtgcgtggattgaaattgctcgcccgaggtcaagagtgcgctcgacgtggtcgcaccccactggggtgcgtggattgaaattcaccgtgctcaaacaggatgcgttcaacgcctgtgtcgcaccccactggggtgcgtggattgaaataagctgccgccgatgataccggccatgccattgaggtcgcaccccactggggtgcgtggattgaaataagaacagattcgtaggacactgcgaaaaacaaatagggtgctttccgccatcaacagcggaaagcaccctattcttatggtattcttatgatctctctgtcctaattagagcacctcactccgcagcaatcgcggccttgagctcctcgaccttgtcggtcttctcccacgggaactcaacgtccgtgcggccgaagtgaccatacgcggcggtcttcagataaatcggacgtttcagatccagctcgtcgataatcgcagcggggcgcagatcgaagaccttgcgcacggcggcggcgatctggccgcgcgtcacgccttgctcggtgccgaaggtctccacgttgacggacaccgggtcggcaacgccaatagcgtaggcgatctggatctcgactttgtgagccaagccggcagctacgatgttcttcgcaacccaacgggtggcgtacgcggcggaacgatcgaccttggacgggtccttgccggagaacgcgccaccgccgtggtgggcggcgccaccgtaggtgtcgacgatgatcttgcggccggtcagaccggcgtcggccgccgggccgcccaggatgaacgaaccggtcgggttgaccagctggcggtagttgtcatgcggcaccttggaacccagcacctcatcaagcaccgggtcaatcacgtgcttcttcagctcaacagcaagccaatcctgcgtaacctcaggatcatgctgggtggagatcagcacggtgtccagacgaacgggcttatcgttatcgtcatactcaatggttacctgggtcttgccgtccgggcgcaggtgcggcacttcaccggacttgcggacctcggtcagacggaaggcgaggcgatgtgccaaatagatcggaagcggcatcagcgtcggagtctcgtcggtggcgtagccgaacatcacgccctgatcgccggcaccctgtgcttcgtaacgttcttcgcggctggcggcggtctcctgatcgccagtcagacgggcaacgccctggttgatttcggcgctttgctcggtgatggccaccacaacgccgcaggaatcggcgtcaaggccgacttcggaggaggtgtagccgatgttgcgcagggtttcgcggaccttggactgcacgtcgcagtaccccttggacgtgacttcgccgaagaccaggaacacgccggtggcggcggaggtctccacggccacatggctggacggatcctgggccagcagatcatcaagaatggcgtcggagatttgatcgcagaccttgtcagggtggccttcggtcacggattcggcggagataagccgatgttcttctgtcatatcatccctttcttcaggacttatcgccccgcggggtgcgaggcacaatgatacggtgtcaatttttacttgtcactgcggaagcgggcataaataaaggcccgtgccaaccagcgcggtggctcgagccttacgtcttgttcgctcctgatgatgagttatagctgattgcgataactcaggcaagcgtgtcgctcaaaatcagttgtgagagaactctcacaccatcattcggcgacgaactgtccaaacaatccaaacgaatcgtctgaatcgatcagttgccctcgttggcgtcgtcctcgcccaaggtctcctcaagcagaccctcgtcgatctcgcggaaggcgatggacagaggcttctcgttgttctggtattcgaccagtgggccgacgttctgcagcaggccctcgttgagctgcgtgaagtaggagttgatctggcgtgcgcgcttagcggcgaaaatggccagcgcgtacttggaatcggcgtgcttcatcagatcgtcgatcggcgggttcgcaagaccgtcgggtgtcgggtcagtaccaaaagccattgttcttatctccaaacattggaaaatctatctcaaccgaagcaagtgtagccgtttggggggacttctgtcagccctataccggactctcgccagaggaatgtattccaaaaaaatgtgtgagaaacattacgtttttgcaaattccattattcgactcttgacaaatggcgtgtccctcgcaaaggcttgaatagaaccatgactgaaatgcgatctgcaaaaattatgtcagggcgcgtctttgcaggcgcccgagccctctaccgtgctgcgggcgtcagcggagacgacatgggcaagaagcccatcatcgccatcgccaactcgttcgatgagttcctgcccggccatgtccacctcaacaaggtcggccgcatcgtttccgaggctatcaaggaagccggcggcattccgcgcgagttcaacacgatggccgtggatgacggcatcgccatggggcacactggcatgctctactccctgccttcccgcgacatcatcgccgacaccgtcgaatatcagtgcaacgcgcactgcgccgacgccctcatctgcatcccgaactgcgacaaggtcgtgccgggcatgctgatggcagccctgcgcctcaacattccgaccgtgttcgtctccggtggcccgatggaggccggcaccacggtgctcgccgacggcacagtcaagagcaccgaccttatcgacgtgatgtacgccaccgctgacgacagcgtctccgatgaggaactgctcaactatgagaagaccgtctgcccgacctgcggctcctgcgccggcatgttcaccgccaactcgatgaactgcctgaccgaggccatcggcctggctctgcccggcaacggcaccatcctcgcctcccactcctaccgcaaggacctgttcaagcgtgccgccaagcaagtcgtcaagatcgctcaccagtactacgacgattccgacgattccgtgctgccgcgctccatcgccaccaaggaagccttcgagaacgccatgaccatggatgtggccatgggcggttccaccaacaccgtgctgcacatcctcgccatggcccagtccgccgacgtggacttcaccctggacgacatcgagcgtatttcccacaccgtgccgtgcatctgcaaggcctcgccgtccggcaagtgggagatttccgacgtgcatcgcgccggcggcatcaccggcatcctcggcgagctcgaccgcgccggcaagctgcacaccaacgtgcattccatcgactacccgacgctggaagccaagctggccgattgggacatcatgcgcccgacctgcaccgaggaagcccagcagatgtacaaggccgctcctggccacatcatctccccggagccgtggacgcacaccaccctgttcgactcgctcgaccgcgaccgcaccaacggcgccatccacgacatcaaccacccggagattcacgaaggcggcctcgccgtgctgcgcggcaacctggcccccgacggctgcgtggtcaagaccgccggtgttccgccggagatctggaagttccgtggaccggctctggtggtcgactcccaggagcaggccatcgaggtcattctgaacgacaccctgaagcctggcatggcgcttgtgattcgttacgagggtccgaagggcggcccgggtatgcaggaaatgctgtacccgacctccttcgtcaagggcaagggcatcggcaaacaggtcgccatgctcaccgacggtcgctactccggcggttcctccggtctggccatcggccacatggcgcctgaggctgccaacaagggcccggtggcgctcatcaagaacggcgacatcatcgatatcgatatcgaagcccgttccgtgaacgtcgaactgactgacgagcagctggacgagcgtcgtcgcgagcttgaggctggcgacggctacgtggctcaccgcaaccgccacgtctcccaggcgctgaaggcgtacgccgccttcgcccgctcggccgacaagggtgcgacgcgtgacccggagctgatcaacaagctctccggtctcaactgatcgccgattgcatagctgaaaggcccggcatcttctttatgaagatgccgggcctttactgtgcttccgaaggcgggagcgatattgcttgttatcgcacgcaggcggcgggggagaggcgtgcgcctcgggcccagtcggcggcgcgcatggccttcttgccttgcgccttgacttgggtgagttccagcggcgtgctgccggtaccaacccacacgttcttcttgcccaccttcagctcgccgggctgaaggtcggccggagtgttgggattggactggtcggccggttgtgcggcgagaatatgcagggcgagggatttagcggttgactcgtcattatcggcgattggcccttccgcaaacagttcggtccatgccccgggatgtggcgtgcaggcgcgaatctgacggtcgatggcctcggcctcgtccgtccaactgatgcgggcgtccttcaccgtgatcttgtgcgcgtattccaggctctcggccggctgcgcggtgaatgtggcggtgccttcacctacggcggccagcgcatccacatacatgggcgcgccttcctcggccagacggtcaagcagttcgccggaagtctcacggccggtcagttcgatggtcagggaagcgacgatcgggccatcatccaaaccctcgcccaccttgaacacgtcggcgccggtggtcgggtcgcccgcccaaatcgcacgctgggcgggagcggcgccacgccacttcggcaggttggagaaatgcaggttgtaccagcccatgggcaccgcatcaagcacgttcttgggcaggatattgccataggcgatgacagcggcgatatccgcatgcaggtcgttcaacgcctccatgaattcgggggagcggggtttgagatcgatgacgggcaacccgagctccagagccgtcgccttgaccgggctgggcgtgagcttgcggccgcgaccggtaggcgcatcggggcgggtaatgacgccgaccacatcaaaacgtggatcggtggcaaaggccttgagcgagggcaccgccacgtcgggggtgccggcgaacacgagtttgagcatggtcctccttgaaatgtcgatgctcactgcacggccggaatgttcacgccattggcgatgagcagttcacgcagcttgaccggatcctggaaacgtacgccacggatgccggccgcattcgagccgacgatgttcatggccttgtcgtcgatgaacaacgcgccatcggccttgatgccgaactggtccaacgcggcctcgtagatttccttgtgcggcttgcgcagcttgacaaaaccggagacgagcttgccatcaagctgctgcaaaatatcgcactgttcctcggccacgtggaacagactggattcgcagttgctcaggccccacacgccgatgccggcagccttcaggtcattgaccagcacgcgcgcgcccggcacgatgccggtcagggagtcgcggaagttcttgatgtagtagtcgaggatgtccgcccacttatcgcccttgtcacggcgcatgatggcgatggcctcgtcggtgctggtgccgccgtccatcaggtcgttgacatcgtagaagccggagatgtcgttgtcgaggaattcgtcgatggtcttctggctgtagcgggggatgagtacggcgaccggatcccagtaaatcagcacgttgccgaaatcgaagatcacgtcggtgatcggcttgccggcgttcgcagcggcctcgccatccgcgaccagcacgtcgtaatccatatccggctctccaggccaacccttcatagtgtcctccttctagcgatgttcattctgtaattatcgtttcacgtgttgaagacgattagatcaggtccttgggatctactcggaagcgaagctcgccgggttcgcgggacgccacatgacgagcggtttcccggtgcagtcgggccgccagctcggctcgccgactctgcggcacacggattactgccttcacccggtcggccgtggcttcgagctcccgggcgtcgaccgtgtccggttgcgcgatcggcaccgggcccaacatgccgggcagctcgccgcaggccgtccaatcgccgcccagcgcgccgatacgctgcatcagcgtcatcaccgcatcacggcgtccccatacgcaggcggcggccacggccggcggcataccggtctccacacgctcctcaagatccttggctgcaagaatcctcgaatcccagagcatcagcgattgggcgatggccgggtcggtttcgccgagaatcaacgcctggccgccacgggaacgcggcgcgcacaacgacaccgcacgcatccacgcggtcaatgtatccaagcgagcatccacgcccaacgcatacaagctggtccaagcgtcgagcacggccacggcacgatactcatggccagccgatccctgctcggcactgaccggacgcacgcgcggttcgaaaccgggagtggcgatgacgatcatcggctgacaagccacatcgcgcaccaggccctgcgtcttgctggacaaaactactggcacgccgcggaacaacccggccagttcagccgcagtgcctgcagcacccacgcgcaccacacgcatacgttcatgcccacagcccgggcacttccaattgatggcagcagccccacaccagcggcatcgcggtgtggaatcccggcggtcggccggtagttgcaatggtccggaacacttggcgcagcgcgcctgacgatggcatttcgcacaactcagagtctcactgacgctgtcttgcggaatggacagcagcacggggccgctctccaaagccttagatagcacgcggacggccgtatgcggcacgcgcgccccgatggacgggtcggcaagacgcgcaagttcatcgcgattgagccaacgcacccaaggagtggcgtccttcagcggcgaggcgagcggatgaattgtggtggaatagccgctcactggggtctccactgtacctggaccggtgttttcccactggctttgcggggtgcgcgcattggccatggccacgaacacgccgccatgggacttggagcgcagccgcatcacgccacgggcctgtggatatggcatcataccgtccatgttctgataggcggcatcctccagaatggcgaacagcgccgggcctgcaaccggcgcatacatcaccgcgcgggtgccgatcaccaccttcacctggcccaacgccacggccagatacgtgcgataccggtcggccgcgggcatggtctccgcgttaagcacggcgacgtcgcccacccagccgccggcgggtgccggggcgaacggtttgagtccataattgcgcagcataggcatcaggtcttcgacctcgcgcatggtgggcaattcaactacggcagctttaccggcactcaacgcagtggccaccatccatgccatgtttcgttgccactcctgtgcaccgggcaacgaatcaaacacaaaagattggaaacgttgaccggtaagcgcgtcatgaagcacattgacatcggcgtaattggcggtcagacgacgatacccctgcgtagccccctccgaaacggtactggcaacggcaaaggtagagccagcaggtttggtcccatcgggattggtgccacgcccggcaaaaccaccctgcgtattatccggcaatgagccgccgaccggccgacggaacgacgcggctaaccgctgctcggtctctaccttggccacgcgcggtggcacggcgaaacgcagaatattggcccgtgtgccgccataggctttggcaatcagaccgatatcctcacgcatcgaagcgggaaccagtacatcggggcttagcactcgctcgatatagcgaatcgaagaacgcggcgtatcgctggtatcggtgcgtgcccagatcacgccgctgaccctctgaccgccaaaccgcacgcgcaccagcacacccggttgtgcggcctcgctgtctttttcatcaatgaagtaatcgaatgtctggccgaggtggagcgcctgcacatccaacacgacttgcgctatgggatgctgctcggccggcgtatgctccgcaggcgcacgtttacgccgcttgcggggagccagccccgcaagcgtcaactgttctgcgcctgaagtagtcatggctcaactataagtgccggagccgaggtcggtaaaattttaccggcgcaggtaatcgagtacgtgggttaggtcgcggtcgttgatggctttgtcggcggcgagctgggtctttggcttggcacagaacgcgagacccaggccggcggcctgaatcatcggaatatcgttggcgccatcgcccacagccacggtctggctcatcggaatacccaaacggtccgcccatgtctgcaaggcgtgcaacttcacggtcttgctcacgatttcgccgagcaccttgccggtcaagcacccatcggcaacctcaagccggttggcaatccaatagtcgatatggccctcggccgccagcatatcgaccacttcatggaagccgccggacaccacgccgaccttccaaccgtgttcatgcagcgtgtcgataagctccagcgcacccttggtgaaatgcagcttgtcatgcaccgtatcgaacgcggaaaccggcagccccttcagcagcgccacacgagcgcgcaaggcgtcgcagaactccagttcgccgcgcatggcgcgtgcggtcactccggcaatctcctcaccgcagccagccaccacgcccaactcgtcgataacctcttcgtcaatgagcgtggagtccacatccataaccagcaggccgggcttgctcagcgtcggcacagaaaccgcagaatcagccgggctcccaacttcgctctcggcggacttgtcaacaaaatgcacatcttcttgcgtcatgcttctgattctgggaaaaccttgggacaatgccctctatgaatttttccatggcagccgccactattcttgcgaccgaccccacacccatctgcaccaccaccgaacccggcctgatcggcaccatcaccgactggctgatcatgctgatggaaaccatcggcggtatcggcgtggccttggccatcgccctcgaatccatcttcccgcccatcccgtccgaagtcatccttccgctttccggcttcaccgccgcacgcggcaccctgagtctgccgggcgcaatcatctgggccaccatcggctccgtactgggtgcctggaccttgtacggcatctcccgctgggtgggcctgcatcgcatcaatctcgcggcagacaaaatccccggcgtcagccgcaaagacgtgagcaaagccaacgactggttcaccaaatacggcacatggtcggtgctcatcggccgtgtgattcccgtggtacgctcgctgatttcgattcccgccggattcaaccgcatgaacttcctgcacttcaccggctggaccctgctcggctcggccgtgtggaacaccatcctcgtttccgccggttacctgctcggcgaccagtggtgctcgattcaaggcgcgctcggcgtgttcgaggacgtggtcatcgcggccgtgattgtggtcatcgtatggttcgtggtgcgaaaagtgcgtactgttatacgtaacaggaaatccgccgacggcaacgaatagggtctgccgactgccataagttgccgaaaatcccggatagaagggaagcgaagaacccgcatgagcgacaccgaagatctcgccgcgctgaacgatcgcctgatggccaagaaccatgcgctcgccgaagcgctgagccgcgccggcaaggaactgaccaaggcgaagtcacagctcgcccagctcgctcagccgccgctcaccttcgccaccatggtcaaggtcgattccacccgcaccgatgaagacggcatccagcacgcgtcggccgaagtcatttccggcacccgccgcatggtggtgcctgtggcctccaacgtcaacgccgcccgcctgaccgccggggccaccgtgatgctcaacgagaagctcgtgctggtcgagcagcgcgatgctgacaccgtgggccagattcgcagtgtcaagcaggtacttgacgacggtcgactgatcgttaccgacgcctccggcaatcccgtgctcatccgccgttccggcgcgctcgcgtatgcgggcatcaatcagggcgaccgtattatcgtcgatccgtccgtccgcctcgccatcgaagtgctgcccgccgagggcgacaaggatctggtgctggaggagaccccggatgtcacgttcgccgacatcggcggcctggatagtgagatcggtcgtatcagggacgccgtccaactgccgttccagcatcgtgcgctgtttgagcgctacgatttgaagccgccaaagggcgtgctgctgtacggtccgcccggcaacggcaagacgatgattgccaaggccgtggcgaacgccctatgcgagggtggttacgattcgaatggcgacggcgcaatcagcccggccgaaacccatgtcaagggcgtgttcctgtccgtcaagggcccggaactgctcaacaaatacgtcggtgaatccgaacgactgattcgcctgattttccagcgcgcccgtgaacgcgccgcggacggcaatccggtggtcgtgttcatcgatgagatggattcgctgctacgcacccgcggctccggcgtctcctccgatgtggagaccacgattgtgccccagttcctctccgaactcgacggcgtggaatcactcgacaatgtgatggtaatcggtgcctccaaccgcgtggacatgatcgatccggctgtgttgcgaccggggcgtctcgacgtcaagattcgcgtcggccggcccaaaaccaatcaggccatcgccatcgtggaccattacctcaccgacgacctgcctctggaagatggcgtcgacgcgcacgccttgtccgccgtgctggtgcatgacatctacggaacctccgaacgccgccatctatgcgacgtgcaggaggagaacggccagtggcatgcgttgttcctggccgacgtggtctccggcgcgatgctcaagaacatcgtggaccgggccaagacccgagcggtcaaggaatccatcgaaaccggcttggacgtggcactcaccgtgccgctgctcgctgccgccgtggaagacgaataccgcgagacccgcgattccatggccgacgtggaccccgaacaatggtcgcgcatcaacggcatggacccgatccgccgcatccgcaccgccgaatagctcaagctcaaggagcactacatgaccgttaaacgagtgatgggcaccgaaaccgaatacgcggtatccctgaacaccccggaccgctacaatccggtgcaactgtccttcgacgtggtgaacggcgccgcggacagccacagcaaatccatccgctgggactaccggcaggaggacccggtcaacgacgcgcgcggcacccgtctcgaacgcgccgccgcccgcccggacatgctcaccgacgccccgcagctcaacatcaccaacgtgatcgcccccaatggcggccgcgtctatgtggaccacgcccaccccgaatactcggcgccggaaaccaccgacccgttcgaagcggtccgatacgaccacgccggagacctcatcatgcaggccgccaccgaacgcgcccgcaaacagactggcactcccattgccctgcatcgcaacaatgtggatggcaagggctcctgctggggcacgcacgagaactatatgatggcccgcgcggtgccattcgacttggtcacacgcctgatgaccctccacttcgtcacccgccagatctacgccggctccggccgcgtagggattggcgagaacagcgagatcccgggctaccagctcagccagcgcgccgactacatccacgccaaagtcggcctgcaaaccaccttcgaacgcccgatcatcaatacgcgcgacgaatcccactccaccgatgcataccgccgtctgcacgtcatcgtcggcgacgccaatcgcatggaggtgccgcaggcactgaaactcggcaccacgagcatgctgctgtggctgctcgaacatgcggacgaggccggattcgacctgaacgccttcctcgacgaactcgaactgtctgacccagtcgaggccatacacaccgtttcccgcgacctgacgctgggggcaatcttgccgctggccaacggcggcgaaaccaacgcatggcttatccagctcaaactgcgccaagccgtctaccaggttgccgcactggtcgaaggtaccgacaccgccggcgaacccgcctggccggacaaatccaccacatccattatggcgatgtggcagcaggcgctcatcgactgcgcctccatccgccatgccgccgacgatgacgaacgtctggccatgaccggcgaggccagccgcatcgaatggctgctcaaatggcagctgctcgaaaaactgcgccgcaaaatcaccacaacgtccgcacccggcgtggccaacggatggaatgatccgcgactgaaggtcatcgacctgaaatgggcggcgctcgaccccgcggacagcatcttcaccaaactcgaaccccgcaccgaacgggtggtgagcgccgccgacatcgcacgcgccaccaccgaaccgccggaagacacccgcgcctggctcagggcaaaactcgtggcgcaattcggcgatgaggtggccgccgccagctggtcccgactcactgttcgcgacccgcgcgccgcagacgagggcgaggcggtcgaattctacggcaatgccggccatatggccgctaccgaccatcacctgttctccctcgacatctccgatccgctcgccttcaccaaggcgcactgcgaaaccgaactcaattcagccgaacacgccatcgatctgctgaagtcgctggccatcaacgccgaacgatagacttggtagctatggaagaaacacgcgaagagaccccacaggacctgcgcaaccttgcgctcaaagtcgccggcctgctcgaagaagccggccagcatgccctccacgaccaactcaatccgcgtaacctcgcccagccgagcaccgagaacgcggaccgtggcccccgctacaagcttgaagtggacaacaagatcatgcgcttcatgagcgccagaatcgccgacatcgcccacttcgacggcttctggaccacccgccccgccgaaagccgccctggccagcgttactggtacatcggcaagatcgacggtgtaatcaactacgtacgtcgcatgagcgaatggacggtgaccgccgccctgttcgaattcggcccggacaacgagcccaagccgatcatcggcatcgtgcacgccccggccctcggcctgacctacctggccgccaggggagcgggtgccgtgcgcatccacaaaaccgcggtcggcgagaagcgcgacaaggtcgtgccgtcgatgacctcctcgctggatggttctgtgctgagctacggcatgtccttcatccccagcgaatcgcagcgtgcgctcgacgtggcctcctcgctcgccggacgcccggccgacatcaagcgcgtgggccccgtctcgctcgacctgtgcaaagtggccgacggcacctatgacgcctacttcgagccgatgctgcacgtgtgggatatcgcgggcatcgccgccggcaccgtagtggtctgggaggcacagggcacgctgagccgttgggacggcgaacgcatccactggcgtcacgataacgatgtagtggcctccaatggactcatcatccgcgaactgcagcattacctgcagcagtatccgtggctcgactccatcaaccagcgataattttttgactccgccggctcccctcgggtgaggggagccgtcggccgaaggctgactgaggggagtttgacagcccaaaaaagaagacaacatgccacaacaattcgaacaacctcaagcacagcaggccgcgacccaggaagacgacgccctcgccaccacgcaggccgccgcccaaaccgagtccaccgaccaagccgacgtgttggacgacatcctcgacgacatcgaatccgccttggaaaccaacgccgaggaatacgtcaacagcttcgtgcaaaaaggcggcgagtgatgccccaactgcgtgacagcggcacccgctccctgcacgccacggaacccgtaccatccgccgagatggacgggttctgccgtattttcggcgtcgaaaccgaatacggcgtggcggtcaccggtgccgaacgccccgtggacgccggccaggtggcgatgaccatgttccagcccatcgtctcccgttcccgctccaccaacacgtatctggccaatggctcacgtctgtatctggacgtcggatcccaccccgaatacgccaccgccgaagcgcgcgacccgcgcgaggccctggcccaggacctcgccggcgaacacgtgatgcgcaacctagccctgaaggcccagcgcaagctgcgcgaatcctacggcgcacacgccacgatccatgtgttcaaaaacaacgtcgactccgccggccacgccttcggctgccacgaaaactacctggtccgccgcttcgtgccgttggagaccatcgaacaccagctgctgccgttcctcatcacccgccagctgtacaccggtgccggccgcatgaccccggacggcttccagatcacccagcgcgcggacttcctggacgaggccgtctcctcggccaccacccgctcccgcccgatggtcaacacgcgcgacgaaccgcacgccgaccccgactccttccgccggctgcatgtgatcatcggcgactcgaaccgttcgcaatggtccacatggatgaagcttgccgtcacgcaccttgtgctgtgcgcgatcgaagacgccttccgccatggcgttccgtccggattcgagcagtatgcctttgctgatccggctgccgccaatcgcacggtcagtcgattccttgacaatccgcgcgccgaactgacgctcgaatcaggcgaatccgtgtccgcactgggtctgcagcgccggtattatgcggcggtcaaggccttcatcgaaacccatggcgatgcgctggcaagttcgctgccggccaccacgatcgacacgattatgggggagtggagccgcgttctggacgcgctggagcgtggtgcatacgatgcgctcgccgaccgcgtggactgggccgccaagaagcgtctgttcgacgcgctcaaacgccgtcgcccggacgtcaccttcgcccagatggaacagcttgagctcgactaccacgacatcgccaacggtcgcctgtacggttcgctcgtagcccgcaaccagatgcgtgagctgctgacaggagacaacgtggaatacgccgtgcacaatccgccgaccgacacccgtgccgccctgcgtggccggttcgtggacgcggccctgaacgtcggagcccagttctccgccgactggacccacctgaccctgaccgcccccgaacgccgggaagccatactcctcgatcccttcgaggccgagcccaccctgggattcgagcagcttatggaagcgctgaactagtccggaataatacggttggacaacacgtcacagcaccacaacaaaaagaccccgaccatctcggtcggggtctttgtcgtcagtaatgctcgaagtaatcgctacgagcagaaggtcactcggtgacggccttcttcagcagggagccagcggagatacgaacgccgtaggaagccggaatgtcaatctgctcgccagtgcgcgggttgcggccggtgcgagcggcgcgcttgacgcgctcagcggagaacaggccggtgagcttcaggccttcgccggacttcatggcctcgacgaacacatcctggaaggcgttaacagcagcctcggcctgagccttggtcaggttggacttctgggcgatcttcgaaacgaggtcagacttgttgtatgccataaagcatccttcttgggtcaggggacaagcacttttgcttagtccatgttgtcatcaatgatactagcgcatgtttctgcgaaaacccgcgttttataagggttttcacatctatttccccgaagggggtatgaaaatagacgaatcagacaagattatgcttgtcaagccacttcatggccgccgcgcccagcggaatgcgcagccagtagaacaccacgcggtgcagcaaagtggcggaaagcgccacgccctgcggcactccgaccgccacgaacgcgaatgtcagcgccgcttccacaccgcccagaccgcctggagtgggcactgcggaacccaatgcataggccagcaggaagacgaacgtcgtttcaatcggattcgatgaatggccgaacgcttgcagggccgcccagaaagcgagcccagtggtcgcgttctggaacagcgcgcccaggcagctgactgtgagctgtcggggctgggaaagcacgtccagcagctggttgatatacgtcttggccagcggcataagacgacgggtcacccagtggcgcaacggcggaatcatcatcgcaatggacagcaccacgaccacaacgcccagcacgataaccaacgtgtttgtcgggattgcgccggagaacatgttgcggccggtgaacaggccgatgatgaccagcatggagaagtacacggcgtaatacaccacgagcgcggcgctcataattgcggtcgcctgggtgttgcgatagccggatttgcgcaggaactgcaggttgacgaacgaggggcccacgccggctggcatggatacggtggcgaagccgcctgccacctggctcatgaagacgcccatattgtcacgcttgtgccgcgccatcagggaaccgagcgaaatcgacgagccgatccagccgcagacaccgaatgcgagcgtcaccaccgccatcaacgggttggcgttggtcagcgcggtgatgatctcctcgggcttcagttgggtgaagaccacgaccacggccacgatgaccagcagcatggtgatcatcgaacgccaggagaatcgggccagcgtcaccggttcggcggattccaccgtctcctcgtcagccagcgcggtgatacgactcctcaggcccttgagcagctgcttgtcccaggattccagcgcgcgcgtgggggaggggaccgcgaccttctgaatgaacggggccaaggccgtcagagtcgtgtctccccacgcctcgcgggcggcctccaccgccggttccacgccgatcagcgcggcgaacagcactagcagctgaactttgtcgagcgcggtgttggccggaccggaagcgttgtcgccgttgagccagccggcaatcacggcggtgccgtcttcaagccgggcgagcgtgtccggcgtgatgcgccggtgcgtatagccgcgccggctcgccacggacaggtagcgcatgtaggccacggcatccgccttggtaagcgtgttcaggttggcgggcagttcgatggtgtgtgcatccagcaccagaatcgcggattcgtcggtatcggcgatgccgtagggtgcgggcgcgggcagtttgatattgtgcagacccagcagcatggcgaaatgatgctggacggcgtcacgcacggaacggtcacgtcggatggacacactggtgaaacgcacccagtcccacaactgcttcagatagccgacggtatgggtctgcgcgtcgatgacggaaacgatgaaacgacggttgtccgtggtatccagatcgtagatgcgcgagccttcggccagatcgtcgtccagcgtgacggccagtgaaccgtggccgatgccgggctcctgatgccgaatcagcgaggcggtgtccagtccgatgcctttcagggcggcgaccagatcttggccccacacgcccttgttctgcgtgccgaccacgaatcggatcagcatgcccactgtgcggccggcggccatcgacaccagcatgccggtgaccgaatgccacgacagcaccaccatcaccgcagcgatggcatacaggatattccagctccatttgaccgtggagcgggtgcggcgtggcccggcggcggtcaggaaggacgccatgccggcgtagatgtcgggcaacagcccggagccgtatgaggtggcggctgagactagtgccattggcagggtgaaatcgttcagactgctgattgccgtcgatacgacccacaccatgccgtagccggcgaacatggccagcgcggacaccgcggcctgcagccattcccgggccagtagcaattgagcgagcacgatgatcacgatgacgatggtggccagctgcgtcagcacggtggaggggaagtcagccaaccagttgatgacctgggctgcggtgtgtgcgtcggattcgacgccgcgcgtcatgccgcccagatacacggcgaacaccatgaccacggcggccatcaacagcgacagaccggcccgggtcagatcgccgaagtcgcgcgtgcggcgcggagcgatgtcgtcgatgtacggtccggaatcgttgctgtcgtcggttgccgggctgtccggtccgctgacagcaaaactggccgaccggccgtcaccagaggcgatcggccggtcggtagtggaggaggtcgccttgtccgggcgatcttccgtagtggactgctcctgttcagtagtcatgaaatggttacctgacgcctgtccttgttcggttcagtttgcggtttggtttgtgactcagcgcagtagtgtggtggatgcgatgggctcgagggactcgcatcgcacctatttcagcggtcgaaagcgacgagctggctggccacaccggtgtaggtggcgggggtcagagccttcaagcgagcggcggtttccgggtcgaaggactgctggtcgatgaactgctcgacctgttccttgttgatggtgtggccgcgcataagctccttgaccttctcgtacggcttgtccatgcccggcaggcccttgagctcgcaggcgcgcatggcggtttggatcggctcgccaagcacctcccagttctcatcaagctcacgctcgatgacgtgggtgttcgggtggatggactcaaggccgcccatgaggttggtcagggcgagcaaggagtagccgagcgcggaaccgatgttgcgctgggtggtcgaatcggtcagatcgcgctgccaacgggattccaccagcgtggcggagagggtgtcgagcagcgagcagctgatttcgaagttggcttcggcgttctcgaaacgaatcgggttgaccttgtgcggcatggtggaggaaccagtggcacccttgaccggcacctgggcgaacactccacgggagatgtacatccacacgtccacacacaggttgtgcatgatgcggttggcgtgggagacggtggagtacagctcggcctgccagtcgtggctttcgatctgcgtggtcagcgggttccaggtcaggcccatgcggttggtgacgaattcgcgggagacggcgacccagtcgacatccgggcatgcggccaggtgggcgccgaacgtgccggtcgcgccgttgatcttgcccaagtactcctggttttcgatgtgcttgagctgacggttcagacggtagacgtagacggcgagctccttgccgagcgtggtcggcgtggccggctggccgtgggtgagggagagcagcggcatatccttgaattcctcggccttgccggcgaggtggtcgatgatgcgcttgaactccggggtccacacgttttccatcgcgttcttgacgcaacgggcgatggagaggttgttaatgtcttcggacgtgcaggcgaagtgcacgagggtcttcagctcgtcgttgatgttggccagctcggccggagccttgtcgatctgatcatcgatgtagtactccacggccttcacatcgtggtgggtgatggcctcatgagcggcgtgctgcttgatgccttcggcgccgaagtcctcgggaatggcgcgcaggaaggcctgctcttcggcagtgaacggcttgacgccgtcaacgattggctggttgccgttgccctcaaagccgttggccagaagaatcatccattcgacttcgacacgcatgcgttcgcggttcagggcaggttcgctcatgtattcgacgagcggggcggtggccttgtggtaacggccgtcgagcggggtcaatgcgattgcgggggaaatatcggtaagcttcataacctccaagggtacttccagccgtgaaccgagcggctatactgtggtgtggcgttcccgcccgagccgtacaggtcaaggaacgcccgtgattcgattactgtgtgcggcctttaaggctaggagatcaccatgcctgcaaccaccattcatactcttccgaaacgttcggtcgccgtatcgtcgctgaaatggcagccgttggacatcgcggtcggtgccacactgggcgcggcctgcggcgtgatcttctggggattcaacttcgcgtacatgccgatctcttcggtgtttggtgcgattctgcccggtttcgccagcatcgtgcacgccgtctggtatttctccggtacgctggcggtgctgattctgcgcaaacccggagcggcgctgtacgtgaaccttatcggcacgctggtcgaaacggtgattggtagccagttcgatttgggcttcgtgattatctcggcgctgctgcagggtgttttcgctgagattccgttcgctttgacccgttaccgcatgttcaatctgccgatttccattgcatccggtgcgttggtcgccttggaatacggcacatatctgatgctgtttcgctacgtgggtgtgtcattcgtcagcccgcgtggcatcgtgcacatgatttccgaggtcaccggcggcgtgcttatcagcggcgtgatggcctggtatctgatgctggccatcgccaaaaccggtgtgctcgaccgcctcgcatccggccgcgcactcatcgagcgacgcgcctgacactctttgcgcgtcactttcccgggaatgttgtgctggcggagaggaacccaagcgcattagcgcaacattcccgggaatgttgcgctaatggaagggaatacgggtgcgtcggcgctgccttcatgggactattcgagaacagtcatcttagctacttcactttgctgagatgccctatccgcactcattctggcaccagttcaggcctcgacaggttgaatgcctgctgtcatctgcgttatgtattcgtggatgagttccgccatttctgggtctttcatggcctcattgaacatgtcgtcaaatcgttccgtaggcatgatattcctccttgcggcaattctcgaaaatagtgaagagccttctgcgggacgtacgtactttgaattcaaccattgagcccttacgttatgggagtgctttgccgctgaaaatcaataggattatgaagtgagctgattgtcatgggcagcagattgatgaggtctatgtaatgatgcgacacgcccattaaaaataacactaaagtaacaaataagaacatagtgctgttgtatatgatataccgatatatccaatactgatggcaggccgtgcgttgtgtcgcagagaaggcagcggttaagccatttcttgaacgtgagacgaagataccttgcaaacgttgatgtttcaggaatgttcggatgtgggatgatgtgatgttcgattgcgtattgtaaaaacgacgcattgctaatgtcgatttgatgtattgatatatcaatgatttaatagttttcgtcagataaatgaacatctgacttgtctcttcaaaggtgaaaggaacaatgatgaagacttggatgaaaaccgtagctatgggagctagcattgcaatgctgattggcgctgggggttgtggatcaagtcgtggtggttcggcgacctcgtctgaggcgagcggtaaagatccgtcctcgatatccgttgggatttcaatgccggaacagcagctggaacggtggaagaaggacggcagcaatcttaagcaaatacttgaaaagcgcggctacaaagtcgttctacagtatgctgatggcaaggtggaccaacagacgtcacaaatccagaacatggccaaccaaggggccgacattgttgttatcgcttctcttgatggtgtggcaaccggtgctgcggcagaaacagcaaaggacaatggggcgacagtcattgcatatgatcgcatgattatgaatacagatgcggttgattattacacaagtttcgacaatacaaaaattggtgaaatgcaaggagagtatatagttaagaaactcggccttgaccagggcaagaaaggccccttcaatgtggaattgatgtcgggttctcctgacgacaacaatgcaaaatactattttgaaggctcatggagcaaactgggacagtattttgagtccggagtgttgcaatcccggtcgggcaaagttccgaaatcagttgacgattggcaaaccattggtatccaaaactgggatcgacaaaaagcccaggctgaaatggagaatcgtatcaactcattctatggtgatggcgaacggttggacgcggtgctggctcccaatgatgcactggctttgggcacagtcaatgccgtggaatctgctggttgggattattacccgattatcaccggtcaggatgctgagaaggccaacgtacaggccatcgtgcaagggcgccagaccatgagtgtatacaaggacttccgtaagcttgccgatattacggccggcattattgacgacgttgttgcaggtaaaactccgaagactcaagaaacatatcctaatggcaacaaagacgtgccttcgatcatggctgttcctgaagctgtcgacaaggataatgtcaagtcattgcttgttgattccgggtacatctcagcagaagatgccggcttgaaatgacaccgaatggcaatgaatagggaagagctgaattatgacaccaattactgagtcccaatatcaaattgataccaaagataatcgagatttgctcaatcgggaagcgcaagaattagtggatttcggcaagcgcttcgcgtggccgggcggtggtgcctcatatctcgatgatgaaggcaatccggttccgtcggaaggcctatatgcatatgagtcgggacgatatgctcatgcctacacgcttgggcttctagccggatatgtgcctgaagatgaggctttgccgttaattaagcaggcgttggacggattcactactgggctgttacttgaccgcgaacacgggggctggtatacccgcgttggaaaagaaggaaccccggatcccaataaaggatgttatgcccatgcctttgtgattttgggtgcggcttcagcaagtcttgtgcatattccggaatccagagcattgctagataaggcgttgaaagtatatgatcgctatttctgggatgaacagtatggcatgccgagagatacttgggatacctcttttactcattgcgagcagtatcgtggcattaattcctccatgcactcggtggaggctttcctcgcagcaagcgatgctttggaagagcctaaatataggttgcgcgctggccgaatgattcagcgaacagtcggttttgcatcagactgtaactggcacatccccgaacactttactgaagagtggaaacctgtatacgaatacaatgctgagaaaaaagatgatcaatttaagccatatgggaccactccaggtcatagcttggaatggggaagactgattacacaatgggccgtaagctcctatgatcatggggaaatcgacgagtcgactcgtgatcgatatattgaggcggcggaaaatctgtttgccgtagcggtcgaaaccgggtggaacgtagatggtcaaattggcttagtgtacaccgttgactgggagggccgaccggtagtgcatgatcgtatgcactggactctggctgaaggcattgataccgcttcggtgctgtaccggattaccgggaaatcgatatatgccgagtggtatgcgcgtttttggcaatacgttgatgaatatatgattgaccatcaacgtggcagttggttccatcagcttgatgccaacaatcaagtgattggcacagtatggccggggaagcctgatatttaccatgcgcttcaagctacgctcattccgtgcgtggcaaaagatcgaattggtctgtctattgcgaaggcgctaacagactaattatacaagggggcgctgcactgcgtggttgcggtacggcgtctccatccatgcacaggggcattactatcggaggaggtagctgtggctacgaacggtgacgtgattttggagatgcgtcatatcgtgaagcgtttcggcccggtcaccgcgttgaacgatgtgaatatcatggtcaagaggggccagatgttctcgatctgcggtgagaacggtgcgggca

SEQ ID NO: 396 - DNA, 2864 bp, Unknown
  R48_24m  MAG No. k141_1459
cttcaataaatcgggctgtatgatcgacggtatccctttcagcatagctgctcctgcttgtcttcagacttatttgattgttacttgcctagaatgctctggatattgcggtactgttcatcggtcagctgcacggcgggttcatggatggacgtgtcgattggcagtcccttcgccttgaccgcgcccttgatggcgctgatgaacaggtcggcagtgtcgtacaggcgcatcagataggaaatgcgctcagccgacttgatggccgtggcatagtcaccggcctcccatgcacgatgcaggctgacgaaagtctccggctccacattggtcaatccgcacagcacgccattgccgccgctgattcggttgacggtgtagtactcgtcgaatccggacagcacgctgaacgatggattcaccttacgaacggcagcgatgaccttcctggtgtggctgatggtgtcgacggtgtctttgatgccgatgatgttctggttctccgctgcgaggtccgccaccagttcgggcgtgaggtcgttgcccgtcctggctgggaagttgtaaagaatgaccggcagcgtcgtcgccttggccaccgcagagaagtagcgcttcgcgcaatccggtgatggtccgaaatagtacggggatactgcaaccaatgcatcggctccggctgtttcgctttccgccgccaatgttctcacattgtccaagttggtgtctcccacgccaacgagcaccttcatgcgtccagcgactttcgagacggcgaaacgcaccgcttctgccttcgtcttgacgtcgatggcgtagaattctccgatactgccgaacagcaacacaccgtcgatgcctgcgtcgatgagatgatcgaggtgcttgccccaattatcgtagtcaatggtcccatccgcgttcgtgatggtgatggaagggcagaacacgccttcgaattgggcgttgcaagtcatgattttttcctttcgacgatatggtaggcgttccgcgtgcggtggcgaatatgtccgcgggccgagcggtgttggagcgatgaatcgaaaacaggggatccggacgcgcgaacgcgaaccgatgatcccccgtgcggtatctcctagccgagtgcccgatcgaggtggacgtatccgccgtcggggaagacccattgtccggtggtgtgcgacgacctgtcggacagcaggaacgccacggtgtcggcgatctccgacgtctcggtcatgcggtggccgagcgggatcttgctggtgatcttctcaagctgcgcgcgctgcgcctgctcatcgccgaacgtcttgatccattgcgcgtacagcggtgtccatgcctcggccacaacgacggcattgacccggacctcgtccggggcgagggcggcggcccattcgcgggtcagtcccagaatcgcgcccttcgcggcggcgtaggcgctggtcttgccctgaccggtcaatgcggtcttggaaccgatattgaccaccgagcccttgctggccttgagcgccggcacgcactgatggaccagctcgtagtagtgggtcaggttgccgtgaatcgactcctcgaactgacgccacgacgtggtctcgagcgcgagattgtcgttccttccggcgttgttgaccacgccatcgatatggccgtgcttctccatgaccgacttgacgatgggggcgatgtcgtcggtgttgttcaggtcgatcagatacgtgtcatacgagtcggtgatccgttcaatgtcctgtcggaattcgtcgccggcgccgtcatcacggttcagcaccacaggaatggcgccctcctcggccaagcgcagcgttatgcccttgccgatgcctttgaagcctccggtgacaatgatcaccttgtctttaagatgcaggtccatctcaggtcctcccgaccggtcagtccttgtgcaggtacttcatgcattcgtcgagcttcatctccgtgccgttgcccggagcgagcggcgcgacgtatcgtccgttcttgatgacggtcggatgcacgaagtactcatgctggttgtccacgtattcgacgacgcggtcctccatctcgccagagacggacacgtaatcgaacatcgcaagctggctgacggcttcacacaggccgacaccgcccgcgtgagggcagaccttgacgccgaacttcttggcgagcaggtattcgaggacgatctcctggggaccggcgactcgggtcgcgtcaatctgcatgaccttgaagctgccagcctgcaggtactgcttgtacatgactcggttctgcatctgttcgccggtggccaccggaatcggatcgatggccttctggattgcggcatgtccaagcacgtcatccgggcaggtcggttcctcaacccacgcgagatcgtagtcattgaatttgccgatccattcgatggcctgcggcacatcccagacctggttggcgtcgacggcgatggcgatgtccgggccgaccgcttcacgggcgagcttgagcctgcgcaggtcatcctcgaggttctggccgaccttgagcttgatctgcttgaagcccatgacctcggtctcctgcttggccaggcggaccatcttctcgtcggaatagccaagccatccggcggcggtcgaatatcccggataaccgacttccttgaggtgggcgatacgctccgccttgccttcctgggcggcgcgcaggatatcgatggcttcctgcggagtgagggcatcggtcaggtagcggaagtcgagagtcgcaacgagctcttcgggctccatctcggaaaggagcagccagagcggcttgccggcgcgcttggctttgaggtcccacagagccga

SEQ ID NO: 397 - DNA, 6709 bp, Unknown
  R48_24m  MAG No. k141_1496
ctcccagtattccttctcctcgtcgtagtacggagccaagcgtttgagcaatgcctcgatgccattcggctcgtagtaggtcacggcggtgtcgtcgctgttgtgcacgggcaggtgctcgatctccacgccgaagccgccggcgccccgctgggagcgtccattctcaaagaacttgagcaggctttcgacgtgcttggggttcggcttggcgagcaggtgcgcgtaactgattcggggagtaaccatgctttgtatcgtattcgagccggccggtgcgcgtgcccgaaagcccgtaatacgctatacgaaaaaccgatagcaggctccggcccggtttctcgctctagagactcccctcagtcgctgcgcgacagctcccctcacagaggccgagccgtaaagcggacagcccagtggactgtccgtaggcgagggtgagccgataggcgaaccagcatgtcgcgagcgaagctcgtccttaattgcggacgagccagagcataaatcagtccgcggaggtgaagccctgcggctcgccggcctcggcgaacttggcgttgtgagccttcttggcggcggcgatcatcagcttgatacgattgagctggttcgcctcggaggcacccggatcgtaatcgatggagacgatgttggcttccggatgcaggcggcggatcttgccgaacatgccgcggccggtcacatggttgggcaggcaggcgaacggctgcgcgcagatcacgttcgggcaaccctgttcgatgagttccagaatctcggccgtcagcagccagccttcaccggcctgcacgccgatggaggtgacttcagcagccttcttgaccagttcgggcatcggctcgtcctgcttgaacttgccgttcgatgtggccagcgcggccttgatcggcgcgttgtacaggtcgaggcccttgcgcatcagggcgtaaaccgtcttgttgccgcccatgccgaggttcttctcgttccagtcggtgatgtaggggcgggtggtcatgaattccatgatgccgggcaccacggcctcgcaatcctgggattcgatgacgtcgaccacgtggttgttcgcgtccggctggtacttgacaagaatctcgccgaccacgccgacacgcaccttgcgcgggatgtcgcgcagcggcaatgcatcaaaggatttcacgatctccttggccagcacgttatacggcagatagcccttcttgatgctcggcgccttggctgcggtcttggaatagccgtgatgctcgatggtctcacgcacgatggtgtcccacagctcgtacagcttgttggccgaacctttctccacctcatacgggcgcacgcggtagaggcacttcatgagcaagtcgcccagaatcagcgccttgatggcacggtgcagcaggggcagggtggccttgaagccggggttatcttcgagcccctgggtagaaatggcgatgaccggaatctgcggatagccggcatcgaccaaagccttgcggatcaggccgaagtagttggtcgcacggcacatgccgccggtctgggtgatggcgagcgctacatggtcgggatcgtatttgccttccagaatcgcgtcgatgagctggccgacgaccatgatggccgggtagcaggcgtcgttgttcacgtatttgaggccggtttccacatcgccacggctcgcgtgcttcaggatgtcgaacttgtacccaccggaacgaatcaccgcttcgaccaaggacatgtggatcgggctcatctgagggccaacaatcgtatagttcttcttcatgtccttgacgaacttctcgcgatgcgcgtatcgggacatggtggcgttgttgtggccggacttcttggcgttcttggcgttcgtcacgccggtggtgccgtccgaagtgccgttcttgctggcgactgcggcctgcaggtcgcgttcggcggcacgcttggaggcggcgcgcatggccttggtgagcttcgggttggcggccatggtgctgtcaagcagaatctggcggccgggggttggcgcggtggagccggtcttgcggaatccggtggacttggggccttgcacggccttggccgcggcggcttcgcgggccttgttggcttcgcgttcctcgacggcggccttgagcgagcgcagtcgaatcttggcggcacccaggttggagacctcgtcaatcttcagcagcgtgtacacgtccgccttgtctgccaggatttcggccacctgatcggtggtgatggcgtcaaggccacagccgaaggaattgagctgcacgagttcgaggcccgggtaggaggccacgaagtgtgcggccgcgtacagacgggagtggtaggcccactggttggtgacgcgcaacggcatcttggtgactgtgcggtctcccacgtggcggaatccggcggcgttcttggagcgcgggtcggcttcgccttccgagaggaattcggtgaggttgagcttctcccccggctgcagttcgcagatggaatcctcggagagcaccaccatgccgagcgagcagatggtttcggggatgccgtggttgatttcggggtcgatgtggtagggacggccggcgagcacgatgcctcggcagttgtgctctttcatataggcgagcgcggtcaaaccttcctgctgcacgtcatgcttgaagaccttgtcttcggcataggcggccttgaccgcggtttcggcctcttcgcgggtcacgttggcccacgcaaactcttcgacgatgcggccaaccatgagctcatggttggcgaggttgaagtacgggtgcatgtagcgcacgccgtcctcacgcagctcaggaacgttggcgccgacgacgagcggatagttggccacaaccgggcagttgtaatgattgtccgtgttgggcacgaggttctcctcgtagctcacgcacgggtagatggtggtcttgatgcccttgtcgatcagccacttgatatggccgtggaccagcttggccgggtagcagatgttttcggaagcgatggattcgatgccggtctcgaacagttcatgggagctacggccggaaatcatcaccttgaagcccagcgaggtgagcagcgtgaaccagaatgggtagttctcgtacatattgagggcgcgcggaacgccgatctcgccacgagtggccttcttgtcggtcaaacggcggtaggcgaagcaacgcttgtacttgtagtcgtacaggttcggacggtcggaacgcttcttcttggcgtcaccaccgcgttcgcaacggttaccggtcacgaagcgcgaaccatcagagaacgtggtgatggtgagcttgcagtggttctggcacagcttgcacacgtcacgctcggtggtcatgctcatattgtcgagtgcgtcgccggtcaggatggagctggcggtgtgggtcacaccgtccacgacaacgacatggacttcgggcttggccggctcggtcttcttgaaggctgcggccttgggttcggacttgagtgcgggctcagcctcggactgttcctcggacccatcggccttaaccaccacatccaagtggtcggcctcatcctgatagtgcatgcgggcggtcagggcggcgccgaacgcgcccatgaggccggcgatgttcgggcgggtgacctgacgttcggtgagcagctcgaaggcgcgcagcacggcgtcgttgaggaacgtaccgccctggaccaccacggtgtcgccgagttcgccggaatcacgcagcttgatgaccttgtacaaggcgttacgcaccacggagtagcacagccctgcggcgatgtcctcgatggacgcgccttccttctgcgcctgcttgaccgaggagttcatgaacacagtgcaacgcgagccaaggtccaccggatgggtggatgccaaagccttttgcgtgaattcctgaatcgtcagccccatagacatggcgaaggtctgcaggaacgagccgcagccggacgagcaggcttcgttgacggcgatcgagtcgatgacgccgtcagtgatggccagatatttcatatcctggccgccgatgtcgatgacggcggtgacgccggggctgaccatttcggcaccacgatagtgggccatggtctccaccacgccctcgtccaggtgcaggccggtggtgatgaggccttcgccgtaaccggtggcgcaggagcgtgcgatccatgcgccttcgggcagctcggattggatcttcttgacgatgttgatggcggcggtcagcgggctgccttcgttgttggcgtagctggaccagacgatttcacggtcgtcattgacgagcgtggccttgatggtggtggaaccggcgtcgatgcccaggaagtgcgggccatgcgcgccttcgagggtgccgatgtggatgtgttccttgtggtggcgcttgttgaagtcctcgcggtcggcctcggtggggaacagcggcggcatggtgggcgtgttggagggcaggttcttcagctcgtccagacgcatgaggatctcatcgcaggtgtgggcctcgaaatggtggccctgatcgtcggaatccatgtcggcctgcaatgccgaaccgtaggccacatacaggtgggcgtcggtcggcacgatgaactcgtcgaccttgccttcaagggcacgctggaaggcggcgcgcagttcggacatgaagaacagcgggccaccgaggaagatgacggtaccgtggatcgggcggccagcagccaggccggcaatggtctgcgtggccactgcggtgaagatggaggcggcgagatcaggcttggccgcgccgtcgttgatcagcggctgcagatcggttttggcgaacacgccgcaacgcgaggcgatcggatacaggttctcgtagctcttggccatctcgttgaggcctgcggcgtcggtgtcaagcagcgtggacatctggtcgatgaacgcgccggtaccgcctgcgcacgaaccattcatacgctgttcgggcgtgggcttcaggtaggtgatcttggcgtcctcgccgccgagctcgatgatgacgtcggcctgcgggtattccttgtcgatcgcctcggtttcggcgatgacctcctgaatgaaaggcacatgcagattgtcagcaagcgccagaccgccggaaccggtgatagacaggcgaatcggctcatcgcctcgacctagttccacaagctctttacggatgtcgaccaacaggccggccacggtggcacgcacgttggcgtggtggcgtcggtaatcggagaagagggtgtctttcagggaatcggactgatcaagcaccacggccttgacggtggtggaaccgatgtccaatcccacacgcaggggcttcgggtgtgaagcgggctttacgctcgcgtcagtgacgatgtcaaccatgtgttcctcttaattccgacttccgggtatgtgcgccttcaggcatcatgagccgtttcgggacggctggcagatacctgcggacggcttcgcccggctacttcttctggaatattagtccgaccacctgcccaacgtgacgccgggcatggtgatttcgctcacgggaagggcgttccccaacagttccgacgatattgctgagtgcggcattccggacctgctactacgaggcctgttggccttcgccggcttcgcggtctctcaaatagatttcggggatatctcgttcttgatcgtggagcttggcccagatgaccggttcgccggcttctagggacttggacacatcgaggatgcgctggtttctggagccgcggaattgcagcagcgagtccttctggtctctgaggtagcggccgtcgacgagaatgtcgatgagatgtagcaattcaagcttgtctggggtttctccggggcgcatgagttcttcccatgtgtagccggtccacgaccagatatctttggtatgaccgaattcctggcggatacgttgtgcgagcggcaccagcacgggagtgttgaggaatggctcgccgccaaggaacgtaatgccttgcacccatggcgctttcaggtcttcgatgatcttgtcttcaagtttttgcgtgtattcgtggcctgcttggaagtcccagatggaggcgttgaagcagtcgacgcagtggaaggggcacccggagacgtaaagggagttgcgcacgccttctccgtcggtgacgatgaaggttttgtagtcggcaatcatccgcttggacatgcgccggccatcccattgaccggctttcggatcgttggcaagaccgttggagggtacggaggggccacgcccggtctcgccggccgcaaagtcatggcgcttgggttcgggcttggtcgtatgcaactccggcatgattccctccttgcggaaagcattagttcccctctttgagggggagctgtcgtcgtaggcgactgaggggagcttcggaatagctcttcggactcccctcagtcagctttgctgacagctcccctcagagaggggagcctactcacgaataaccctacttggcctcttcgaaccactcgcgagtggtgccgtcgtccagcgtcacacgaccggtttcgccgctcatgtgcttgactcggtgggcaatttcctcgtgacggccgtgcaccatcgggcgctggaccgggctgccgagatagccgcaggtgcgcttggtgacgttgcac

SEQ ID NO: 398 - DNA, 4660 bp, Unknown
  R48_24m  MAG No. k141_2508
ctgttgtcggtatccgccatcggcatgatcaacatcggattggccggcatcgagcaacgctcgcacgagctgctcatccgccgcgcactgggcgcgaccagagccagcatagccatacaggtcatcggctcgtccgtgctgctcggcctcatcatcgccttcgccgcggtgctcatctccgcggtgctggtctgggcaattccgtggatgatgcccgccgactcgccgctggaaccgcccgcatacccatatacggcggcgatgattgcggcctgtgcgtccatcgtcacctcgcttgtcggctctcttgccccggccatcaaagccatacggctgcaacccgcgctggcgttgcgatgaaccagaagccattctggacaagcccgccgacagctggatggtcggcattccgatcatcgattgcatccggtaaacaatccgcttgcgggatgtgtaccatggtcgagatgccgcaaccgcagaatgttgactattagcatacaaatacatactattgtcttacgtaatgatgttggaggttaatgtgagcatggcatccgtcacagtccgcgtggatgcggacaccaagcagaaagccgcaaacattgccgaggatctcggtctggacttgtcttcggtcacccgcgccttctacaagcagattgtccgggagaggcgcattcccctaaacctttcctatacgaccgtgccgcctgaaaccatggaggcccttgacgaggcgaagaacaggctcgccgacggcaaacctcgtttcaacagtgccgatgagatgttcgattcgttgggaatctgatcaatgctcaaaccggattacacagcggcattccagcgagatatcaagaaactcaaacgcaagcacactgatttacgcccgctgaaagaagtcattcgtctggttcttgaggacacggcggactccaaggaagtattgaggcgtagacatcgcgcccacacacttaccggtgatttaaacggcgtattggaatgccacatcggcaatgccggcgactggctgcttctatggattcgcgatgatggtaccgccatgttcatgcgaaccggcagccatgacgaactgttgggcaaatagcgggtttacatcctgctttgaaccggccgatggcgatttgagtgcggcagtcggcccgtgcccgcagaagccggcatcgcctcgcagcgtgccggtctgcaatcgctgatcgacgaggaggagtccaggctcgaagccccgggattcaccggcgacaacctgctcgccgaaccacaccggccgctcacgccggagaccatgcgactgctgtcgggcttgccggcggaactgtacgcgaacatcgccgaacacgccgaccggggcgaatggtacgccatctgcgtcaccttcgacacggacgccatccacgtctccgccagcgacaccaccacacccgccgacatgggactcggcctgggcagcggcctcgaccgctaccggaccatcatcgaaacacacggcggcaccttccaaacccacactgaacaagcccactggcagctggatgtcagcattcctgccaagaactagccaggcttgggactcggtaatgcacgcgcgcaacgatttcttctgtgagtttctgttcttctacacaacttaatccgatatgccttccgggcgtgtcgttgctcgtgtcgtgaaccgtcggttcgtttctagctacatacatcaatgaacgtttgtttacgatgtgccgtggaaggagccgcatacgcaggatgacatgacctcgcccggtggggcggtgatgcgcgacgaggatctgctcgcgcgggtcgcctccggggacgaacgcgccttcgagaccctgtatgggcgtcacgctgcggcggtgcgggcgctcgtgcgcgtgcgcgtgccggatgccggcacggccgaggaggtgtgcgccgacgtctggctgggctgctggcggtcggcgagggcgttccgtggtgatgcgaaggtgctgtcctggctgctgggcatcgcgaaacggcagatctacatgcgcgtgcggcgcgtacgcccgaatgtgaccgcgttggacgatgcgcccgaaccgcgtgacgatggaccgagtccggagacggccgtgctgtccgaagcgggcgtggatgatctgatggcgttgttgcgccggctgcccgtcgaactggtggagacggccacgttggcgtggctgcacggcctgtcgtaccggcagatcgccgatttgtcggacgtgccggaaggcacggtcaaatcccgtatctcgcgtgcgcgccgtctgctgcgcgcgcaactcgaccgctaaaacgatgcggatggaaaggaacggtgaatcctgatgaccgatcatcttgacgaaacgatcgaccgtttgacggacgagacgcccgacgggcgtctgcttgcggcattggacgccgtggaacgatcccgttcgggagacgcgcctcccgctgcggcggtgatggcgcgcatccgcgcgtcgcggtccccgttggacggaccggcatggtcgtgggcgcgcagtctgcggttgttcatgctgctgctgggccggcagtcgcgggtggtgccgtggcaggtggtgccggccacactggcgttgatggcgttcgccggattgggggcgcggttcttcgcggtcggctggagtgcgacgatcgtgtcccatgcgttctgctcgatggtgctggccggcgtgctgctgagcgtgacgatggcgttcggggattcccgcgcggacatgatctcgtcggccaccccgttgggtccgggggcggtcacgctggtccggctggtgttcatactcgcctgcgacgtcgtgttcggcctgatggtgaccaccgtgatgggcgcgcaggggtatgggacattcggcgtactgctggtcggatggctgtcgcccctgctgctggtcgccggcgtgggcgcgatgctcgcgatccgtttctcctcgggcgtcggcttcggcgtcggcctgctgttgattatcgcaatccggctgaatccgttcgggttcgcgggtctggcggacgcaagccggtccggtgcagcacaatcctccggacagctaggtctggccgtcgcggggctgatggcctgtgtgggggcggtggcgctggccggacgattgtccggggcgcgcatggcggccgcgaccgtctgaccgactcgaagccgataactcatctggtcgttcggcatgtcgcgtgaacttcaggacaggcggccgctacctacttggtgacgaacaaaaagaatgaccgtcaacttcatcggacttcaaggagggtcggcatgacgggaatgattcgcgctcaggcaaggcgcatcggcatgggattgctggcaatgcccgtggcctgtgggattgcggtggcggcagccggcgtcatggtatccggcgtgtggtcgcgtacgcaaacattgatggtggtgaactggctcgcccagctgatggtgatcggctcgggcgtgtgcgtggcggtcgcattgaccggtgacccgctggtcgaggcgagcgagtccacgcccgtgggttggaggcgcgtgcaaaccacacggttcgcgctcacggctgtatccactcttgtgggtgccgtgcttatgttcgcgccgttgcatgtattgggcctatggccgcaggatatgggatggataagtctgatcgcgccggccggcgcgatactggtcgtgggcctggccgggttcgcggccgccgcatggtccgcgtccgcacaggccacggtcatggcggtggtcgccgtatggatgttcctcgccctgctgtgggacccgtacgtgctcgatccggtcacgcaacgcagcatcccaatcgccgtctccatgatcgccgtagtgttcgcgtggcgtctgctgggcgacgaggaacgcaacgtgacgctcgcaaggagaagcatatgagtccttgcaccggtttccggcatctgacccgcgtccacatgatcatcgtgtggcggcaacgttcattatgggtcgcggctgtcccgctggccttgctcgcggttctgctgggcgtgatctccccggcaggaccgcatgaccacggtgcgggcgatttggcgttcatggccaaggcgatggccatgttcatgccgatcgcctacatggccgcgttcaccgacttccacacgcggcactcccgacttggcattggtcaattggaggattccacgcccatccccgcgcccatgctggccgcggctcgcacgctcggcgcgtttctgatcctcatcaccccgtcgctcctgctgctggagtgcgccggcgtcgtccagaccctgcacggctcgtggcgggccataccacaggcattggccgccggactcgcgatcaccgggccggccgtgctgaccgcgatgagcctgtcctcgctgctcggcgcgatcctgcccatgatcgtcgcgcgcatcaccggcgtgctcgcatggttcgcgctcgtgttctcctcgccgatgctgcccgtgccgaccgtcaacggcaccatcctcaacgtgatcggcgacgccgtcggcgccggatggttcgggctcggccccgtctacccggccacgggaggcatcctcgcggtcaccggcacgcccgccaacgcggccatatccctgatcgcgcagc

SEQ ID NO: 399 - DNA, 3487 bp, Unknown
  R48_24m  MAG No. k141_3281
agggcgatttccgcaagctgtggatccagcgcatcaacgctgccgtccgcgctgagggcatcacctacaaccgcttcatccagggcctgcgtctcgccggcatcgagctggatcgtcgcgctctggctgagatcgccgtctccgacccggacaccttcaagaccatcgtggacgccgccaaggccgccctgcctgaggacgtcaacgctccggttgaggcctgattgcttgaagtcgtgacttcacactagaaaccccgcttccgagcggggtttcctattattagccccctctgacgagggggctcccgcgcagcgggtgggggagaggacaaactcatgaccaacggattcaccagactcaccgagcagttcctcgtccacatcggcgtggagcgaggactcgccacggccaccgtcaccgcctacgaatccgacatcgccaaatacattgattggctcgaaacccgcggcatccacgaaccggacgccataaccaaacaagacgtcgaagactacatcgccgcccttgaccaggcgggggagtccgcccgctccaaagcccgaagactggcctcgatccatgaattccatcgcttcgcgctcggccagcacgcggtgactgccgacgtttctgccgcagtcaaggcacccaaaggtgccagcaccctgcctgacgtactcaccgtggacgaggtaacccgtctgctcgacgcggcggcagccggcggctcaaccgatccggtggtattgcgggacaaggccctgctcgaattcatgtacgccaccggctgccgcgtctcggaagccaccggtgtgaatctggacgacatcgacctggacgagcacatcgcgcgactcatgggcaagggctccaagcagcggcttgtgccattgggcagctacgcatgccgggccatcaccgcatacctcaatgcggggcgtggcgagctggaacggcgctccagcgccaagattcccgagagacgcgcactgtttctcaacaaacgcggcaagcgcatctcgcggcaatcggtatgggaaatcgtcaaagcaaccggggagcgggccggcatcaccaaaccactccatccgcacaccttgcgccattccttcgccacgcacctgatccaaggcggcgcggacgtgcgcaccgtgcaggaactgcttgggcacgccagcgtgaccaccacgcagatctacacgcacgtaagccccgaaaccctgatcgaaacgtatctgacctcacaccccagagcgcggtgagacacaccattttgcgactcgtccgcccatagcggaatcgcggcggggggggggagcaccaaagtcggccggaaattcaaggcgtgacaatacagtacataacagcgaaccgtcagccaggaagaggtattcatgctgcagatcaaatcgatctcgaagcgctataaaaccggtgatttcgttcaacaggcgcttgacaaagtcagcctgaacctacgcgacagcgaattcgtcgcgattctgggtccctcgggttccggcaagaccaccttgctcaacatcatcggcggcctcgaccggtatgacgacggcgatttggtgatcaacggcatctcgacgcgccaatacaaggatcgcgattgggattcgtaccgcaaccacaccatcggcttcgtgttccagagctacaatctgattcctcatcagacgattctgtcgaacgtcgaactcgcgctgacgatttccggcatcggcaaggccgaccgtcgcgaacgtgcgcgcaaggcgctggagaaggtcggactcggcgaacacatcaataaaaagccgaaccagctgtccggcggccagatgcagcgcgtggcgatcgcccgcgcactggtcaacgacccggacatcgtcctggccgacgagccgaccggcgcgctcgattcggacacgtccgtgcagatcatgaacctgctcaaggacgtggccaaggatcgcctcgtggtcatggtcacccacaaccccgaacttgcggaacaatatgccacgcgcatcgtcaacctgcgcgacggcgtgatccgctccgactccgacccgtttgtcgtggatgagacggccgaacagccggccgtgcacaagacgatgggccgcgcgtcgatgtcgttcgtcacgtcgctggcgttgagcttcaacaatctgaaaaccaagaaggcgcgtaccctgctgacctcgttcgccggctcaatcggcatcatcggcattgcgctgattctatcggtgtcgactggcgtgaacgcatacatcagcgacatccagcgtgacacgatgaccgcctacccgatcaccatcgactcccagaccttcgacctgagcagcatgatgggcggccagatgggcggcgatgacggatacggcggcaagacgcacagaaccgacggcatctacccggacgaccgcagcgtcaagcaggcatccagcctgaccagttcgattaccgaaaacaacctgacccgcttcaagaaatacctggataattccaagagcgagattcaccagtatgtgggttccgccggtatccagtacacgtatgacgtgaaattctccgtgttcgaccacgaccccgatggcacgctggtcaatgcggacggcgtgacgatcggtgccagcgactccacttcaatggcctcgcagatggcgtccacaagctcgtccggcatgtccggcacctcgtcgatcacctcgcagcagatgtcgatgctgaccggcaaaaccgatgagaacgccgcgcccgactcgttcaatgagatcatgcctggagcggacgacagcaagctcgtaggcaaggtcatcaccgacaactaccaagtggtcaacggttcatggccgaagtccaaggacgaggtggtgctggtgctcgacgacaacaacagcgtgccgctgaccacgctgtacgagctcggcctgctgcccgcctccgactaccacgagatgatgtccaagctcaacgccggcgacaaggtcagcactccacaagacaagatcgactatgctaaggcgctcgaccagacgctgtacatgattccggcatccgaccagtacgtcaagggcgatgacggccactaccgattcatcggcaacgacaaggatgtaatcgaacagcgcctcgaaacggccaccaaactcaaggtggtgggcgtcgtcaaggcgaagaaggatgcttcggccacaccgttggccgctggcgtgggatacacgcgcgctctgaccaatgatctgatcgaccgtgcggcctccagcgccatcgtcaccgatcagaaggccaacccgaacacgaacgtgctcaacggcatgacgttctcgccctcggacgacgccaccaaggcggccgacgcgcgcacctacgtggtttcgctgggcgtgacgcagaaggcgaacatggccaagtcgatgatgagtgccgggcagcggtccggtacgggcgcatcggatgccgctggtgctggtgctggtgctgg

SEQ ID NO: 400 - DNA, 3043 bp, Unknown
  R48_24m  MAG No. k141_3323
cgacggccttggtgttgccgttgacggtgtcggcctgggtcttgaaccaggagtcggcgaggtggtagcgcacggcttaggacgcggcgacatacacgtcagcaggggtggtctgctcggcggtgacgttttgagtgtatttcagttgttcacgaatctcgtcggcgaattgttccgccgtgacgggagacttcggtgcggtgatttcggtcattctgactttccttccgggataagtgcccgtaattattatgccgcgcgataggtatcgtctcacaaacgtaagcatgaactctccgtaacgacgatagcggagcgctcttgcatacgttctcattgagaagcgtatcacatgtctcacagttccgcatcacaccgtatgccatcgtttgcattacggaagatcttccggatccggtgccatgatggagcatatggcagtaattctcgaaaaagacttgaaacgagggcacgacgcactggtgcaatggcgtgccgcagccctggaactggccgacaacacgccacatcgcctgaccgcctcccccattctgccgcgcccggtatgggcgatggctgtgcgctactcgctgttcctgctggagcggcgcgcgcccggccccggcgtggaggtgcgcgtcgcgccgtggggcgcggtcaagatcctggacggcccggaatcggacccgcacaacctcactccaccggacgtcatcgaactggagcccgaggtctggctacggctggcctgcggcatcaccacctgggcggaggaaaaggacgccggccacatcagcgcggtcggcgagcgcgacgacctaagcgacctgctgccgctgtagtcgccgccgcaggccgcccatcagaactgggcgataccccagcgctggatatgctcggcccagtggtccggcgtgggcagggtgacgaggctgcgcatcgtcagcgcatagagggcggcggccaccagcacggcggccagaatcaggcaggtcggcccgtagccgatggtctgcataccccagccggcgagtgccacggccacgccataggcaccgtactgcaacaccatgctgcccgctccaacgcggccgagcttgtccttgcccaccaaggtattgctgaggcctccaagcaccgcgttgcccgcgggcaatgccagtaccgagcaggccacaaatatggccttgccaaccatggagggcaccaacgcggcaccggtgaatcctacagccagcaagacgaacatcacgcccaccagtacgccgccgggcacacggttgaccagttgcgaggccatcagtgcgcccagcaacatgccaacggcggaggcggcgttgatgaatccggcggatatcagctggctgccaccttgggagatgtccagcgcggtcagcagtaggaaggcattgctggcaccggtcaccatggccgctgcgatgatgagatggcgttggaaccggtcgcgcagcagccagatcatgccgtccagtgcgtcgcgccagcgtggggcggagtcatcggcatcatcggcgtccgagacggccccgacctccgaaccggtatcaacattgcccggacggccgctatcgctcacagtcgcacgtttccaatagcggcggatacgccatgcggacaccatgcccagcacgctcagcaccgcgctggtcaggaacggcaccgcatgtcccacggtcatcagcagaccgcccaacggaccgcccaccaacgtgaccgtcgaatcacgagcatcattcaacgccatcgcgtgcggcagctgctcatccggcaccacgccacgcagcatggcattcgacgtattctccaacagcccatcgcgcaccgaaaacagcacgacgatacacagcagcgcgatcggaagcacgtgggcatacggtccgccgaatgccggagcgtttgccccgttaaccccatggccgctcgtcttcggcgcattgccgaacagcatcaccgctgccgccgccaccgccgagagcaccacaccggacgcaccccagatcagcatgagcgtacggcgatcataccggtcctgaatcacgccgccggcaaggcccagcaccgtctgcaccaccacgcagatgctttccgtcgtggtggcggcggcagaggatcctgtcgtggcgagcatcatcagcggcaccgcgaacgcgatcagactggcaccgaccgcaccggacgtgtccgcagccagccaccatccgtaatcagttccccgccataattccgtatcacttgccatcgttgccctccctgggattggtccttatggacgccaccatagggagccgccgccgagccgaacacccgcaatcctcggttatggggacatggctgcggtcgtcgtcctcatttgtgaggacagggcacaatcagcgccggacgccggacatcgcagcttctgccccatcagccccgcacgcacgggatacgcacgtaaatcatccacgtgccatcatccgaacgggtggtcaattcaccgcccaactcctgcacacgggtgcgatgcatggccagcccacgccccgaccgctcctgcgcggacaggccactctgcgcgtcggcatcgtcacggatatcgttggtctcacgaatctcaatccattcgggagacagcgtgacgaacagcagataggaatcatctcccgccggtgcatggcggcggatattcgtgccgatctccgtcatcagcgacagcgcctcggccgccgcctcggggtccacaaccatggcgatgccgttgaccgcggccgtcccccgatagccctgcgcctccagaaactcctcggtatcggtgatctgcgccttcacacgcgtgacgaaggattgcggcatgcccgctgtggattgcgtacggtcatcgccaccggcgttctcgggcacggcattgtcaaccacctcattcgcaatcgctggacagctcccggtgcctaccgggtcacgagccagggcggattctttcgtcggcgaatcaacctgccctgattctgcagtcgccacctcagatgtcccggtgccaccgacc

SEQ ID NO: 401 - DNA, 8186 bp, Unknown
  R48_24m  MAG No. k141_3611
atgcatcgcattatgctcggccgggaacgttccgggggagaggggcatatctggacagagggatactgcgtttgaagagcgcatataggccgtatcgtatgtggaatgtgccgattcgatgccgcgcctgatactggtgaataatttcccgacggtgacgtctgtgccgttgagctgcagggtgacgattgcttccatgatgtgttgcgcctcctgctgtgctatcgaatacgtttcggagtgtcttcgtcggcgcgtagtttgccgatatctgtgttaagagggtccgtcgcttgctgtacgccgcccagcagtccaagcagacgaacaatgcggaggaagttctcaaagctgccattacccgtacgcagcattttggtgaccgttggcacggataatccagcccgctcggccagcaaggctacgggaatgcgctgttgtctgcgcgccaaatcgaggttggcggatatctgacgcatcgcccgactgaccgggattggtgtgcgtgtcggcatattggcacctcctatcccaaattttaacataaataattctttagcttatagttacatagctaaagaattatttatgtaaatttgtatggactagccttatgcggaggttacgccaatatacgacaagaacgaaccaacgtcagcccggaatcttctcgatgatggtgttcaaggtgtcgaaagcctcatcgatttggtccactacctgcttgccctggttgaccatttcggtgatctgttctgtgtggggttgcggcagcgcataaatcgacgtcttgacgcgcttcaagaccacgccggcgtcggacagatcctgcttgatggaggcgattttgggaatggacagcgtgccgtcggagaagttcatgccggacagcagctcttcgatattgaagtccaccaacgtgccctgcgcggcactgtcgattttgggcagggcgttggtcgcggcgtcggcggccgcgcccagcatgccgcgcaccgctttcacgtccgaaccgtaatatggcacgtattcggcggcctgccatagcgcgccctgggtttcgtcgtgcgccgtgacgatgtgactgccagcgctgtccatctgctcaagcgcctgcttgaagtcgccctgcccgacggattgctgtgcttcagccgcatattcgcccgcctgctgcgcctcgccgatcacccgttgtaccgactgccagaatagccagccggaaacgcccaccgtcagcagaatagcgaccagtattgcaataacaacagtgccgatatgtttgcgcttagccataggaccaatgtacctgccactctgaccagtattatttacggattagcatcgtggcctgggcctcattctggctcatcggtatgttattggcgatgcgtagcggtggttatgcaagtgtcttttgattgatatcggcgcatgacaggtgaataacgtgtagcgggaaagcacgtctatggtcatattggcgttctcggcacagcaataaccgcggtattttttaaggtttgccaattcttccatctggtatgtgccgaacatggtgctgtcatgcgattgcttgacggcatattgcctagcttgaacgatacatcccattatcgattgcggttgacgttgcgtaaacgtctatcctgatggcaacgccgcgaaacacgcacggcgggtagaggataatcggcttcaagggggatgatcgatcatgaacgagaacgacaacacggcgaacgccgtcaacggttccggcgcgttcgatgtggagggcaatccgctggatacgggccggttgtggcccattgatcaggcggcattgatcagcggcgtgacgacgcgcacgttgcgctactgcgacgagaccggtctggtcaagaccgcccgcacccgggcggcacagaatcaaaccgcgaccgtgatgaacgccatgccgctgtccggctcgttcggggccattcgctccgcgctggtcggcgatccgcgtttcgccgacccgtgtggtgaggcgctctacggcagcaaggcatgcgccgacttcgtcaacgaagccaagaacatccacgcacggcaaatcgccgaacggttcgcggcggaacaggatgtacggaatcagccgaaatgacagggcgtccggctccgattgcgcgacgaaccctgcgaccacgtcaccggcttaatcatccaagctgcgcgaagcggcgcaaaagatgatgagtcggcataagcggcgtagggttcagtctgcgtgttttgcacagtgagttacaggtcctgaacgttcatacgggccagctcggcgcgacgattgatcttgtcacgctgatacaagtagatgccggccagcacgatggtggatacgttgttggacaggaacgcgatgaatgcggaaagcacgacgttccacatgttgccatacgcaccgatgtccgccctggcgaagacggtaatcgccgccacaagcgacagcagcaatgtgatggcgggcaataccagaccgggccacttgctgtccatcttcgaaagcctgatctgcaatatgatgaagccgatgcagatggcgatgagaaacacgaaaaacactacggcaaatattgtggcgccaatcatgattactctccttgcttgagctgcttgcgatattcgctgatgaggattttggcggtgtcgaagtcgagcttgtcgtcgaccgcgagccgtttgatgagcgcgatatacggctcgttctcgatctgctcgcccaacttgattttctggatgagccggtcgagccgaagccgaacggtggggtaggagacgtcgtactgcgcggcgacctccttcatggagcctgatgcgagcagaaaccgtttgatgaacgtcatatcctcgtcatcgaggttcgacatccacggcgggatcatcgtcgtatccatacctgcctccttcaattcacggcgggtttaataaaattaagtataccataaataatattaaaatcaaatagatatctgtttaaagtttttcgtagattagtttgaggtcgtgatgtaagaatgcgtacgcggacgcgaaggaccggcacatgtcggcacgcatgtagaagcatcggtcaatcggatatgcatcgacagcaccctaaggcattgacggatagccgattcctgtcatgcgatcgcttgacagcatgttgtctgattgactctttgagtgccataattgagatggcatgcgtacgcgtcggactttatggaatgcggggacgatatggttgcggacgatgaggtgcgggcctcccatggtgggcgtcggaatcaaggtctgctgtggtttttcggcgcttccgccacattgggcgtggccgccgtcacggccatcacgtgcgccgtcatccggtacggctggaatgacggggagttctggaagctggtggtgccggcggccgtggcgttggtggcggccatcgtgtgggcggcgctcggcttcatgcgtcgcgccgggcggacgcctgacgttccggccgacgcgaacgataccagcccggccgaatccaggttcgattcggcggccgcccagattctggcgatcgtcgccatcaacgtgtggggcgtcatgttcatcgtcttcgatacgttccagattgacccgtggcggtacgtgacatgggtcgtgcccgtgatgttcctgctttatctggcggtcttgggcatcggcagggcttgtttccgcaaacgacagaaggatattcgcttcccggaggaaccaagtatgacgagcagccgtccatcatacttggcataggcgggcagttggacgatgccgggcaggtcctcgttgtcgctggtctggttgagggcatattgggtgccggtcatggaacgctactggaatctgtcaccctagggtgtcactttccgtgtttacctcgacctgccatgcccctggcgcgaaggttgagaaaaacggcgtcaactttcacgacagggggctacctcatgacttggcaaaatgccggcacaccgattcaggcgctcggactggtgaaacggacagggttcgatgctcgaaccgcctcccgacccgcaaacacgcagactgttctcaataatgtttcgttggatatcgatggagcgggcttgacggcgatcgtcggtccgtccggcgcaggcaagacctcgctgctgtatgtgctgtccggattggacaggcccgattccgggcgggtgaccatcggcggtaccgacgtctacgcactgaatgaggaacggcgttcgcggttcattcgcgggcatatcggtttcgtgttccagcaatacaatctcgtgccgtatctgacggtcgaggagaacgtgatgttgccgctctcgctcgcccatcgcaaggccgactacgtgcaggtcacgcagctgctgtcccggttcggtcttcgccagagggcgaagacgacggtaagcgccctgtccggtggcgaacagcagcgcgtcgccctgtgccgtgcgctgctcatgcgtccggcggtggtgttcgccgacgagccgaccggcgcgctcgacaccgcgaacagcgagcttgtgctgcaggtgctgcgcgagctggcggatgcgggctccagcgtggtcatggtcacgcatgacacggatgccgccgctttggccgaccacgtgatcttcctgcgcgacggtcaggtcacccacatcgctggcagactcaccgccgagcagattgccgatggcatacgccgcactttcgtaccggccgggtcgccgccgttggttgcggcggcgcggtctgtcggcccgatgatggtgaacgcccagcctatccaatccgtccaaccgggccgaccggtccagcgcgtggcgtatccgcagcagcggaaggaggctcatcgtggctaggtatgtgctgcgtgtgttccgcgacaatgtcacgggatgggtacccacgattctggtggtcgcagtggtgaccacgctggtgggcatatgcatgaaccaattcgtgtggacctcgtctccgtcgttcacattggccgcgcggcaggcgggtcttgatccggccgagttcggcatggtgtcggtcacgatctatgtggtggtgtcattactcgcgttcttctcgttgacggtggtcggctcggccacggtcaaccgtattcacagcacgttcgcgcaatggcggcttatgggcgccagcccgagtcaggtgcttgccagcatgtggatgctcgtgggtgtggcgagcctgttcggttccctgatcggctctctggctgcagtgccggccagcctgctggcggttcccgagttcaacgccatggctgcggaaagcttcgccgatggattcggctcgttcgcacctcctgcgttcacgccgtcgatggccgcgtggctcggatccctgctgttgggtgtggccacgtgcatgttgggcgcgtccatcccctcgctgcgcgcagcgaagatccgtcccatcgaggtgattcgcggcacgggagccatcgggatacggcacggttggcggtcttgggcgcactgggcacttggtttgattgtcatggcggcggcgctggcattggcgttctccggcatgggcacgccacgggcgctcgcgttcggccaggaggcggggcagacattcaacagcgcgctgtgggccggcatcatcgcctcgttcggcatgtacatccttgtcagcatgctgattccgattctgttgggcatcggacgtgtcgtgtgtcgcctgtgcgggtccgcgaccggcgtgctcgccgcccgttccgccgaggcgaaggccgccagcaacacgaacacgattgccccgctcgcccttgccatgggactgtcggtcaccctgctgacctgcgcgcgatcctatggccggatactcgccttgggcggccatccgaagagcctgaactacgcggactcgctgctgctcataacgatgctgtgcatcgtgtccctggccaccagcatggcggtcatcgccctgtcgaaccgcagcatggtcgccgaccaggcattgctgcgcagcatcggcctgtccccacgtcgtgtgatccgcatgtatctctggcagagcctgcagctggccgccggcgcggtcattctctcgctcatcccggtcgccgtcagcgcaagcgttttcgccgcaagatccgcggcgctcgtcggcatccccgtggccgaaatcccatggccgggcgtaatcggcatgggcacggcctgctggctggcattgttcctcatccagttcacgcagattcgccccgcgctacaccgcagcgtggccgacacgatacgcacatgctgacatgcacgcaacatcatacaaaaagagccacaatgggagccatgaaaccgcaatccgcgcaggccaataaggtcacggtcctggccgtgccactggtcatcgccgtggtcgaatgtgcagcgatgctgtgggagcatgcgatcggagcgccggccgacaccatgtatacgtttgccaaagatccgctgggattggctctgctgctggcgatgaccatagccagcagtgcgatactgcttgtccgttactggctgccagccgttgccttggcgcttgaagcggtattgttaatagttgcctcgtactggcggttggactcaatcgtgatgattcagacgctcgtcgcctgctatgcgttcgcccggacagcgagggggcgcgggctgtgcgttggaggcatcggcatgatgctgtcgatgaccgcgtcggccatcatggtgcatccggacgttctcgcgaccgaatgggtgagtcgagtggtaacgttggcagccgtgggaggcggcgcgcttgcagtacgtggcaggcaacaggccaaggaagccgaacacaaagctgccgaggaatgccggcgggcagccgagctggccttccaacgcgatgccgcaatacgccgttcgcgcatagccggtcaactgcacgacagtgtgggccaggatctgaccgtaatcatcgcactgtctgagggtctggccggcaaaaccgatgacccacgcgtggaggatgcgctgcacggcatcaacgaaatcgcacgagagagtctgggcgacacgcgcaaagccgtccgcgcactgaccgagttcaatggagcggcgaacggtgacgatacgcacacccaagaatcagaccagcattcatgggatgacattcggccgattctcgcgcacgcacgccggctgggcatcgtcacggtgttcaccgagactggtacgcgcgccgatgacgaagctcaggctgatttgtgtttcgatgtgactcgcgaagccatcaccaacgccatacgtcacggacagaacgtggtgcatatcagcatcgcctggaaccacagcgagaacggcaccgtcgccgtgattatccgcaatgacggcagtcccgcgcgcaaggacgcgcgcaaggatgacggtactgggctcgtccgtctattccaccgcgtcgaatcggcaagcggcatcttcgaatacggtccaaacgaagacggcgaatgggtcgtcgaggcgaccatcccgtccaacggagtgaacgaaaaggaccacaccgcatgattcgtataatgctcgtagacgaccagcgtttcgcgcgacttggcttccaactcatgcttgacgatgcttccgacatcgtcgtcactgcccagtccgctgacggccgatccgccatcgagacgctcgaacagctcgccgttcagcatcgtccattgccgaatgtaatcctcatggatgtgcggatgcccggtatggacggcatcgaagccactcgccgcatcaccagacgctggcccaccatcagcattctcatccttaccacgtacgacgaggacgattacgcctttggcggtctcgacgccggagccagcggcttcctgctcaaggacgtcaccaagcacaacctcatcgacgcggttcacgccatcgccaacggtgacgcaatactcaccccacgaatcaccagacaagtgcttgaacgaggcgttccgcatcccaccagcagccagcgccagcaagaaatgcgcaaagctttcgacgcacggggctgcggacgttttcttggagactgagcgaaaggattttcgtatgttcagtcccgaagaacgggagcgtgcggtggagttgtatttcaccacgccgatgaccacggcccaggtggtggagcatctgggatacccgacc

SEQ ID NO: 402 - DNA, 8833 bp, Unknown
  R48_24m  MAG No. k141_3949
agggccttggcgatgtcaccggagtagtggatgccaccgtcggcgatgcagggcacgccagcggcacggcaggcctgggcggcctcgtacacggcggtgagctgcgggacaccgacaccggcaacgatacgggtggtgcagatggagccggggccaataccgaccttgacggcgtccgcgccagcctcaatcatggcctgagcaccggagcgggtgccgacgttgccgccgatgatctgcacgccgtcgaaggcggagtcgtgcttcaggcgggaaatcatgtcgagtgccagacgagcctcaccgttggcggtgtcgaccacgagcacgtccacgccagcctccatcagagcggaggcacgctgccaggcgtcgccgaggaagccgacgccggcggccacgcgcagacgaccctgctcatccttggtggcgtccgggtactgctcggtcttgacgaagtccttgacggtgatcaggccggtcaggtggccttcctcgtcaacgagcggcagcttctcaaccttgtgctgagcgagtagacggtgagcgtcgtccttggagatgttggacgggccagtgaccaggttctccttggtcatgacatccttaaccttcagggtgtcgtaatcctcggaggcgatgaagcgcatatcacggttggtgatgatgccgacgagcttgttgtccttgtccacaaccggcagaccggagatgtggaacttgccgcacagcttgtcgaggtcggccagcgtgacctcggggttgacggtcagcgggtcggtgatcataccggactcggaacgcttgaccacatcgacctgagcggcctggtcgtcgatggacagattgcggtgcaacacaccgatgccaccgttacgagccatggcgatggccatctcggactcggtcacggtatccatggcagcggagaggaccggggccttcatcacgatcttgcgagtcagatgagtgctggtgtccacttcggagggaatgacatccgtctcgttcggcaacagcaacacatcgtcataggcaaggccgagcttggcgaaaatcgggggaaggggagcatacgccgactgggcgtttaattcatcaaggtttgtagccatgtaaacactatatgaaaatgcgctgaccttcacgacacacgcttgtgagcgctcacttatccgctgccgggtcctgcacctcacccacctgcgagtcccgcgaatttgcaggcgaatcagtcatcgaatccgctgcctgagagccaatcgaatcccggctctcccctactgcagactgcgatttaggcactgtatgctgcgcgtttttacgtgcggattcgaacgtcaggttctcggcttggatctcgggaatacgatgccgcagataggggtacatcgtggctatggtcagcaccaccacagcgatggccatgcccacggccacgtgctgcgctttgaagaacagaatcgtcagcgaaccgaatgcgatcaacgcggcccatccccacagaatcagcacggcgccacgcaccgaatgcccgatcttcagcatgcgatggtgcaggtgcatacggtccggatgcatgggcgactggcctttggccaaacgccgcacaatcgccagacacatgtcgagcacaggcaggaacaacaccagaaccggcagcagaatcggcatgaacaccggcagatagatgctggcatgaatcgaggccgggtcaagacgtccggtcatcacaatcgaagcgcaggtgatgagatagccaagcagcatcgaaccggaatcacccatgaacagtttggcgggatgccaattatgcagcaggaagcccacgcagatacccaccatcatcacgtcgatcagcgtggccaacgaagcataactcggggaagaccgggcgatgatatacgaataggcggcgaacgctatgccaccaatcgccacgataccggccgccagaccatcgaggccatcaacgaaattgaccgcgttgatcgaggcgacgatcaggaatgcggtgatcgccatggacagactcggcgaggcggtaatcagcgaaccacccaaaggcagtgagatgatctgcaatccgtcccaagccacgaatacggaaatcagcagctggccggcgagtttcagcatccaatcgagatcccacaggtcatcggccatgcccagcagactgatcatgatgccgccggcaagaatcacccacatctggtaattgccgttgaacaatcccgagagaaaaggcagccgactggcgaatacggtagccacggcaaaaccgatcagcatgccaaggcctcccatgcgcggcgtgggaatggtgtgcacgtctcgggcacgcacctcgccaaccgcaccgatttcgatggcgacgtggcgaatcagcggagtcaccagccaggtgacgccaccggcgatggcggcaatcagtaggtagattctcatgcgccgagtcccccgccgttgaggtggagggccttgcgaatcacgttttgggcgatgacgccttcacgcaggatctcgatgccgtcgcgcgcgtacggatcggctttgacgacggtgctggagacatggccttgggtgggaccgccgtccagatacaggtcgacttcgttgccgaacgcgtcaaccgcctcctggacagtctgtgcgctttcgtcgccggaacggttggcgctggacgcggccagcggaccagtggccttgagaatcgcgaggcacagcgccgaattggggatgcggatgccctgcgtgccggggcgaccatcggcggtgtcggccaaagtctccaacgtgcagtcgggccgggctacggcaatcggcgagaacgcgccgggcaggaacgccgccgacaaacgattcagtggagacggcaggtcgagaccgagttcatcaagctggtcggtggatgcgagcagtacctgcaacgccttatagcgcgggcgacgcttgagccggtagatacggtcgatggcggccttattacgcggatcgcacgccactccatataccgtatccgttggaatgacgaccaatccaccatcccggatgacacgcgccgcttgtgccagcgattcatccgtgactttcagcgttgttccgccctccacgctcacgacacctccgttcgcctgtgtattcacaatctaccattgcaccattgcgccccgacttgcatagttcatcatcgctcgtttgccgtactgctgttttccgattcgccccatacgcacagaccgtagatacaatgagttcatccatgctctttcgcgaaattacaggagtgttcaatgagcggaatcaatgctgaatccaccaccatgcctcccgtcgaactgcgtatgccgcgcgccagcgagcgcgtgttcgccaacttcaacttcactgtgctggattgttgcccggtgacgattggcgagggttgcgtgatcggtgccggctcggtggtgacgcgcgatattccgccgcacaccgtggccgtgggcaatccggcccgtccgattcgcgaaatcacggacgcggacgcctccgccctgcagtattacgcgcagtagcagcggcggccccgcgcctgtggctacttctcggcgaagagatagcggtctcggccggtccaatctttgccggtggaggcggtggcgaaacctgtggccttggcataggccactaatcgctcgccttgggtgagatcatgctccataaccaatacgccgccgggcttgagcaggcgccaggcgcgctcaataatgcgttcagggatgagcgtgccgtctgccgaaccgccgtatagcgccagttccgggtcccagtcgcgtacttctggttgttcggggatgtcggtttgtggcacgtagggcgggttggtgatgacgatgtcgatggtgccgtcgagttgcgccagcgtggccagtgacgtggcgtcggcgacttccagttggtaattggaggcgatggaggggtatcgtttcgcggttaccgccagattgcgccgggtccattcggcggtacgcggggataattcgacggcccatacttggctgccgggcacttcgctgactatcgacaggccgatggcaccggaaccggcgcacaggtcgaccatgcgcgggtggatcatgctgtgccgggtcagccagtcaagaccggcctggactacggtttcggtttccgggcgcgggataaagacgccggggcccacctgcaggtcgaggtagcggaaaggcgtgtggccggtgatgtattggagcggctcgcgtttggcgcgtcgggaaagcatggcgtggaaggcggcaaggatattggtgacggggtcggcctgaccacccccagtcgctgcgcgacagcccccgccggcgggggccagcgaatcgaggccctcccccatcagcatggccttgtcgatatcgcgtagctcggcgtccacggcctcggccagcaacagtttggcatcatgttcgggcgtctcgatgccggcttcgcgcaactgcgcggcggcttgacgaatcaggtcggctatcactgctggttggccagacggtcggcttcgtcggcttggatgtcggaatcgatgacggcctgcaggtcgccatcgagcacggcgtcaaggttgtaggccttgtaattcgtgcgatgatcgacgatacggttttccgggaagttgtacgtgcgaatacgttcggagcggtcaagcgaacgcacctgcgagtgacgcatgtcggcggcttcggcggcctcttgctcatgtttcatggccagcaggcgagacttcagcacacgcagcgcggcggcgcggttctggatctgcgacttctcatcctgcatgttcactgtgatgccggtgggcaggtgggtcatgcgcacggcggaatacgtggtgttcacggactggccgccggggccggagctcatgaagatgtcgattttcaggtctttcggatcgatctcgatctcgtcgtcatcctcgtcggcttcggggaacacgatgacgcccgcggcggaagtctggatacggccctgcgattcggtgacggggatgcgctgcacacggtgtacgccgccctcgtacttcatcgaagcccacacgccgtcttcgggagcgggcgtgcccttggcgcggatggcaatctgcacgtccttgacgccgccgagctcggtggtgttctcggactgtacgttcacgctccagccacgcttctcggcgtaacgggtgtacatgcgcagcaggtcgccggcgaacagtgcggcttcttcgccgccggtgccagccttgatttccatgatggtgtcgcgtgcatcatccgggtcacgcgggatcagcgcggtacgcaacttctcctcggcgtcgggcagttcggcttcaagacgcttggcttcctcggcgaagtcggcgtcctcgccggccatctcctgagcggctgccagatcgtccttcacctgcaaccaggttttgtaggcgcccacgatggcacccagttcggcgtgacgacggcccagcttgcgcagcttgtccgggttggacacgacttcggggctcgccatctgttcttcgatggactggtactcctcaagcgcggttgccgccgccgggaactgttcgtctgccataacacgctttctttcgtacggtggtgtctattcggttgtgcaggtcaaaaaaatgtcaaagaatacaaaaacgccagtcctcgatcgggtatgccggagcatgccgaatcgaatcggactggcgtgaagtatgctacttgctcttcttgccgtagcgcttctcgaagcgagcaacgcggccaccggtgtcaagaatcttctgcttgccagtgtagaacgggtggcactgagagcacacgtcaacgaacatgtgatcttccttgccagcggtgcgggtcacgaaggtgttgccgcacgagcacgtcacctcaacggggtggtaatcaggatggataccctgctgcattttacgtctcctatggattcgggggacccgggtcgtcatgcccctatggcaggacgtgaaccggaacctaagggattgtacgcgcctatctggacgtgaagacgcgctgtgccgccgcaggaggcgacgcaaaagagtggggccgcaggggcttgaaccctggaccgggcgattatgagtcgcatgctctaaccgactgagctacggccccacgttcgctgcgtaaaacagccaacttgcaaagtgtagcatgaacccaccaacgccggcacacgcaccatgcgcccatgccatgcacccgccagcacaacaagcagcatctcccggcgctacttctcccccatgtaccccaacgggttctcgatgaaccgtcgcaagcccatttcggccgcgccatatagcgagggatgcagcgccaccggcggcacgaacacgcggatcttcacattcgggtatcccagaatttccgaacgcagccggccttcaagcacggtggccagctcgtcgccgaagtgcgtccacagtccgcccaacagcaccgtatcgacatccaccagattcacggcggaagcgatggcggaaaccagcgcatcagcggcctgatcgaccactttggccacgtctggatcccccgcacgccaacgctggaggaatgtatcgatggcctcgctgctggtggcatccccatcctcggcaatgccggcagcctcgaccaaggcgcgacggcccgcaaacgcctcaaggcacccgtggcgcccgcagctgcacaacggcccatccatcgccacggacagatggccgatctcgccggcgaatccgtgcgagcccatcaccacttcgccgtcacgcaccaccgcgccgccgatgccgatatcggtagacaggtaaataaaggaatccgtgcgatccaccacattcaggaaggacgcacgttcggtggcataccccggaatctgagcgatggcggccatcttcgcttcgttaccggccaccacatccagccggcgtaccacgttgaaccgggtgaggttgacgttttcccaacccagattgcgggccaccaacagccacatgtcgtcggtgacgatgcccggcagcgcaagcccggctcccaccactttgcagccacgtcgtttgagtcggctttccaacggaaaggtcatcgcatcgagcttggcgaagatctcgtacgggtcagtgccggtcatatcctcactcacccactcctgaccgagagtgtcgccgttcagatcgagtgccaggcaaccgtagccatcggtgttgatctgcaggccgatgccggcgatggacccgccatgaatctccagcggcgtgctgggccgcccatatgtggtggagacgaccggctcgccttcctgcaccacgccactatcgatcagcatcgaggccaacagcgaaagcgtggccttggtcaggcccgtttccttggccaagtcggccctgctcatgggtttctccgcgcgcaacaaagtgtcgagaaccaccgacaaattatggttgcgcagatcctcctgattgatcctgcgtagacttgccataggctcctacctccttgcacccctagtctcgaacgccgcacaggcgctcacatccgtctatcgcacaatgatattgtgcgtcaaacgattgaaccagatacgcaccctcgcgtgtttccgtttgcaatcatacactgcaatacagtatagtttaatcgtctaacttattggttgtggcgcgccgaaacttgcaagcgcgaccctcatcgaggaggaatgcatgacgaaagtactggttgccggcgtagatacgtcaactcaatcaacaaaggtccgcattacgaacgccgccaccggcgaacaggttcggttcgggcaggccaagcacccggatggcacctcggtcaacccggaattctggtgggaggccttcaccaaggccgccgagcaggccggcgggcttgacgatgtcgcggccctcgcggttggcggccagcagcatggcatggtcattctcgacaagcagggcaacgtgattcgcgatgcgatgctctggaatgacaccagttccgccccgcaggccgccgccctgatcgacaagctcggtgcaactccggccgagggcgacgaaccggacgacgtgaccgcccgcggcaagcagcgctgggtcaaggccgtcggatcctcccccgtcgcttcctacacgctgaccaaggtggcgtgggtggccgagaacgagcctgagaacgccaagaagattgccgccgtctgtctgccgcacgattggctgagctggcgtatcgccggctatggcccggtggccgagggcgaggacgctcatctcgaagccctgttcaccgaccgttccgacgcttccggcaccatttactacgatgccgcgcatgacgagtaccgccgcgatctcatcgccatggtgctgacccccgccgagggcgaggaagccgccaaggcccacgccgacgccattgtgctgcccaccgtgctgggcccgcgtgaggcagccgccgtcaaggccgaccccgccattgccggcaaggacgttgaaggcggctgcatcatcggccccggcggcggagacaatgccatggcctcgctgggcctcggcatggccgtgggcgatgtgtccgtatcgctcggcacctccggcgtggccgcggccatcgctgaaaacccggtgtacgacctgaccggagcgatttctggctttgccgactgcaccggtcattatctgccgcttgcctgcaccatcaacggttcgcgcattctggacgccggtcgcgccgcccttggcgtggactacgacgagctggccgaactggcctttaaggccgagccgggtgccggcggcatcaccctg

SEQ ID NO: 403 - DNA, 5766 bp, Unknown
  R48_24m  MAG No. k141_4091
accggcgacctcgtccgcgcgcagctggcgagcgtcgaagccagccccaccgttggccgcgttggcgtacagggtgaagaagtagtaggagctccacaccggcagcatgacctggcgcacggtgtcgcgaatgccttcggcggtgacgatcaggttgccgccacgcaggatcggcgaagacatgaggaaccagcgcatggcgtcggaaccgtacttgtcgaacacgccgttcacgtccgggtagttgcgcaggtgcttggacatcttctggccgtcggagccgagcacgatgccgtggcagatcacgttcttgaacgccgggcggtcgaacagggcggtcgccatcacgtgcagcaggtagaaccagccgcgggtctggccgatgtattccacgatgtagtcggccgggaagtgctgttcgaacttctccttgttctcgaacgggtagtggaactgcgcgaacgacatggaaccggactcgaaccagcagtcgagcacatcggaaatacggtgcatgtgcgacttgccggtcgggtcgtccgggttgacgcggaccaggttgtcgatccacggacggtgcatgttgatgttgccgtccttgtcgcgcggatagtcgccgaagtcggccttgagctcttcgagcgaaccgtagacgtccacacgcgggtacttcggatcgtcgctcacccacaccgggatcggggaaccccagaagcggttgcgggagatggaccagtcgcgcgcgttggcgagccacttgccgaactgaccgtccttgacattgcccgggatccagttgatctgctggttcaattccagtagacgcggcttgatcttggtcacggacacgaaccaggaggagaccggcttgtagatcagcggggtggcgcagcgccagcagtgcgggtaggagtgcacgtagctcttctcctggaagaggatcgcgcggcgctcttccggaatctcggcgagcgggccgtcgccggcgcgcaggttgcgcaggatcggcaggttggcgtcgaacacgaaatcgccctcatagtcagggcactgcgcggtgaagcggcagccatcgtcgagcacgtcggtgctcttgatgccgtgcgcgttcagcgtattcatatcgtcctcaccgtagggagcctggtgaaccaggccggtaccttcgacggtgtcgacgtagtcggcggtgaagatcgtgtagccgttcgggccgggcacgtggccttcggattcggcctcgtcacccgcgaagtacgggaagaccgggtagtagcgtcggcctgccagctcgttgcccttgagttcgcgcacgacctcgtaattctcgccgagttccttctcatagtgcggcagcaaatccttgccgaggtagaacttcttgccagcgaacttgccttcggtcgggcggacctcgacgtagtcgatgtcggcgccgaccacgatggcgaagttggtgggcacggtccacggggtggtggtccagaagacggcgtaggcgtcgtcctcatcgcgcatcttgacggccacggatacggtggtgtcctggcggtcctggtacacgtcggcgtccatgcgcagctcgtgcgcactcaacggcgtgcggtccttcgggcagtacggcagcacgcggtagccctggtaggccaggcccttgtcgtagagctgcttgaaggcccacatcacggattccatgtacgggatgttcagggtcttgtaaccgtgctcgaagtccacccaacgggcctgacgatgcacgtagttctgccattcgttggtgtacttcagcacagaagcgcggcaggcgtcgttgaacttgtcgatgcccatcttctcgatctggtcgaccgagtcgatgccgagctccttctgcgcctcaagctcggcgggcaggccgtgggtgtcccagccgaacacgcggttgaccttgcggcccttcatggtctggtagcgcgggatcacgtccttggcgtagccggtcagcaggtggccgtagtgcggcaggccattggcgaacggcgggccatcgaagaacacgaattcgttctggctgtggtcgccggaagggttgcgttcaacggactgctggaaggtgtcgtccttgtcccagtagtcgagaacggtctcctccatgtcggggaagctggggttcggcgcgacgtgcgcggtctcgccgccctcgctcgccttgggatatacgttttcgctcaccgtaaatctcctgttagtactgtgcactggtcctccaggagcgtcattgatggcgattgccgggcgccgacgtgtgccggctggtttcacgaatgtcacgtaccgaaccgtgggccgattagtcaatcgcctcgcagccggaaccgactgtgttccgcccggaacagccatgtctgccgttcctgcctacgaggacgatgacgagcgctggtatgcgctccgcaccgcggtaccacctcgcttatcgcaccggttgcgccgctccgaactgttgcactcggagccgcgagcctgcgcgaccgcttgtgttcggctgtctcgggccgatcccgtcggttctactgggcgattgccgccgttcttccgaagactccccgctgataacggatcactgcctcacaacggtgcatatcctaacacgccacgcggtcaaatcgccgcccacggccacggcaccgtcaggagcccgatttagattgggaccggccaccacggaccgagaaaggattgtcggacaatgacgtatgatttcacgtccatcatgaacaggcatggcatggattcgatcgcggtcgacggactgggcaccgacccgggattcgcgccggacccgccacgcgagggtttcgacgtcatccccatgtgggtggcggacatgaacttcccgaccgtgcccacgattccgcaggccatcatcgaacgggcgaagcatcccgcctacgggtacttctcccccaccgacgactattacagctccatcatcgactggcagtccacgcgcaacggggtcaccggattgacccgggaggcgatcggctacgagaacggggtcctgggcggtgtgatcagtgcgctgaccgcgttcgccgcccccggcgacggagtgctgctgcacagcccgacctatatcgggttcacccggagcatcgaaaacaacggctaccgcatcgtccacagtccgctcacgctggacgagcgcggcgtatggcgcatggattacgaggatatggacaggaagctcaaggagcatcacatccacgtggccgtgttctgcagccctcacaatccttgcgggcgcgtgtgggaacgttgggaaatcgagaaggccatggaagtgtacaaggccaacgattgcgtggtcatttccgacgagatttggtccgatttgactctggggaaccaccagcacatccccacccaatcggtcagcgaggacgcacgcaacaggaccgtggcgttctacgcgcccagcaagaccttcaatctcgccggactggtgggaagctaccacatcatctacaatcccgcactccgggaccgcatcgtggccaaaagctcgaaatgccactacaacgacatgaacgtgctttccatgcacgcgctgatcggcgcctaccggcccgaaggccatgagtggctcgacgaactgaaggcggtgctcaccggcaacgtcgattacgcctacgactacatcaccaagcatttccaaggagtgagtttgaccaaaccggaaggcacctacatgctgctgctcgactgcgagcagtggtgcgaacgccacggcctgagcctgcccgagttggagaaacgcggctgggatgtgggcgtcgcatggcaggacggcgacatgttccaggccccctacagcatccgcgtcaatctcgcattgcccttgagccgcgtcaaggaggccatgcgccgccttgaccaatacgtattcaacgcgtaaacggcatgcatccgcgattgcggtgtcctggaaagacgaatgccgtcaacgaggttggtgcccgttggcggcattcgtcatacgttggccgaaccgggcgaaacccaagttgccgtgcgctatgaggtggatgccgccagcggacgtgtacatctgaccgcccgatatgccggtgccaccgatgcgccgacgctgccggcattcggattggaatggacacttcccaagcagtacgagaacctgcgcttctacggccttggccccgaggaaacctatcacgaccgtctgcacggtggcaagctcggcattttcgagcgcaccgcggccgaagacaatgcaccgtatctggtgccgcaggagaccggcaaccatgaagacttgcgttgggccgaagtgcttgacgcccaaggacacggcatgcgtatcagccaggccggcagcgaacatttcgcggcgagcctgttgccgtacagctcgctcatgctggaagaggcgacccaccagaacgagttgccgccggtccgtcacacgttcctgcgcctgttggccgcgtaaatgggcgtgggcggagacgattcatggggcgcgcccgtccatgagcagtaccagctgcccgccgatcgcgcctacacgctcgacgtgaatctggaactgttctaacagcgataaagaagctccctctgacgagggagcttctttatcgcacagagggagcttctttatcgtgctggtacgaaactgtcacgcaccactagggtggtggagatgaaggtatggtggtgcagcgtgcgccgactggagatggcctcggcaagcatcgtaatcgcagtatcggccagctcattctggtcgatatcgtaactggtcaatgtcggcgaagtgtactgggcgatggcctggttattgatactgatcacactggtatcgcgaggcaccagcactcccgcagcggtaaacgcctgcagtacgccgactgcaatcgagtccgcagccacgatgaacgcatccggcatgtcatctcgatgatcgttaaccgcttcctcccctagagtgcgcccggtgtccacagtgaacgcgccttgcgcgtaaatcaggccttccgcatccagccccaaacgctcggtccaattgcggaatgcggttaatcggccgtcttccggatattcgtgcaaacccatcgtgaagccagtaccgccgatatagccgatgcgtcgtttgcccgaggacaccaacatatccaatgcgtccaaaatggtttggcttaaatccggttgtaccgaatcgaacaggctgggcgcaggattggtgtcgatgaatacgccatagggcaataccagatggagcttcaacagtctatccgaagagagtacggacggtccgatggagatgaagccgtcgaaatcaccggcgtcggcaatcagatcgtcgatatgggaaaacgacgtgagttccatgtgctgggctctggcattgtcgccgagcacggaccgtagttcatcgaaataggcgtccgccagttcttcctcgcgggtggcgttgtcgagtacggccacacggcgtggcaatgcgatacggcgtgatccggtagcgtagccaagctgctcgctgacctcgatgatgcgacgtcgcgtctcctctttgacagacaatgtcgggtccccattgagcagccgggataccgtggcctgcgagaagcctgatttctgtgcgatttccttcatcgtgaccatagttgagccttccacgcctcagtacgtaacaatacgcagtatttcagtaaataactttactacatagtgtaactcacgtcatgcgggtatgacgcc

SEQ ID NO: 404 - DNA, 5993 bp, Unknown
  R48_24m  MAG No. k141_4427
cgggccgctcaggccaagtctttacggtccagcagcacataccaacccgcccaatccctgatgattggttttgcttaatagcgaggaggattatgacgaacgatattgagcggcatagtccggatgagtggcggaagaccgcggcggcgttaatgccggaaaacgtagctgtgggtgccggggaaacgacggcgaaggtgaatgcgaatggggcacctttgctgggggattctcgcgacctgttccgacccaagacctcggatattcccaccaaacccggtgtgtacaaatggcgcgacggggaagggcgcgtcatttatgtgggcaaggcgaagaacctgcgcaacaggctcaccaattatttccagccgctgtatctgctgcatccgcgcacgcagaccatggtgctgaccgcacgcagtctggagtggacggtcgtcgccaccgaactggaatcactgacgttggaatacacgtggatcaaggaattcgacccacggttcaacgtgcagttccgcgacgacaagacctatccgtatctcgcggtcagcacgggggagcgaattccgcgcgtgtgggtcactcggtcgcgcaaacgtcgggatacccggtatttcggcccctatgccaaagtatgggaattgcggcacagccttgaccggctgttgcgcacgttcccggtccgcacctgcaccaccaacgtattccacaaggcgcaactgaccggacggccatgcctgttcgcctccatcggcaaatgctccgcaccctgcgtgaaccgtatcgaagcggacgaacaccggcggctgtgcgaacagctggtcggcgtgatgaccggacgcctcggacggccatacatcgcccagttgacccgcgacatgaaagaggccagcgccgaactcgaattcgagaaagccgcccgactgcgcgaccagatccaaatgctggaaaccgtggtgcaacagaacgccgtcgtcttcgaccaggatgtggacgcggacgtgttcggcttcgccagcgacgagctcgaagcctcggtgcacgccttttatgtgcgcgccggctctattcgcggcgaacgcaactggagcgtcgaacgagttgaggacatcgatgacgccgacttgatggccgaccttctggtgcaggtgtattcggacgccgccggggacaatcacccccagtcggccgcgaccatctccaccaatcgcgaggccatcggctccacacagaccatcacggccacggacgctgtggcacgcgcccaggccacccgagaacgcaacacccgtcaggagaccaccggacgcgcggacctgctggcacccatcgcaccggtaccgcgcgaaatcatcgtgcccgtcgaaccggcccgccgcgaggaactcgaaggctggctgaccaatctgcgcgggggcgcggtgaccatccgcgtggcctcgcgaggcgacaagaagcagcttatggaccgcgccaacgagaacgccagccaagcactgcaacgcagcaagatgagccgcatctccgacatgggcgcacgcacccaggccatgaacgatgtggccaaggcattgggactcgcgcaagccccgctgcgcatcgaatgctacgacatttcgaacactgtgggcggtgccttccaagtggcctccatggtggtgttcgaagacgcgatcgccaagaaatccgaataccgacgcttcgccgtccgaggcaaggacggcaaaggcgcggtggatgatctgtccgcgctttacgagacgctcacccgccgcttcaggcacggcaacatcgccggcgactccggcgaaagcatcgacgcggaacagcgcgcggcctcggccgccggcaagatgaccactgccgtggcggcggagacaatcgttgcgaacggtaacgacaatggtgagggcggttccgacatcagtggcaaggggcacgcggtgccggtcggagtgcagaacgatgcacgggagtcctcgcccgacatcgtccagcagaacacaaaccggcatcactttgcctacacgccgaacctggtggtggtcgacggcggtaagccacaggtcatggccgccgccaaggcgcttgaggactgtggcgtgatcgacgtggccgtctgcggactggccaaacgcttggaagaggtgtgggtgccggacgacgactatccgatcatcctcaaacgccagtccgaaggcatgtatctgctgcagcgtgtacgcgacgaatcccaccgcttcgccatcacctaccaccgccaacagcggcgcaaaggcgccctgcgcagcgcgctcgacgagattcccggcatcggcgaaagctaccagaagcggctgctcaaccacttcggctcggtcaaagccatgcgcgaagccagtgtcgaggacttcgagaaggtcaaaggcatcggccacgccaaagccaaagcgctgtacaacgcgctgcacgagcagtgagccggcccggtccagcagcccagagtgaattttcggttgcggggcctgtggttgacatattcgaagcaaagtgtcggctagcatggaaacagacatcaaggaggggatatggccaatcatcgttgcgctgtactcggcaaacccgtcgcgcactcattgtcacccgtgctccacaacgcggcttatcgttcgctgaaactcgacgattggctgtacgacaagcacgaggtgggggaagacgacctcgacgctttcctcaaaggccttggctcgacgtgggctggcctgagcctgaccatgccgttgaagaagaccatccaaccgtacggtgttccggaaaatctgtgggccaaggaactgaaggtggcgaataccgcggtattcgactggagtgtggctaccgatgatcccgcttggccgaacggcaagccgggcatcaagctgtacaacaccgatgtcatcggcatccaactcgccttcgaccacgccaatcgcgaactcggcgaacaccacaccgcatcgagaagcggcgccgcgttgatcctcggcaatggcaacaccgccacttcggcgttggccgcatgctgcatgatgcccgaaatcggccatatcatcgtcgccgcccgccaccctgggaaaaacaccgggcttaaaccagtggccgaaaagttcgtcaacgtgcataacccgtacagcgaaatcgaattaggcgacgatcaggccctgctcgaggcagcccgcaacgccacctatgtcatcaacacgattcccggacatgcggccgacaacgtcgcggatgccctcaccaatgccggaaccgagccattctccggactgctgctggacgtggtctacgatccacgccccaccaagctcatggaagcctggcgcgctcatggcggtcacgccatcggcggcgaagaaatgctgctgtaccaagctctcgtacaggtattgctgatgaccggtatctgggatgacgacccgcccagcgatgccgaccagcgtctgcaggacaccaccaccgaagacgaccagctggagatcgcgatgcgcaaagctcttgaggaggcgttgtaatgagtcaacagacaacaatccgcgataccggcgaggcggccgccacgaatgcgccggcgaattccgcgacatccacatcgactccggacaaccagccgaccccgcttgatgccttcgaggtgctgctcatcaccggtatgtccggcgcaggccgctctcatgccgctgactgcgtggaagacatgggatggtatgtggtcgacaacctgcctcccaaactgcttatcccgcttgtcgacatgatgaccacctccggttccggatcgggatcgggcgtccacaagcttgccgccgtcatcgacgtgcgctccagctatttcgacgagctggccgccgtgctcggccatctggatgatctcggcgtcaaaacccatattctgttcctcgacgccagcaacgaagtgctcatcaagcgctatgaatccgtgcgccgcccgcacccgctgcagcacggcaaccgactgatcgacggcatccttgaggaacgtcacctgctggaagacctcaaggagcgagccgactgggtcattgacaccagctccctgagcatccaccagctgtccaccaaactctacgagacgatgctcggttccggccccaccaccgtggcggtacacatcttcagcttcggcttcaaatacggcatgcccatcgacgccgatttcgtggccgatgtgcgttttctgcccaacccgttctgggttcccaacctgcgcgagcttaccgggcacgacaagccggtcgccgactacgtgctttccagcaagggagccaaggaatttctcgacgcttatgagaaagctatcgagattgcgttggaaggatacgcccaggaagacaagcactatgtaaccatcgccgtcggctgcaccggtggtcagcaccggtcggtggcgatgagcgaagagctggctcgccgcttacgcgcacatgggctcaacgtaaccgtttccgcgagagaacagcataagcgtcactcatcgtaagcaggcgtcgagcggtcatcgggcaagcgttcggtgaccacactgcgagaaagcaaagcccataatacgtatcaaacgggttcgcttgtccaccagattaggtatcacagaaagccgatggcttccgaccgtatgacagcagataacggcacgaagcgcctgaagcattgagaagaacgggactgtaggaggtagatcttggctcttctggacgatgtcaaaagcgagttggcggcctttgaaggcgattcaccagccgcgatcaaggcccaagctgcggccatgatccgttttggcggcggtcttcgaccggtacagaatacatacgttatccaagccgtattcacctcgcttgacgttgcagaatggctgaagaacacgttgaggaacacgttcgggcatgaagccgaggtcaaccacctcacccgtcagaccccgaacggccctgtcgagacctacgtggtgctcatcacccgcaacgtagtggccttggctttgcagaccggactggtcgaccgccgcaagcagcaggtccgtggactgccgtctgaagtggtcaacggatccatcgcccaaatcaaagcagcatggcgcggcgccttcatggcccgtggcttcctatccgatcccggtaaggccagcttcctggaaatcgcttgccccacggaagaggccgccatggccctgtgtggcgtggcccgtcgtctcggcatccaggccaagcatcgcacgctgcgcagctccgagcgcgtgaccctcaaggatcccgacgccatcgaacgcatgctcaagctcatgggcgccacccgttcggcccgcgaatggaccggcaagcgctccgacggcgaggcccgcggcaaggccaaccgtctggccaacttcgatgacgccaatatgcgccgttccgccaaggctgccgccgaagccagcgaaaaagtgcagcatgccttcgaagtgctcggcgataacattccggacaacctccgtcaggccggccagctgcgcatcgatcacgtggacaagagcctcgaggagcttggcaagatcgccgaaccgcaaatcaccaaggatgcgattgccggccgaattcgccgactgcttcagcttgccgagaaaacggagaaggctcgcgcagccgaaggcaagtaacccgacaacgacgtaacgaaacaccgcattcagtcagtaggcgaatgcggtgttttgttccggaatgcctgtaatatgcaaagtggcaaaattggccactttgacgtgcgattcgtcaaggaaaggatattcatgaagacactcaaggaccttggagatctcaagggcaagcgcgttttggttcgcgctgatttcaatgttccgctggacggcaccaccatcaccgatgacggtcgaatcaaggctgctctgccgaccatcaagaccctgcgcgaagaaggcgccaaggtcatcctcatggcccaccttggccgcccga

SEQ ID NO: 405 - DNA, 35862 bp, Unknown
  R48_24m  MAG No. k141_4742
cgcaattcgtcgatccggatgcgttcctgtgccgacaagtgggaatacactttcctcatgggcgcaacaccttctccagttagaacctgaacacttccaaccatagagcgggtgttgcgcttctatctagaacccgggttcagcccggggcaaaaccgaaaaacgtagaatgaaagggcaacgttccacctactgaaagaaggaacattatgacacttgcgtttgttgtgccgggccttgatgaagcggccagtgagaaggccatcgccatcctacagaaccgactgagccaggagcaggaggccgctctggtcctgaagcacgcacactggaacgtgaccggcccgaacttcatcgccgttcacgagatgcttgaccccgaggtcgaggccgtgctggctcaggccgacgagaccgccgagcgcatcgccactctgggcggcaccccggacggccgcgcggacgccatcgtgcgcaaccgcacgtggaagtcgttcgacgccgagggccgcgtgggcaccgaggagtatctcaaggcgctgatcgagtactatgacgcattcatcgccgacgaccgcaaggccatcgccgagctggacgagctggatgtgatcagctccaacatcatccaggaccacgtgcaggaactcgaaaagttccagtggttcatgcgctctcacctggcataagtaaaagcagtattccgtggctcccctcaaagaggggagccactttcgtctcacgtgaaatagagagtctccacatacataagttggaaaagtgtataaaactccccattctgaggttggaaaacgtagccaaaaccacattcttatggttggaaaagtgtaaaatatgctctataaacagttggaaaacgtgcccagcatagatgcaaggcctacaaatgactggagattctcatgctgcgaagaaaaatcgagacacagctggaagcttggagatccgcgccgaaacgcactgcactgctggtcaccggagcccgtcagattggcaaaacctatatcatcaggcactttgcccaacagcattacgaccatatcgccgagctcaatttcatcgagaaccctgacctcgttgcattattcgatcggccccgcgatgccaaaaacctactgatgaggctggaactggccgtaaatacgccattagtacccggcaaaaccctgattttctttgacgaggtccagcgttgcaaggaaatggtcaccgcaattaagttccttgtagatgatggtcggttcgattacgcgctttccggctcgctacttggagtcgagctcgaagatatacgctcggtaccggtcgggtacctgaccgagctggatatgtatccactggatttccaagagttctgctggtcgcagcatatcggcaacgacgtattcgatatgcttgccgaatgctttgccaagcaccaggaagtggatgagttcattcatcaaaggctcatggagctatactccaaatatctggtcatcggcggcatgcctgccgcagtcgactcgttcgcggcaaacggcagcgttgcggacgtgcgcactatacaagagaacataaagcgtgaatatcgccgcgatatcagccaatacgcgcgcaaagaagaccggctgcatatccgcgctatctacgatttggtgcccagcgagttaaataacccaaacaagcgctttaccttcgccaaaatcgaaaagaacatgagattccaatcggttgcttccgatttcgattggctggtcaatgcggatgtagccgtcgccgcgtacaacgtggacgaaccgtgcacaccgttggagatgagcaaggaacgtaacctcttcaaactcttttacaacgacgtgggtctgcttaccggctcgtttctcaagaaaaccgcgctcgacgtactcgacggcaaccctgatatcaactacggttcaatctatgaaaatgcggtggcccaagagctacgcgctcacggatttgacctgtactactacaacagtaagaagcttggcgagctcgatttcctcatccaagaccgcaacgatcacgtgctgccgattgaggtgaagtccggcaaatcctacaaacgccatcgcgcaatggacaacgtgctcgcccaccctgaataccatctcagtacaggctatgtgcttggcccgtgcaacgtctcagtcgaagggaatgtaacctacctgcctgtatacatggccggcatgttccataacgaatgacgggcagcacacttagtcaacaagtacaggccggtcagatggttcggactggtcagagggcccgttctaatcagttaggttggtctgaacggactggctgggctggttggtctgagtagctcggctggaccgatcggttcgcccttgctggccttcgcgctgcttcagctccagctgaagttcgctgatgcgccgttcgggttcatcgatgcgccgcacttgtggcgaagtgagactaaggggagccgagagatggctcacaggccgagggcaccggccacggccatggcctcgtgttcgggatcggcctggccgatgtgtacgttgacgtgaatttcgtcatcgcccggctcttcgagaatgtcgaactgggattgcagcatgctcggtttcatgaagtggccttggcggtgggagaggcgttccattacctcgtcgaatgtgccctgcatgtagacgaacaccacgccttggcggcgcagcttgtcgcggtagatcttcttcagcgccgagcaggtaaccacggcgggctcgccggcactgaagcctgacctgtcatcgtcacagcaccacgcggcggttgaggtcgcggcgtagcgtcttccagccgggtaggtaggcggtcatgcggcgttggaatccggcgccgtggccgctttcccacagatgcgtcatctcatggaccaagacgtattccaggaattgcggttccatcactcccaattgaaggttcagacggatgcggccggttcgcggcgtacacgatccccagcgcgaggccatgacccgtagcgtgatatgcgtgggctgccggccgatgaccggcccccacttggccagcagctgtggcaacgcggcgttgatcgcggccgccgcttgtcgtttgcgttcgtcggtccagatttgggagcggtcaaaatacggctggacgttcgtaccggcttggcccggcccggcgtcgccgattctcggacgactgatatcaccggttttcggacgaccggcaacgcctccatcatggccgctggcaccagctacgccacgacctccgttctcgaagcctgcaccctcgttcaatgccatgatggagcgccgttgcgcctcagccatgcgctgctgctgggcgagaatccacgaatgtcgctctttgacgaaatccgcgatacgactctcgctcatccgcatcggtgcggagatttcgacgcggccgctcggcggtttgatgcgcaaatacaggtttttgatgggtttgcgcgtcaggtgcagatggatgccgtcaatgtccaacgactgcccggcggcagcggaccgaacggatttcggcgcaccggacttcggagcggtggattgacgacggcgataaggcatgcaagtcattcttacacaacggcggacaacaagcggcacacaatgccgcccctcacgaatcggcaaccggcgctgctacattcaatccgcataccaactgcccacaccggagaaggtcgcgcaggagaaggcctcgctgctcgagatcgacgacagcttccagaagatcgtcctcgtacgcgacgtggtcaaacccgtccgcgacgaacacggcatcctcacgatgagcgtctacgatttcctcctcgacccggacagcctgacgatgtgacgccggacggccggcaaatgccccggaacgcagccccccactcctcgaacaccgccttcgcggtggccgaggacaccatgacgagacagccgagcatgatggcacccagcagagggtgccgaagttcgcgatgacgtactgccacaggtccgacccgtccgtgtagccgtcgaagcgcagcgccgcgacggggacgagaaatccgtcaagcgcatgcgcggcgtcagatacaccgtcctgaagaaccccggcaagctgaccgacagacggtccgaggcgtccgggaacctgcggtacacggaccccaagggccggccctaccgttcatgacggctcagggaacccctccggacgatgcccaaacgaccggccgaccaggccgggaccgaactggaccgccgggtgttccgggcgtcccacagccgcatccccgagatcgtcgaactcgcccgaaagatccgccgtcatgggcccgacatcctcgggacaatcgaattgggctgttcaaacgccaggctcgaggcgtccgacaacaggatcaaggtcaccatccgcatggcctacggcttccaccacgcgaacaatcccatcgccctcgtcatgctccgccgcggcggactcgacatacgcccaccacaaccaagaacccaacccacgaaaacagcagaagcctcatatgtattggacatttctgcgcagagagggaggtgtaaccgcagcattacggtgtgagaacgcaaggttacatagctgggcattggctgtggcgttgctggacattgaccgtcgagccggcaatcatggcgcaagcgacaatcacgacacgccgttattgacataccgccgttcaatggtattgtaattacttgtgcgcttttgaagcgtatggatcgggcccgtagctcagctggttagagcgcatccctgataaggatgaggtcggaggttcaagtcctcccgggcccacagaaaaaatgaagcggctgcgagccgctctttttttctcacggggctatagcgcagctggtagcgcatctgctttgcaagcagagggtcgccggttcgaacccggctagctccacagacaacccttggaataataccgattctgagggtttttgcgttcttgttcgagggattctcccagtgcgccatggccctctccatcgaaaaaggggtggtcctgttaaggaccacccctcgaggattcagaccaaccgcgtggtcattgtcgctccgtcttcacggaacggtacacgaaaatccttcgccttgcggcgatatcgcccggacccggaggactacaccttcctctcgggtggaaggtaccggcagataattggctcttccggttttggtgtgtaggggggatgcttataggtgggcttgtatggtgtgtctgaagccgccggtgtggaggaggctgcgggtcacgccaaaaccggaagagccgttttcttttccttctccggtggtttcgtcgttgaccgtgttgccggtggcttccttgcaggcttgtttgtaggcttcggctgggctggtgtggtggagggcgcggatgcgtgcagcggcgtgttcgatgtgttcgagcgtggcggatggcgcgtcggtcaggccgtggcgggcgaggacttcgttgcgccacgagtcgtagcgttgctcgcgcaccacgcgtggcttcctccgccccctgacccatgcgtcggcgtacgcccaatcgccttcctcgtagatgtcgcgtgcccaggacgccgtcggacggtcgaacgggtaggggcccgccggcagcggcaacttgtcgaccgtcgggtcgaacacagtgaatcgtcgccgttccctcgcttcgcgttcccgttccggcgctgccagcgcctccgcgacgtccgagtggaacgcggccatgcgctccttggcgccggaggacgtgaacccgtcgtcgggttcgcgcagtccgtgctcctcgagcagcgggtggatgtcgtggtccatgagccagcggagccgggacatgttgaacgcgaggatgaatgcgagcgagattgcgaccatgaggcccatcccggcccccatcagcagtgtgctcatttcagccggctccagcgttcggcgcccgcgcgcgggctgaaacgtccccgccagtcccacggtccgacgaaacgcaaggccaacagaatcggggagcatgtggcgaggaacgcccagaagaaagccaaccatccaatccagtcaggtgtggatctgccggtgtcgacccattgcgcgctcgaccagaacatccatgtcatcgctatggggaagcccgatatcgcgatgaggaacagcgtgccgacgatggggccgccgaacatgtagcgcagcttcgtggcgggcacggaggaggcgaatgccaagtcctccagcgaggcggggacgtaggtgttcggccggccgaacacgagccggcagaaaccccagtacaggaggagtccggccagccacatcacggcgaccgccacgtacgtgttccatgcgtcgcgggatatagtgaccggtctgagaaaagccagcagcgtcacgtcatcggtatgcgtgtggtgcgtcttcgtgtccggggtgagcagccgggcgatgccgtggatcatgaccatcaggccgggcgcagccgcggcggcagcgccgccggccgccgcgccagcccgcgcccagccggaatcgccgccgaaatccagcttgcgcttgaccggcgtcttctccagcgtgtcccagaacacctgcgccccgtcctcaagacgccccaccaacacataccgagtgaacaacgccaacagatacccccacttccaaaacccgagattatccttgaaatgactgcccgggtcatctccaccgcctctgtgcacctgattgtcgtaaagtgcgtctaagccgctacttatcagccatccggctccagtgccaatcgccgttccgacaaatgcgccgaccacggtgccggcaccggggacgatcgatccgacgaccgcgcccacggcaccgccaacggtcccaccgaggccatcaacggcaggcccgagaccctacgcggcatcgccctcggcttccgcaacctcgacaactacgtcacccgcagcctcctccacaccggcggcttcagacacaccatacaagcccacctataagcatcccctctacacaccaaaaccggaagagccggatgattccctgcaagccgatcacgccaatccgacccgacgactaatcagattgaggacggctgaattaagcttgtgccctcatgatacaacatgtcctgcgaccgacgccagacacaacggcagcattctgcccaccatagggcgtgtctttaaccagaaagtaccctcaaatacgttcagcaagatatatgcacgcagaacagcccttccgcattatcttatttgacatagagcatgccccttccattccacagaatcaagcaaataaacgagcggagagactggacacaccgcaaaacaatggcccaacccctccgctcgtttgttatggaaggaagagggatgaataagtatgtttacttcactgacttgatgaagacgatcagcaccgcgccaatcagcgagcagaccgctgcaagcgggaagagtgcgtgatagcccaccgaggaaattagcgccgccgcaacatcccacgcaccatattcaggacaaatccagtccgttgttgtccttggctttgctcaccatatcagtcaaatcggggtcgttcacagacaccgcgttctgctgactgagcgtcaacgatagcgagccattataggagtcgccgtcttcgtccttgccggacacgcttatggcaatcgaattcatcagacgctttctgccgtagttcagatccacggtgatagtcggcatctccggctcttcatccgtgccgaaatcccagttgcgcacattatcgagcgcctgacggtactcatcttcagcatcgtccacgccggcatcctcgatttgctgaatcacccaggatttcagatgcggatactgcgcttcatgactgatccagtaattcacgaaatgctgagacaacgctttgatatcgatttggtacgacagctgcgtattgccggcagacttggcagacgatgtattcgggaacagctggctgcgcacattcttatcttccagctccacgccgaaatattgttggatgaatttgctggcctcggccttcacctcggcagaccttttcgtgcccttggcccggtcgatgtcgttcgagtacccatcgtcgttcatcttgtccagctgatcgtagaacgtttgctccgcgccggtgatgtcccaagcaccgttcttgaccaacgcatccttgacgttcaatatcaagtccgccacatcactaccaacgccgttccttaagtcatcttcatattggtcggccgggcagtagatgtagtaggggtcgtcgtcatgccaaacgaatttctcggcgaatgcgcctttgtaccaagcgaaggtcgttgcatattcgtctgttttgctagtgaaggacgcggaggattcgttggtggttttgcccagcgaatacatgccagacatccgcacgtcaagagaatcgtcagtgatgctgtgggttctgagttcgtatttggtgctgcgcagagtggacagcgagttgatcgcgtcgaaggtgacgaccagcggattggtgggccggaagcccagcatcgctttgacggcggtgaagttggggatgatgaacgccaaggccgccaccagaatcgtcgcaagcaatgcgcagaaagcggcgatcagcttcttgctggatttgcgctgcggtgccaggacggcggttgcatcagtcgcctgatatgcggcaggagcgggaatcggcaaagccggcaggggaacggttggtgccggctgtggggcagcggacgcggcgtaaaccgatggggcaaccggcgcggctggtatcgatggtggtaccgcagacgccggcacagcaggtgccggtatcgacgcaggcggtacggctggcgatgcggccggtactggtgccgtcgcaactggtgcgctgtctacagacgctccacatgccgggcaaaatcgtgccggcccatcaactctatttccgcagtggccgcagtacgccatcgtgtgcctctctccctcaaatcggcttgattgccatcgcttcaatgttactcttcagcattacgcctcagccagcccctacgcgtaacgatacgagacgcggcagccttaatgcggttgttttgacgcgatgccaacatcgagctctggccaacgttctggtactcggctacatcttgctgcgagccaagaagcaggccatcgctcgcgccgacgaggccgaatggcggtctagcctcgctttaagcctcaggccagcacctccatggggtgataggtggcggtgtggtggccggtgatggggttccatacccgttcggcgaatgcgcgcagacgggcgacgccctcgcacagctcgtcggcatctccggcgtaggagaggcgcacgaagccgcgcccctcctcgccgaaggcctcgccggggaccacagccacgcgctcttcgtccagcagacggtctgcgaattcaccggagtcaaggccagtcaggcgtacgtccacaaaggcgtagaacgcgccttgcggttcgatcagacgcaataccgggcatccggccagaccgtccagcacgatctggcgcttggcgcggtattcctcgcgcatggcggccacgttatcttgcgggccagccagtgctgccacgcctgcgtattgcgccaaggagttcaccgaggagtgcatgagttcggcgattttgccggtctgttcgatgaccgcttcgggtgccagcaggtagccgatgcgccagccggtcatcgcataggttttcgacaggctttccaccacaatggtgcgctctttcatgcccggcaccgcggcgatcgatggtgccacggctgcctctcccccaagcgtttccccgaacgtttccccaaacacgaacggatggtaaacctcgtcggagatggcccaaatattgtgctgcttgcatacttcggcaatacgcgccagttcggcggcagaggttaccgcgccggtcggattgcccggtgagttgatgattacggcgcgggtgcgcggggtgatcgccgcttcgatgtccgccgcgttcacgcgcatgccgtgctccggacgcagcgccacggtgaccgggcggccgccgcacagcatcacttcggcgtcataggaagtgaagaacggcgagggaataatcacttcatcgccggtgcccaccacggctttcagcgccagaaacaggccaatcgtggcaccgtcaacggcttgaatctcggtttcgggatcataagtaagtcccttcacacaggcggagtaatcggccacggccttgcggtattcggggatgccaagcacgttggtgtaccgagtgcggccagcctgtgcggcctcgcaagcggctgccacgatatgcggcgcggccgtggcgctgggctcccccacggtcagtgaaatcgcgtcaggcacgcgctctacacggtcgaatacgtctcggatgccggagcgcgggatattcagggcttcggcggacaggctcgcgggctcggcggtcggcacagcaacccgaccggcagcaggcatagtagcaggcgcagcagcagatgcaacttcggacagagacatgttggaaaacttctgcatatcatccctcctcaatggaattatttcatcgttctcttatttcaaaaggaattattacatccaattaggactttaaacgtaaacattccaccacacaacagaaaacacaggaagaactactgaaattaccaggcaaaatcggaaagccatcgcattccggcaacaggtacagtgaacacagagcacaacgaacggagaagacatcatgaccgcgattgacgagaccgaccagcgcatcctcaccatgctggaggccgacggccgcgccacgctcgcgcaactggcccaggcgaccggactgtcagtctccgccgcccagtcgcgcgtgcagaagctggagaagcgcggcatcatcaagggatacaaggccatcatcgaccaagagcagcgcggcttgcccatcagcgcgttcgtcaacgtgaccccgctcgactactcagccgaatcctcgattccggacaagctgaacaatatcgacggcatcgtctcctgctattcggtggccggcgcccccagtttcgtgctggtggtgcgcgtggcttcccctaccgcacttgaagaactgctcaatctcatccaccgcacggtgccggtaagcaccgagaccacgatgattctgcagacctacttcgcacactgaccgcgaacccggtaacctgcgcgccgaagacctgcggccacacaccccacaaaccccacaggtcacaaaaaccatacgaccccacggtccagccacaccccacaaaccccacagaccgcacgatccccaacagacacatctgacatcacccaagtccgcctttatgtccactatatgaacgtgcctccggtgtgatgcggcttccatttcgacccgattcacgcatagacagacatccaacaatcgcccgaaaaatctaacaaacggaaacttgagccactccataaccacgccgaaagctttcccgttatccgagcgagactctatgcagcaagggcctgcgcgcatagaataaaaccgtcttaattccctaccaaatcgaggagaatcatgctcactgacgagtacatcaagcgtgtctacgaccaggtcgttgcccgtgacggcgatcagccggagttcctgcaggccgttcgcgaggtcttcgagaccctgcagccggttgtcgagaagcacccggagtacgagaaggccggtgtgctggagcgcatcgtcgagccggagcgcgccatcaagttccgcgtggcctgggttgacgacgagggcaaggttcaggtgaaccgcggctaccgcatccaattcaactccgccattggcccgtacaagggcggcctgcgcttccacccgaccgtgaccgagtccgtcgtcaagttccttggcttcgagcagattctcaagaactccctgaccacgctgccgatgggcggcggcaagggtggctccgacttcaacccgaagggcaagtccgacgccgaggtcatgcgcttctgccaggcctttatgaccgagctgagccgccacatcggccagttcaccgacgttcccgccggcgacatcaacgtcggtggccgtgagatcggctacctgttcggtcagtacaagcgcatccgcgacgagtactccggcgtcctgaccggtaagggtctggaattcggcggctccctggcccgcaccgaggccaccggttacggcgtgtgctactacacccaggaagccctgcgcgtgctgcgcaacgactccttcgagggcaagaccgtcgtgatctccggctccggcaacgtggccacctacgccgctcagaaggctgagcagctgggcgccaaggtcgtcaccgtctccgactccaacggctacatctacgacccgaacggcatcaacgtcgaggtcgtcaagcagatcaaggaagtcgagcgcggccgcatcaaggaatatgccgagcgcgttccgggctccgagtaccacgagggcagcaagggcgtgtggaccgtcaagggcgacatcgctctgccgtgcgccacccagaacgaggttgatggcgaatccgcacagaagctcgtggacaacggcgtgaccgtggtcgtcgagggtgcgaacatgccgtccaccccggaggccatcgaggtctaccagaagaacggcgtgctgtacggcccggccaaggctgccaacgccggtggcgtggccgtctccggcctggagatgagccagaacagctaccgtctgtcttggaccttcgaagaggtcgacgccaagctcaagtccatcatggaagagatcgtcgccaactccctggccgccgccaaggaatacggtcacgagggtgacctgatgctcggcgccaacgccgccggcttcgtcaaggtcgccaacgccatggttgcccagggcgtgctgtgacgcttgcctctgagcagtactaagcagtagcgtaatgcccttgcttcccgtgaggaggcaagggcattgctatatgtacaacgagcaacaagtgctatccccaaatacgtaagcccgataacaactcagcttccacctccataaccccggaactcaccaccgtcgatcagcacatggatcagtgcggctggaccatggccgacgtggtcatcaaagccatcaacggagtctcttcaccgcgcgtgatgcacctgaacaccgatttggtggtgcgtgagtcggcgtaattgccacgtggctgtcggcaggactctagataccgcgtcacaatcacccagtaatgcatcacgcagtgtataactcttccgcggaaacgaacaccattcgttcatcatccatgtagcgggttcgcgtggactcactcaccggattcttggtgaacagcataagccacgcattacctgcctgatagccgcggactaagccagcacgctgatggagcttttcaatagcctccgtttcgttgaatgaattacgccatttgcattcaccgaacagaatcgttttatcgagcgaatccgcagcaatcacatcgatatcggtttgctcgtgagcaatcggatcattgccccaccatttgccgaactgagtggcaacaaaggggaggttgcccatagcgttgtttcgaataagccattgcaggcaaatcgtctcaaattgttgaccaacataggtatcaaacgctggtccaaaagcgagtctgctcgtaacctcctcgctgatattaccatccaaaatgctcatgttgcgccccacaaagcggaaccaatatgcaaagaagggatcgctcaccacatacattcccttgcgcgatttactcggatcttcaccaaacggcacttttcgctcaattaagcgcaaatcgaccagcgttttcagatatgctccaatcgaatcagatccgacacccgcatgttcagcgataagctttggcgaggaattaccacccgcaatagattgcaatatcgaataatacgatgccggttcacgaagctcctgacgcaacagcatcataggttcctcacgcagtacgcccaagttgtcgaacatcaagcgcagcacattggattcaaagccatcggcttcctgtatacgggccagataatatggcgtaccgccgaaagtcgcatagtattggaccagttcttgcggagatgtgttcgttagaaattttgccgcatccgcatagtcgaatggcaggagtcgaatctgtgctgtacgacgcccgtatagcgggcttttacgccccaatacgtcgttttccatgaatccctcgttactaccggatagaatcatcgtcacttttgtggcgaggaatccatggtcaattgctatctgcaacatggagggtaatgctggctcggcggcagccgcataagggaactcatcgaatacgaacaccatacgttcgtcagtctgtgcagcacgttcagcaacaaacgataacgcatcagaccacccgccaaacgacggggtggaatccggcataccaaagaacgacaatgccgctcttgagaaatcttcaagattcatcttggcgctttgctgtatggccgtgaagtacagcacgcgtttatctttgacaaattcgtcgatcaacgccgttttccctacacgccgtctaccgtacagcaccaccatttcgaacgaatcgctggtaaacagcttttccagcacttgtaactcgtgctctcgtgcgacaaacattgcagccctccgatccgcctaccgcccaataataagagtatcatggttaatgtaatcacgattaccttaattatgatactgataattgttgccctaccgcgaggaggatcttccttccgctgtcaaaacgaaagcccaacagtccagactgacgagcagcaacatcggcagatcaaccgctgacgccagccagcctgacagcacaaatcagcctgattgcaggcatataggcactagttagcgaaaccggctcttcgcattttggtgcgtaggggccgtgcggtttgattcggtgtgtgattgaaaaagtgaatgaaaccgcacggcccctacacgccaaaaccggaagagcccataaagtcccctcagtagcgccaacctgccagtcctttggcggaaccacaccacatagaccttcctcaacggcgccaagctgccacacgctggcagaccaacaccgctgtgtgcattctctgcgtcggcggcagtccaaaacttggcccagcaacgacgcttgctgtgcccagcgtcggcagagggccaagaattggacgcaaacgacacagaacacaccctcagcgtcggcagaactccaagatctgtaccgctgacgacggtaagccctccacagcgtcgtcagagatacaaaacctgtcccaacaccgacgcctgccacccccagcgtcgccggagtcccaagtctcggcccagcaacgacgcctacgaaccccacacataagaaaccgcacctccgatcatcgaatctgaattacttcagtccaacaaccggggtgcggttcactgaggggagttctgccagtatagctatatcagtcgtcgccgagcgtgacgtgcacgccgccgaccagcgagctgaccacgttgtagatcagtgccgcaatggtggccagcagggtgaagatcaccacttcaacaatcgagaagatggtgacgccggagaccacggtggtaagggacaacacgttcttgagatcgaaaccgcctgcatcaagaccggtggaagacacaatctgcgtaatctggctgaatacaccgaccacatcaagcagcacccatacgatcgcggaggcaacgacctgaataatcgccacggcgatggacagcatgaacgtcaccttggccacggaccaagcatccacgcgggtcagcgacaagctcatgcggcgagccctgggggcgctacggcgaggtgccggacgcacgggagtggcggcacctgaagaaggcaacgtggattcttccggatcgctggacacggagcgtgccacgcggggagcgtgctcagtaccgatcagcggctcgacatgatcgttctgcgtattgccgactgccggcggtatgatccggggctcgttgtcttcgagattctcgctcatcgtttctccttaacaggcttggcggtagcctctgctgtatgcgaggctaccagcttttcaggacgctgctcacgcctcgtccgcgttgttcacattctcgccggattgtgcggtctcggcggtgccgttcgccgcggcatcgccactgtcctcgggctcgtccttctcctcgttacgggcgatggagagaatcgtgtcgcccttgtcaggcttggcgaaggtaacaccctgggtgttgcgcccggtgcgcttgacctcgtccacgttggaacgaatcaccttgccggacttcatgatggccatgacctgatcgtcttcggacaccacgagcgcgccgaccagggcaccacggccctcgaccagttgcacggccttgatgcccaagccgttacggccctgcagacggtattcgctgatggcggtgcgcttggcgaagccctcgttggtcaccacgaacaggtccttgtcggagtcgccagggaccacatccatggccagcaggctgtcgtcgttacggaacttcatgccctgcacgccggcggtctggcggcccatcggacgcagctgctcgtcgtcggcctggaacttgaggctcatgccgagcttggagaccaggatgatgtcatcctcggcgttgcacagcgcggcaccgatgagctcgtcggcgttctcgccattctcgtcggccatgaggcgcacggcgatcaggccgccctggcgcggggaatcgtactcggccagcggggtcttcttgaccttgccggaacgggtggcgagcaccaggtacttggccacctcgtagttcgggatggacagcacggtctggatggtctcgtcgggcgcgaactgcagcaggttggccacgtgctggcccttggagtcgcgcgaaccctcgggcagctcgtaggccttgatgcggtagacgcggcccttgttcgtgaagaacagcagccaattgtgcgtggaggtcaggaagaagtgatccaccacgtcgtcctcgcgcagcttggtgcccttgatacccttgccgccgcggtgctgggcgcggtattcgtcggccttggtgcgcttgatgaagccggagtgggtcacggtgaccaccacgttctcttcggcgatcaggtcctcgacgttcatctcgccggagaacggcaggatcttggtgcggcggtcgtcgccgtacttggccacgatctcgtcgagctcatcgccgatgatcttgcgctggcgttccggcttggcgaggatgtcgatgtagtcggcgatcttgcgctgcaattcctcatgctcggccacgatcttgtcgcggttcatgcgggtcagcgtgcgcagctgcatggccagaatggcgtccgcctgcacctggtcgatgtccagcagccccataaggcccgtacgggcggtgtcggtgtcttcggaggcgcggatgagggcgatgacctcgtccagcatgtcgagggccttgagatagccctgcaggatgtggtcgcgctcttcggcctcgcgcttcaggtacgcggtgcggcgggcgattacgtcgagctggtggttcacccagtggcggatgaaggcgtccaggctcagcgtgcgcggcacgccgtcgaccagcgccagcatgttggcgccgaaggtctgctgcagctgggagtgcttgtacaggttgttcaggaccaccttcggcacggcgtcgcgcttcaagaccagcacgaggcgctggccggtgcggccggaggtctcgtcgcgcatgtcggcaatgccctggatcttgccgtcgcgcacggcctcacgaatggagacgacgaggcggtccgggttgacctggtagggcagttcggtgaccaccaggcacatacggccgttgatctcctcagtgttgaccacggcacgcatggtgatcaggccacggccggtgcggtaggcctgttcgatgcccttgtggccgaggatggtggcgccggtggggaagtccggtcccttgatgatgcggatcaggttttccagcagttcctcgcggctggcgtccgggtggtcgagcgcccagtggacgccgtccgccacctcgcgcatgttatgcggtgggatgttggtggccatgccgacggcgatgccggcggaaccgttgacgagcaggttcgggaagcgggccggcagcacggtcggctcctgggtcttgccgtcgtagttgggcacgaagtcgacggtgtccttgtcgatgtcgcgcaccatttccatggccagcggggccatgcggcattcggtgtaacgcatggcggcggccgggtcatcgccgggggagccgaagttgccctggccgtcgacgagcatgttgcgcatcgaccaggactgggccatacgcaccaaggtgtcgtagatggcgaaatcgccgtgcgggtggtacttacccatcacgtcgccgaccacgcgggagcacttgttgtagccgcgatcggggcggtagccgccgtcgtacatcgcgtagatcacacggcgatgcacgggcttcatgccgtcgcgcacgtccggcagggcacgctcgacgatcacggagagggcatacgccagataggactcgcgcatctcctgctgcaggtccttgcgctggatgcgttcgccggtgtccatcaggccgtagtcggtggtgtccgcctcctgcgggctcaacggctccatcgagccgtccggcgtgaactgctcgtcgccggtgttgttttcatctgccactgttgttcctttagttgtctaagtccgttgtgtacctccctctgacgagggaggttggaggattccgttacgcatcgatccaacgcacgttcttggcgttgcgctggatgaagaggcggcggggttcgacctcatcgcccatcagcatcgagaaggtctcgtcggccgcggcggcgtcctcgatgtgcacctgcttcagaatgcggtgctcggggtccatggtggtctcccacagctcctggtagctcatctcgcccaaacccttgtagcgctggatgccttcgcccttgggcagctggcgtccgttggccttgccttcggcgagcacgcggtcgcgctcggcgtcggtgtacacgaagtcgtgcgggcccttggtccacttcaggcggtacagcggcggcatggccacgtacacgtagccggcggtgatcatcgggcgcatgtagcggaagaacagcgtcaggttcagggtggcgatatgcgcaccgtccacatcggcatcggccatgatgatgaccttgtggtagcggaccttggagatgtcgaagtcctcgccatagccgccgccgaccgcggtgatcagcgattcgatggtgtcggacttcatcatgcggtccaagctggcacgttcggtgttgaggatcttgcctcgcagcggcaggatggcctgcgtgatcgggttgcggccctggatggcggaaccgcctgcggaatcgccctccacgatgaacagctcgcactcttccgggttggaggactggcagtccttgagcttgtcgggcatgccggcggactcgaagatggacttgcggcgggtgttctcgcgggctttcttggcggccagacgggcgcgggaggcctcgatggccttctggatgatgttcttggcctcgttcgggtgggcgtcgaaccagtcgccgagcttgtcggtcatcacgcgctgcacgaaggtcttggcctcggagttgccgagcttggtcttggtctggccttcgaactgcgggttggtgagcttgacggagatcacggcggtcaggccttcacgcacgtcgtcgccggagaggttctcgtccttgtccttgaggatgcccttgtcacgcgcgtaacggttgaccagcgaggtcagcgcggcgcggaagccctcctcgtgagtgccgccctcggtggtggaaatcgtgttcgcgaaggtgtgcacggcctcggagtaggcggtggtccactgcatggcgagttcggcggagatgccgagcttcaggtcttcggcctcgaagctgatgacgtcctcttccaccggcgtggccttgcgcaccttgaccaggtagtcgacatagtccttgatgccgttgaggtactggtaggtgacggtctggtgctttgcgccgggctcgtccgcggcgtcgccggccacctcgtcgccggcctggtcattctcacgctcgtcggtcaggctgatcttgaggcccttgttcaggaaggccatctgctggaaacgggaacgcagcgtctcgaagtcgtagatggtggtctcgaagatcttcgggtcggcccagaaagtcacggacgtaccggtggactcgccttcggtcatcggctcgccctgcttcaagggcgcggtggggtgctggtcgatgtacgtctgggtccagtggaagccctgacggcgcacttcgatgtccacgcgggtggagagtgcgttgaccacggagatacccacgccgtgcagaccgccggacactgcataaccgccgccgccgaacttgccgccggcgtgcagcttggtcatcacggtctccacaccggagacgccctcgccgggcacctcatcgaccgggatgcctcgaccatcgtccaccacgcggatgccgttgtccggcagaatggtgacctcgatatggctggcgtatccggccagcgcctcgtcgaccgagttatcgacgatctcatagaccaggtggtgcaaaccgcgcgggccggtggaaccgatgtacataccggggcggatacgcacggcctcgagtccttcgagcaccctcagatcggaggcctcataatgctcgggggccatggattcgtcaagttcgccttcggtcaattccgcattgttgatgcgttccgcagccgccttcagctgctcctctttgctggtttcgtctgccaacaggcttccttccgtgactacagggtcaacctccgtcatgaaggtcattcacggaggcgatatggcttacgaggcccgtaaagggctcttctggccatttgaccatactgcatgtgattttactcgtctaacccgacgagcgccatagcgaggcttctgcgaatttgtttggtatcttggctaccgccgccgagcccatttgcgcgtgtatccggcggccggtccggtcacgcgaatctcggcgatggtcaatcctttgagattgcgacggatggtatcggtaagttgggggataaggtaggtcagctgcgtggcccagaccgtggattcggcacggatggtcagtacgccgtccgtgaaatcggcgactgccgaatggctggcgatggcctgccccaccacttggtcccaatggttgcgcaattgcgcaagtttcatattcgccgcccagacgccattgccggcgatggtggtcatcacgctgcccagttcagccggatcgcgccccggtttgccgaagttttcgatggcctcttcacggcggcgtctgtagtccttcaaggtcgccccgcgacgggagagccgctcgaatatttcggccggcagtttggtctcgtccaggttgagttggcgggcgatcggcgggttcatgacgctttccgttctacggacgcgctgtccaccgcgggttttccgtcatacttacccaaactctcgttttcccgcgaatcggacaaattgcccagagttggcagtattacggaagcgggttcggccagtgtggccacgtcgatacgatgggccgattcatagtcgggcacatcgccttcagcggccacggtaatcagcacctgatcctgttttctggcgaaatcaagaatctgcgtgcgccggctgtcgtcaagctgggcgaacacatcatcgagaatcacaatcggctgcaatcccaaccggtcacgcacgatttcaaacaatgccattttcaaggccaacgccatcgtccacatctcgccgttcgaagcgaactcgcgggcgggaataccggccaactcaaggttcatgtcatcgcgctgcggaccgataaggttcacgccgcgagccatttcaccggggtagatgcgttgaaaatgctcgctgatccgcggatgtggatcgtcgaacatcagcacttcgtcgaatgaaggcgcatatgtgagcgtcacctgctcgccggcaccggccaagtcggcgtaaatcgcggcaaatggctcggcaagcagaccgatcacatgagcgcgcatacgggtcaacgccacaccggcttcgatgaactggccggtccagatttccaaaccgctcagaaccgcatccatcggctgtccattgttggcattggcattcaattgcttcaacaatgtggcacgctgtttggcgatgcgcgtgaactgttgcaacgtctgcatgtatccgggctcgagcagagccgcagcctgattcatcatgacgcggcgtgctcccggatcgccggacaccaatcgctgatcttcgggagtgaaggaaacgctgggaatcttgccgatgatatcgcgcagatacagcgacgaccccgagttgatgcgggctcggttggcaccacgcgcatgaatcgacgcttcatacgtagtggtttgaccggcatcatcagcgacgttcgcgcggatggtggccgtggtctgcccgcgttcgatcagcggcaacgtgctggacgtgcgatggctcgatccggtggacagcacttcgacggcttccaccagattggttttgcccaagccattcttgccgaacaggatattcacgcctggtacgaaatcgaccactacctgactccatgagcggtagtggtcgagtgcgagacgggagatgcgcattatcgaatcgttggaaattcagggacttcagttgttaaagcgcatcggcacgagcaggtatcggtagtccatggactcgtcggaatcagcttcctgctggccgttgaactcgaccggcttgaccggggtcgtcatcttgatgcgcacgaatggttcggtcacggcggacagaccctccttcaggtaggacgggttgaatgccacggtgatgtcgtcgccatccatgtcgatgtccagtgtctcgttggcctgggcctcgtcgaccgatccggcggacagcgccacttcctgaccggtgaaggtcatgcgaatcggagcattgcgttcggcgaccaaagccacacggctgatggcgtcgagcagatcctgcttgttgactacggcctgaatcgggtattcgtcggcgaacaggcggtcgaccgccgggaattcaccgtcgatgagctgggaggtggagacgcggccggcgttttcgaagccgagcagcgtcgggctgtcggcgtcgaaatcaaggcggatgttctggtgctcatcaagagcgcgggccacatccttgagcagggagccgcgaaccagcgtggtggtgtcgacgtccgggttctgcggagtccaagtgaaggtggcgcgggccaaacggaagcgatcggtggaggtcatgacgaccttgtcgccttggaattgcatgcgaacgccggtcagtaccgggcggttttcttcgcgggagacagcaacgcatgcctggttcactgcctgaacgaaagtcggagcatcgacttggccgagcatggccggtaccacaggcagatccgggtactcggtgtcgggcatgagctgcaaggtgaacttcgacttgccggacgtgatggtcagcgtggagccgtcggtgaccaggtacgttttctccgaacgcagcgatttggtgatatcggccagcagcttgccctgaaccagtacggaaccggcttcgtcaacgccggcttcgatgtggtggcgagcggaaatctcgtagttgaaggcggagaattgcagcgttccgtcaatggcttccagcttgacgccagcgagaatcgggttggagggacgtgcgtcgatgactcgggaggtccaggctacggcgtcggccagggctgcagtatcgatttcgactttcatgtgtgattgttcccttcgtcggattggctgagaaatattctagccgttaggtggcgaacttacgtacgatgggtgactggctgttactgtggcgatgatgcttttcacgtaactgagtaagtaatcgtcgtaataaggccggtggatagtgtggataagtaggggtgagccctacaaatgcaacggttcataagtccctgaaaattgtggacaaattctgcatggcttgtggataagtgggcgagttttccacagccagttcgtcgaatttgagttttccacatcgaggtcgcggttatgcacgagttttccacaacaaaacagtgggtaatccacgagttatccgccgagtttacccacatctgtgcacaactgtgtggataacttttttggttttcgtactttcgcacggcgtgttgaaggctgtttttcgtcgaggagaatcgattctggagaccgttttcggcacttttttcgtctcgctcgcccaaacccgcaaaatcggtcctcagaatcgattctctcgtttcatgggttttttgcgtgttccccttcgatactcccctcagtcgtctgcgacgacagctctcctcacaaaggggagccatgaggaatctgatgtctcgaatccgttgcctcgacgtatccaccagaatccgcctgagcaaccaaaaacggcacttttcggaaagtcagtccgaaaagtgccgtttttcgtctctcagaagcgttgtgtcagttggtgttgctttgcttgaggcgaaccgtgagctccataacgtagttatagatctcctgtttttgctgcattcggtcactgattcgagtgcaggcatgcattactgtggtgtgatcgcgcccgccaaagacctggccaatatccatcaggctcatactggtcatttcgcgagccagatacatggcgatctgacgaggaacagccacgtttttggttcgtgatttaccgacaagatcctcaaacgtcaggtggaagtacttcgccacctgactgatgatgtccgtgggcttgatttccacatcggtggtgaagaagtcctgcaacgtctgctcggccaaggcgcgggtcaccggctgattactcagcgaggccacggccgtaacacgggtaagcgcgccctcaagttcgcgaatgttctcggtgaagcgttcggcgatgaggtccaacacatcgctggggattttcgaaccgttcatcgaggcgatcatacgaagaattgcgattcgggtctccagatccggcggcttgacgtctacggtcaggccggattcgaagcgcgagatgagtcgagcctcgaaacccttcaaattcttgggtgccacatcggaagcaatgacaatacgcttatttgcctgatgcagtgcattgaacgtatggaagaactgatccaaggtggcttccttgccgccgaggaactggatatcgtcaataagcaacacatcaacctgtcggtatcgacggttgaattcagcaatctgaccctggctttggttcgggttttgcagcgcgtcgatgaattcgttcgtgaattcctcagacgtgacgtatcgaacctttagcccgggatccttgaccagtgcatagttgccgatggcgttcagcaagtgggttttgcccaggcccgatccgccatagatacacaacgggttgaaatcctgaccggaaccttcggccacggccagtgcgaccgtacgggcaaaacggttggaatcgccgggcacgaaggaatcaaacgtgaagttcttattgagatgagtctcgggatcgcgattcatcttctgctgaccgaccgggaactgcgactcggtggcgggcatcggttcccgcggtgcggctaccggctttgcaccataggattctttaccgaactcggcgacggtcggagaaatttccgaaggatatggctgcgccggctttgccgccgaaagcggttcgggctcggttttcggcacgaccttgaacgcgggaaacatattttcgccggttaccgtacgcaatgcctgaagcagggaatcgttcaaatcaccctgaatggcttgaagcgtatcgttgttgtccacacacagcacgatggtcgaaccgaagacgccttcaggaacaacgccttccaaccagcctttttctcgtgggctgagcgaagcgctgtgtttgagcaccgtcagcgtgtctgaccagatgtgggcggcctcaattacggggtcgccggaagcgttaaccatggtggccccttctatcggtgtggcgaaatctgtacaacagataatatttactctggtttagacaagttatccaccgtgtcgcgtgttgaaataactggattgtgaataacagacatgtaatttgtggataacttttggccgtgaatggttggtattccgccgattataagagatttgaggcgtgtctcgcaacgtgtcgaaatgtgaaaatactccgtccgttttgacttgagggtaggggtgagagtactttggtatagcttgactcacgtgagggcagcgcgaagcgttgccgaatagacctaggagcaatggattatgaagaggacgttccagccgaacaaccgtcgtcgccacatgaagcacggcttccgcctgcgcatgcgcacccgttctggccgtgcggtgatcaaccgtcgccgtgccaagggccgcaagtccctctccgcctgatcattccgatcagtgccacaggcatagtcgaggtggagcggcttcaaagccatcgtgatttcgtcaccgtgctgaaacgccggcgcaaagcaggtggcaaggatatcgtcgtgcactatttggtgcccgacgaccatcatgatgatgacgaccggacggtgcatcgccgtttgggattagctgtctccaaatcggtaggacatgcggtcacccgtaatacggtgaagcgtaggtttcgtgtattggccagagcccatgaggatctgctgcccgcgcattgcgatatcgttttgcgcgccaagcccagtgccgcgaccgcatcgttcgcttcgctagatcagcagatcgcgaaggcttttgccacagtggcgcataaggtggctgaggcatgacagcttctttcaaggcggtgatgattggtggggtgcgctggtatcaacagcacatctcggcaaacacaccgccttgttgtaagtattatccaacgtgctcgaattatgccattgaggcattggaacggtatggcgcgttcaaagggggagtgctcgccatgctgagattactgcgttgccggccgtggagtcgtgggggaatcgacgatgttccacaacggtattccattttttacagattttcgtggtcgaaggctcatgaagagccccgactgacaccattggccacaacccaaagagaggcccaacgatgaactcaaatgaatttctgcttgatagcgggttttggggatttctatataaaatcctgactcccgttgagtggttgcagacctggatcatgaagatcgtgcatgacttcttcgcgatgctgggcatgagcccgattggtgtctcatgggtgcttgccattatcatcctggtgctggtggtgcaggcgtgtatcttcccgctgttctgcaagcagatgaagtcgatgcgcaagatgcaggcgttggcgccgaagatgaagcgcatccagaacaagtacaaaggcaagacggatcaggcttccaaggaggccatgagccgtgaaaccatgaaactgtatcaagaaaatgacgccaatccggctggctcctgcttgcctatgctcattcagggcccggtgttcatgtccatgttctatacgctgtcggccattccctacattgccaacggtaaacgcggtgcgttgggcgcgttcgacgtagcaaccgccaagcaattcacccaaaccgatgtgttcggcattgtcagtgtgaccgataacttcacccgcgcatctactgcaggcaaggtggtcatcggtaccttcgtgttcctgatgtgcttctgcctgtggtttatgcagtacttcaacatgaagcgcaacatgcccgccgcatcgatgaacaaacaggccgagaccatgcagaaggctatgctgtggctcttcccggtgatgtacatcttctctggtgccaccatgccgttcgccgtgctggtctactggctgaccaacaacgtgtgcaacctctgccgcacattgtggcaggtgtacgcattcccgacccctggctctccggctgcggcggacaaggagaagcgcgatcatcgtaatgagaatgctcgccgcgcaaaggccggcctgccctctctggaagaagaagcattggccaaggccaaggaagaggctgagcgtaaggccactcagggctatcagcgtcaacagcccgtgcgtaagcgcaaaaagaagtgacgaccatgtcggtgcgcgttcgatgtttcacgtgaaacattcaacacgcaccgacattactttctctgttcgggggagcagggcttagacttggaattcaaacacgacatgaaggagtagcgtatggcacaggatgacgtgaagtcgatcgatcagctcaacgaagaggctgacatcgccgcggattaccttgaaggcctactggatatcgccgactatgagggcgacattgagatgggcgtgcgtaatgaccgccccaccgtgcaaatcgttgctgatgacgataccgacatcaaacatcttattggccataatggtgaagtcgttgatgctctgcagcaattgactcgtctggctgtacagcagaagaccggcgagcgttctcatctgattgtggatgtcgacggtttcctgaagcgcaagcgtcagcacctccgtgatatcgccctggatgccattgacgcagtgaaggattccggcgagccgtatgatttgaagccgatgaattccttcgaacgtaaagtcgttcacgatgtggttcgggaagaggggctgaagtctcgctcgcacggtgaggagcctcatcgttacgtgacggtgtatctcaagaacaaaatcgaggatgttgccgaagacgacgagcttgatcaggagtaataggtcgacgagtttttgagatgacaaggacgttcaacggatgtcgtctctaaacaaacaagagtgaccgtagggagaatggcgtcgtaatgagcgacgccttttccatgttgattgtttcacgtgaaacatggtgagggagatggctatgacggatcagctgcaggggtcacctgtacttgctgaggtcttgggtgatgcgttgccgaagttggagcgtttccatgccaagattgccgaagagggtgaacctcgtggattaatcggcccccgtgacgtcgatatcatttgggaacggcatattctgaattccgctgcgattgtgccgtacgttcggaatgtgacgaatggtattcgcttcaaaacagttgccgacgtcggcagtggtggtggttttcctggattggtggctgccgcgtgtttgtctgatcatgacttcacgctgattgaaccgatggagcggcgaatcgaatggttgcatgaatgtgttgacctgatgcaactgcagaacgttgagattatccgtggacgctccgatgccgtcatccagcaggtacggaagcgggaaattcatccgttcgctgttgtcacgtgtcgtgcggttgctcctatgaccaaactctctggctggacgttgccgttgctgaaaccgtcgggacagttgatcgcactgaagggacggtctgctcaggctgaaatcgacaaggctggcaaggagattgcaaaattcggtggtcgtcgtccacgcgtcgttgaggcggctgtcggaccggatcttgagcctacccacgtggtgattgtggataagcgatgagtggagtactgattgagttatccacatttccatatgtgcgtaaaagttatccacatttttacgggacgatgtgcagaatgatgaaaacactgatttttcaatgtttttcgtctgcgaatacataatctaacactcaacgtcattcacacttatccacacttatccacattgcatatcgcaattgtggataacgagcatcatgtccatacgaatgagaacactggaacttacgtctgtgcaaggaggagcgatgtccaccaaggatcatcagtcggaacctatagaatcggcttccgaaacgcttcagcgaatattcgatggtcacggttcagtgcttggcagccagatggttgatgaaagctcacgctacgatgtactcaagaaaaccgatttccccaaacctcaacgtacccgtcgtattgccgtggccaaccagaaggggggagtgggtaaaaccacatccacggtaaacaccgctgcggcgctggcgaacaagggcgcgcaggtgttggtcatcgatatggacccgcagggcaatgcctctacggcgttgggtgtatctcatgcatcgggagagccctcggtctatgacgttatcgaggggcgttccgatctgggtgatgttatcacggtctgtcctgattttcccacacttgatgttgtgcctgcatcaatcgatctcagcggtgccgagttggaagtggctgatctgcccaaccgaaacacattgttgaaggaggccttggacctctacctgcgtcaatcagataaacactatgattacgtgttcattgattgcccgcccagcttgggcctcttggtcatcaacgccatgtgtgcagtgaccgagatgctgattcctatccaggctgagtattacgcattggagggtcttggccagctgatcaacacgattggtttggtgcaggagcatttcaatccagtactgctggtgtccaccatgctcgtcacaatgttcgatcgccgaacgctattgagccgtgaagtatataacgaggtcaagggacactatcccagcattgtgctgaataccaccatcccgcgttcagtcaagatctccgaagcgccgagtttctcccaatcggtgattgcctatgatcctcgtggcataggtgccatatcgtatggtgaagcagctttggaaatcgcacagcgttcgcaacaagtccttgacaccattgatgcgaggaggaacaagtaatggcatcaaaatcacgactcggtaagggccttggcgctttgttccccacattgccaggggaggagccagtggcggagcagcccgcaatgattgaggaggattcgtctactccggcggccactgctgacataacccccgccaagaaggctactgcccagcaggaatcaaagcctgccgcgcctcagatggtatcgtccagtaaagcagccaagaaagccgccggtaaacgcgcatccatgcccgcattggacaccattactcatcctagcgacctgtttttcggtacggagaaacctcaaaccggtaaggtcgccgcacctcagcagggcggcaagccgtctgcgtctcagacggcacatcgtacatccgtcaccgtcaaagatgtttcacgtgaaacatctcagactgcatcggcggcaaagaccgctgacacagataagaaggacgagctcaagccggtagccggtggttatctggctgaactcaaactgtctgatatcgggcccaatacacatcagcctcgtaccatcttcgacgaggatgagttgaatgagctgtctgcttccattaaggaagttggtgtgctgcaaccgatagtcgtgcgcaagcgtccggcaagccagattgctgcggccaaagccgccaagcacgacgagacggaatccagcacaaatccgtttgccggtcatttggacagcccgtatgagctcattatgggtgaacgtcgttggcgtgcatcccagttggctgggttggagacgattcccgccatcgtcaaaaccactgcggatgatgatatgctccgcgatgcattgctggaaaacctgcaccgtgtggccttgaatccactggaagaggcggctgcctaccagcagatgattgaagagttcgggttgacacaagtacaactgtccaagtcggtgtccaagtctcgcccgcaaatcgccaataccttgcgactgctgaacctgccggcctctgtgcaaaagagagtggctgccggtgtgctatcgtccggtcatgcgcgtgcgctattgggcctgagcgatccggaggaaatggacaagctggcttctcgtattattgcggaaggtctttctgtacgcagcaccgaagaaatcgtcgccatgaagattgcgtcgggggagcagccgaagaagcccaagacgtccaagaccaatccttgggttggttccgccatccagcagagtttggaaaatcatttcgacaccaaggtgtcgattaagggcagcaccaagcatggtcgcatcgaaatcgtcttctcgtcaccagaggatatggatcgcatcctgcagctgctggtgccgagccaaggcgatgccgattccaaatgggtgtaacacgataagaacattcgtgttgtcgccggcattattgctgtgcagtgcgttgtacgcgcaagacgttatagcctctgcgtgattcctggcaggggcgtatgcctgcgttgtagcccctgtcgcaatagaaaacccctcaggctggagggacaatcacacatcgtgattctccgtcgcctgaggggtctttctatgcctctgactggtacgtactgtccaagggcggcatgctgtaatactgacctaacgttgctcctatgtcacaggcagcagtcagaacagcaagccatcatcaggtcgccgcaatcagtccgtaagataggcctgcgcatccagcgctgcacggcagcccatgcccgctgcgctgattgcctgacgataagtacgatccacgcaatcgcctgcagcaaagatgcctggcgcactggtcaccgtgctggcaccctgcactacgacatacccatcattgtcacggtccacaacaccagctgcaaaatcagtggctggcgtatggccgatagccacgaatacggcgttggtgtccagcgtgctttcttctccggtcaccacgttacgtacggcaatgctgctgacactggccggtgccacagccggtcgtttgattgtcaagccaggaatggcaataggtgcaccggtgttctgtgtgggggaggaggtgccggtaatggaggtcaccactgtgttggtcagcagggtgatggtcggattggctttggctcggtccaccatgatctgcgaggcacggaagctatcgcgtcggtgaatcaaggtgaccgaagaaccgaaccgggtcaggaataatgcctcttcaaaagccgaatcgccaccgcctacgaccacgataggcttgttcctgaagaagaagccatcgcaggtggcgcagtacgagacgccatgtccggacagctcctgttcgccgggcaccccaagcttacggaatgacgaccctgtggcgatgatgagtgctgatgcctccaactgggagtcatcggagagcgttacacgataggtcggcttgaccgaatcactctcacacgcctcaatggaagagacatcgtctgtgatataggttgtaccgaagcgcttggcctgttccttcatgcgatccataagatccgggccaagaataccttccgggaatccggggaagttctccacctcagtggtgttgaccaactgtccacctggcgacaacgcaccagtgaccataacaggattaagacctgcacggccaagatagatggcggccgtgtagccagcgggaccagaaccgataatgatgacgttatgtttcacgtgaaacattgtcacacccccatacgatattccatgtcattcagccagacgcgaagaaagggcggcaccgtcgaatgtatgcgaacggtaccgcccttcttgggtcagttatcggtatagatgccgattagaagacctccaccttctcgatgtacagctggttctgcggcaggctacccgatggcacccacagcagcagatcctgcgtattgacggctttggtgaacttcacctcagtagtgccaccttcagcaaaggtgaattcggccacctgctcgccctgagtggggtctccagtggtatttgcgcgaatatagcccttaccaccggatgtgcggatggtgataaccatgcggtacgcatcctgcggctggtcaaggtgcatgtagtatgcgtacccggattggccgccaggattcgacaggaagttggcgctggaaatcgtaaacgccgtgttgttctcatggcgcggttgcggagcagcgctggaatccttatcgccggacttcttggccttggtcttcttggacgacgaatcagcagtctcggacttcttggacttgtctgatgccgagtccctggattcgctctgagtggcatcactcgactttgaggaatcgtcagtggcgccaccgttcgtcgcgttcttgctgccaccgaatggcacagcgtcagcattgatatcgggccagtcaccttcactggagttgctggaagcatcggcaggattgtctccggaggattggaacgcatgcactgcccaaacagccgctgccactaccaatatcagagccacaatgatggcaacgaccttggtcgacagtttgccgaacagatgttcatcgggcagcttgctgtcatcctcgtcatccggcacatccttcggtgtgaagctcggaggaatggcgcttacttcggcaatgcgggcctgctcctcttccaaggcacgcagcgattcctcaccgggggccacagcacggccgctgacatcgaacacgggaatacgactggtcgtctctcccacggtggcatcggaaataccgccggtaacaataggcaccgtcaaccgagtattatcacccggaccgccgatgggggccggattcatttcgctgtaccagtcaccggtgtcttcaccggaaagattctcgtgctcccaggcgtcagaaaggttgaagtcaaacagacggcgggcgtcagattgagactggttgccgtcagcagtactggacccatcaggcagaggagccggtgacatcgcgtgcggagcggggacggcggccggctgaaccggcagggaaggggcaatagacaattccggaagactgctgctgttaatcaacgtgctgggaataggcacgatatcggtctcgttggcgggcttcagtatcgccttggtaatcgagcaatcgctttccacgctcggcaaagcgatatcagcatcgctcagttcagagagcggcttccaattacccaacaaggcgtcgagttctacaagggcagccatcggcaacgtgtgctcgtcgggcttgcttaaggccaatccacgcttgcaaatcacgcggaattcgccaggggtgtcttgcggcaaggcgcgcagattgaatgtgggtgtcgcttggcttggcgtgcgtgtcagcagggcatagagcaatgccgcaagcttgcgaatcgcataccgttcaggaccgtccgtacgcagatcagtagcggacgtgtcggccagcatcgtggcacatggtgcatcggcaatctgcacaccggaggtagtcactcgaacggtgtcggttgtgatgacgatgctgctgggagtatccgcaatgacctcgcgcagcacgttggcgcattctccgataatcgaccggatggcgctgtagctgagcggcttgtcggtatccaccatgtagtcagtcaggcattggccgctgtccaccggcatgacaatgagaagtacgtcggattccatacggtatttcagtacgggaatcacacgatcagggcgagtggcggcgatgcgaccagcga

SEQ ID NO: 406 - DNA, 18293 bp, Unknown
  R48_24m  MAG No. k141_4801
atccgtcacgtcaccgcgaacgaatggtcgacccgccgctatctcgacatgtcccggctcggtgacaacctcgtggaagcgaactgactatcgcgccatggacggccacgatccaaagtgcgcaacttttcgggcactaccgctcactcatgtttaatgtaatatttagaattacattaaacatatcgcatgcaccgcatttttcgagaaacactgtactctcggcaaagacaccaccctacacaccgcaactttccaatgacgcctcatgaccagctcggaaccggtccgacaacagaatcgttgagcacctccttatcgaccgccatcacaaatatcgcctgcatcgcaccaccaaggcaccgatcactcattaaccagcatcgtgagcatatacatcggcaaatatgtgacgccttcctcttggaacacgttggtttccgcgaacaccatcgccttgtcaatggtgtagccatcagcgctcaacgcattgtcaagcgccgcatgagaacggtaatatctgcccgacttaatctccagggccaaaacatcaccatcatcggtctctatcaggaaatccagttcgccaattccttttttcgtaaagtaatacagattggtgaatccatgcgcggtaagttcctgagccacgacattctcatagactccccccatgttcatcgcagcctgaccatccagtatgcccagtgctgacttttttccatacgagctggtcagcaatccaacatcggaatagaacagttttagcaatcgacgttctttgctggctctcagcggggccacgggggcggcaacattaaatacgggcagcgcaacattagcacgggtaagccaaaggaattcatcttcaatctgcgagaatcgtttgacttcggcaatagaactgacttggaatctgcgattttgactttgcagttcactagggataagtcgatacatttcttgaatgaccagtctcttatccttcggcgcatactgcttaatgtcatgctcatagtatgcgcgaatattggtctgaatcgcacgcactggatcgatgaccttgctctcaacaaacgaagtcactgcagccggcataccaccgactaacagataccggtggaacaaatccgtcaaacgctgatggacaaaatcaggaacgggttttacggcaccgtaactgtcacgaacaatgtcgaagacggtttccgacagccccagtgcccaacagaattcttcaaaatccagtggatacatgataaattcatccaagtatccgacaggcagggagcgcacatcctccagttctacgcccaataatgagccggaaagaatatagtcatagtctccccggtccaccagtcctttgataaaagtgacaatctgtgggcatgcttgaatttcatcaatgaagataagcgtcttccctacaaccaacggcccttgtgcagcaacagaaatacgcagcatcaaatcatcgggactggtggcttgcgcaaacgaacgacgcacgctgtcgtcaagcaataggttgaactcagccatatgctcatactcgttctgcccaaattcctcaaccagatacgtcttcccaacctgccgtgcaccggtaatgagcaatgcttggttggtcttatgctctttccagaaagcaatacgctgatatgccttgcgtttcaacatgtttcaccccttcgtttcacactcgtctgattttgtaatatcctgtattttacacttatcaagttctataaatgccatattatcgcattcgtcacaatctataagtagatgattctcacactcgtcatgatctgcatacggcccatttgcgcacttgtcggaatcagcgcggaacgcagtgaagcccctcgcttggaggggcttcactatcgatggatgaggatttgcaaacggggtgattacttcgtctcggccgcggtgagcatggccttggtgacctgctcgtagagatcctgataaccgccgggcgtggaagctggcagcaccacggtcttggtgttgttcgattcactcagcgagcgcatcacgtcaagatactggttgaacagcaccacgttgttcacgtcgttgatactcatgcccacggcctgcaggctcttgatctggtcgacgatgccgttggcgatctcacggcggtagttggcctggccttcaccctgcagtcgggtcttctcggcttcggcggcggcctgggtctcgatctggatgcgttgggcctcggcgcgctggcgggtggcttccttctcgcgctgggcggcgttgatggagtccatcgcgttcttgacctgcgggctcgggtcgatggcggtgatcagcgtcttgaccacggtgaaaccgaaccggctcatctcggcgcccacggtcttctgcacgtcgaacgccacatcgtccttgcgggcaaaggcatcgtccaaggtcagggccggaatggcggaacgcagcgcgtcctccatgtagctcctcagctggccagccgggtcgcgcagctcgtagtaggcggtggccacgtcgttcgggttcacgcggaactgggtggaggccacgacggtcacgaacacgttgtccaacgtcttggtttccagctgcacgttgagctggttgacgcgcatgttggtcttcatggcgatgcggtcgacgaacgggatacggatgtgaatgccggcgaactgaaccttcaggaacttgccgaagcgttcgatgatgtacgcctgctgctgcggaacgatgaacaatgcggcgcccagcagcacgataagaacgactaatagaattagcaccaacagcatggttccgcccaacatacttgcgatggtcatataaaactcctctcacaagggtcaagcacggcatatcgttgtgccgcgccccaacaccatccatgctaccatcgcacgcccgggaactgatagctctcacaggcaagtccaagaaagcgaacgtcagatttcatgttccgttcactccggcagccacatcttgtgcactaatgtttggatcagccaagtcgcacgtcagaaacaacaaagtcgggcatttcagccaaggaaacacccgacttgaatcaagcactgccgccatataaacacatcagaagtgttcgttgagcttcttctcgcagtaatcctgaagccatccaagcaacgtgcagaagagcaagtagatcaagcccacttcaatgtataggaccagcggctcgtagtaaatcgccacaatgcgctgggccgtcatgaacatttccaccacggtgatgttcgccgcgagagacgtgtccttgaccaatgcgatgaaggagttgaacaatgcagggaaggcggagcggaatgcttgcggcagaataatgcggcgcataatcgtcacatacggcatgttcgccgccaagccagcttcaagctgtcccttaggcacggcaagaatcgcaccacgcaatgtttcggcggcataggcgcccacattcagcgagaacgcgattaccgcggaaggcaatgccggaatcgtaatgccaacggacggcaatccaaagaagataacgaacaactgcaccagcaacggcgtaccacgaaacacccaaatgtagaaccacgcgatttgggaggccacaggtactttagccacacgcaccagcgccaccacaatcgccagtatcaaaccgagagcgaaggaaatcagcgtcagcggaatggtcacagtgataccgggaatcagtagcttagcaaaggaatctacgactattccccatactcgtgcgtccattggtcatcctttgttgtgtggtatatgttgcgtctgctcgtaatcttcacgaggccagctcatatttcccggctccccctaattacaggagagccgggaaacatgtcactcctgagagaagtcctcgccaaagtacttttcggagatcttggtcaatgtgccatccttctgcagcttgacaatggctttgttgacttccttgaccaagtcatcgctgcccttgcggaacggcaggtaggcggccggagtcttctcggacttggcggcaatcttgatgtccgcatccggcttctgcttcaggtagtcgagcgcagcaaggccatcgttcaatgacacatctgcacgaccggacgtgatggcatcgacctgctgaccgaaatcgttaacctgaacgatagtagcgcccttctcctgagcggtcttgttccagttggaggtaccggtttcagcggcgcgaagccccttgacgtcatcgaacgaagtgacgttcttcgggttctccttggaggtaatgacgacaccgtaggagtaggtgtatggttcggagaaatcatacttggccttgcgctcgtcggtggcggaaatctgatcggcaaccgtatcgtacttcttggcatccacaccggcaagcagggagtcgaagctgccctcggcaaactcggccttgataccgacctccttggcaatggccttggccacctcgacatcgtaaccggtcagctcattggttttggagtcatggtaactgaacggagcataggtgccctcagtggcgaacacgattttgccggcctgcttgacctgctccaatgcactggagttggaagcggaagccgaaccgcatgcggcaaccgaaaccagcacggcgacaccggacagcaaagccgcagccttgcgaatcacttgattattgaacatgacaaacccctctcttgatattgtcacaattaattacaacagccgtgaaacgcctctaccgagtcaccggaatcatcagcacattgttggttgaagacaggaactcgacggtacgctcctcctgcggatgttcgaagatccgcttcggatcaccctgctcgaccacatggcctccttcgatgaacaccacatgattcgatgcctcataggcgaaccgcatctcatgggtgaccatcagcatggtcatgccttcgctaccgagttgcttgatgacccccagcaccccgttgaccatttccggatccaatgccgaagtgggctcgtcaagcaccaacagctcaggattcatagccacggcgcgggcgatgctcacacgctgctgttgcccgccggacagtgtgctcggataccgatcatgaaaatcggcaagtcccacacgatcgagttgctcaatagcgatcttgcgggcttcatcaggcttgattcccttggaatacaccaacggttcggtcacattctgcaatgccgtcttgttcaaaaacaggttgtagttctgaaacacgaacccgattttcgaacgcaacttgtgaatgtcggcagatttggtagtggtcaaatccacaagaccatcaccgaaatcgacggtaccggaatccgcgtgctcaaggaaatccagaatgcgcaacagtgtggatttaccggagcctgaggggccgatgacagtaaccacattttgtcgaggaatgtcaagatcaagcccatccagaacggtggtgtcggcaaagctcttgctcactcccctaatccgaatcatcccgatactcccttttcgctgctgttatgcacgtcaacgctcgttcgcgaagcacaatcccttaccgtagacgcgcttgctcacctgtgtttcggcgtggttatatccagtgcctatggagtgctattcacaccaatgaataacacatcggacgccgacgtattgttcgctcacagatgcagcagatcgtcaaactcgtacaactcttgtctttacttgatattcagctcgttgagcttgttcttgatatccacagccgacggttcgacctggaaagtgccatcaggatagagcaccacgggaatgtgctgctggccgctgatggccaccgcacgatcggccgccccatcctcggtttcgatgttatgccacgtatattcggtgccaagctcctcaagcgtgttcttcgcctgcttgcaatcaccgcaccatgttgcgccatagacgtcaatagccatgtcctgttccttctttcgtaatacaacaacccaaattcacaacgccccaagaataacagcgcaggtttttctcagaacgaacaattatccgcatacgtaagcgatacacgtcagtatgcgttggcaatggcttggtcaaggtccgcaatcaaatcatcgacgttttccaatccgatggaaagtctgatgagattatcgctgactccggcggcgatacgcgcatccaaaggaacctcgcgatgcgtgatgcgcgcaggatcgacgatcagcgaacgcgcgtctccgatgttcggcacataggagaatacctcggttccgtcgatgattcggcgcacattatcggcgctgccatccaccaggaacgacaggatctgaccgacaccgcgagggaaatacttgcctacaagctcgtattgcggcgtatatcccaatcctgaatagttgaccttcatcacatgcgctgcatgattcaaatgctctgcgatccgttgcgcggaggcaacctgctggctgacgcgctgaggcaatgtttccaaaccaatcaaggaaagatacgcattgaacgggctggccaccgcgccgaacgtgcgcagatatttgatgcggatgcgcttgatgaatgcctcgttgccgtatctttcggcaaaactgtgccattcaccgttgcgatcatcgctgatgacctgctgccgtgtggtgaattgggggaatctgccattcgcccagtcaagatgaccgccatcgataaccgcgccgccaatcgcattgccatggccggtaatacctttggtggtggaatgcacgacgatatccgcaccgaactcgataggccgcaacagatacggcgtgggcacggtgttgtctacgatcagggcgatgccgtgttcatgcgccagctgtgacagcggctcaatatcaaggatttccgtagaaggattggccacggtctccgcgaagatcgctcgcgtatccgggcctatcttcgattccacttcagccaagtcgttgatgtgctttacgaaatcggtatggatgccgaattgtggaagaaaatcaccgagtgcatccacgcttgctccgtacaagttgctgggagcgatgattctgccgccgccttcgcccacgcacatcagcgcataactgacggccgccatacctgagccgaccgccaccgcaccgataccgccctccaatgccgcaagacgcttttcgagcacatcaaccgtggggttggccacacgtgagtattcgaatccgtcgatgagtccgcctgcgagcgcatcaccacgctgcgcattctccaaatcgaatgcggcggaggcgtagatgggcggcaccgccgcatggccatagtccgcggggtcataccccgcatgaattgcccgcgtggcaaactcacctgttccggacgtgatactcataggtgtttccagccccccaattcatgtcggtaatagtcttcgatggagcgtgttgcgagcggtcaggcaaacgcttcttccgttaattgcgcgaacacatcgcagtcggcgtgacgtttgaggtattgttcgtaggcgatgtcgaacgcctggccaagatcctcaatcaggtcggcggcatcctcaatacccaaggaaaggcgcacaagctcgtcggtgatgcccaccttgaggcgttcttcgcgaggcagctcgaaatgggtcatgcggcagggcagctcggccagtgattcgacagcgccaagggagaccgccaatcggaagatgtgcaggttgttgagcacatccgcagggtccacgccaggcactacttcaaagctcagcacgccgccggcgcccttcagtcccttggcggcgagtcgctggtcaccggcccccggcaggcccgggtaatgaacggacttgaccagcggatgcgcgagcaggtaccgcgcgatggcattcgcattctcctgctgccggtccatgcgcagggccaatgtctggatgccgcggcgcaccgaatcgcattcagtgggcgccagtacccctccaagacggttctgggcgaagtacacgcgattggccaaatcctcaccggagacgaccacgagaccggcattgacgtcggagtgaccggccaggtacttggtggcggagtggatgaccacgtccgcgcccaaggtgagcggctgctgcaggtacggggtcacgaaggtgttgtccacgatcgacagcgccccgtaacggtgggccaccgtggagatggcgcgcacgtcgttgactttgagcagcgggttggtcagggtttcgaagtagacggcttgggcaggcgcgatgccgttcgcgcggtcgcccttgacagcggcctccaatgctgcgatgtcctgggtgttgacggattcgacgatcacactccaacgggtgaagaactcattgagctgcgaatacgagccgccgtagatgttgttccccacaacaatgcgatcgccgggcttgaaaatgctgagcacggcatgaatcgccgccaagccggaggcgaacgcaaaaccgcgcgttccctgctcaagctgggcgatctgctgttccaggaagtcacgcgtgggattgccgcttcgtgcgtagtcatagcggggcatcgcgtcgaccttctcgaaggcatatgtcgttgagttgtagatcggcgggttcacggctccggtgttgttgtctccaaccggcagtccgtggacgagctgagtattgaacctggtcattgcgcaccccctttatggtgttctctatggctgctgtgcacgaggccgttccccgtgcggcacgtctacgacgataacgtatcggacacttgaatggaacggcgttgctatatgggttgcttatggaccgttcaaatgcggtcgcggcggtcacgtggctacactgggagccatgaagattgccaaggccttgacccgtttgaccggtcctgaaaccaccccggtgttcgtgctgttgcacggctggggttccaatgaatacgatttgcccgatctgctgaactattgcggtgccggttcggctgattatgccagtttgcaggcacccatcgcctatggcatgggatatacatggttcggtgcgtgggcgcatgaaggtgtgccggagggcgaatcattggacaagcaggcggctgaggccgcccaagccattgatacatgggttgcggagcatattcccgccactcggccggtggttgccatgggattctcgcagggcggcctcttggccgcgcatctgctgcgtttcaatccgaagcgatatgccgcagccgtctcctgctctggatggctggcaccggggtccgttgcgggcgatgccgaattggcttcgttgaagccgcccgtgttctacgggcatggtgctgcggacgacatcttcccgaaagccgatgtgacggcgatgggtgagttctggcgcgagcacggcacgttgaccgaacaagtgtatccgggcatggcccattcgatcaatatgccggaaatgcgcgatattcaacggttcttggaggccaacggattcattcggtcgcagatttggtagtcaccacctcacatgacgtagtctacgtgggcgaattcggggactttgtaccatttgacggggtagccggcaccgtgggcgcagaagaccgagtcgggggtgttgtccagatcagcttcgggatcgtaggcggcggctgcgatgacctgttcggcgtcatggcatggcttgtagccgccgaaggtggcggagaaacggccatggccgtgcgtgtactggttcacgtccatcgcatagtcgcgcatttcggacaccggcgcctcgccttcgatcacggcgtattcgtcatcggtgaccggggattcgaagctgccggccatgcgctggatgtcgctcatggcacggccgatcatgtctgcgggcacttcgagccggaaccggtaccacggttccagcagtcggcagttgccctcccctgtggtgtccggccggctctcgaccggcgtctcgggccggccactgactcctgccctggcttccatcagcccttggcgaatcgcccggtacgtggcttgacggaagtcgccgccttcggtgtgcttcagatgcgcgcggccggccaccaaagtcatcttgatatcggtgagcggtgcgccaacgagcacaccgagatgctcacgctcggtcaggtgggtcagaatcagccgttgccaattgcggtccaaatcattttcggacagggccgaggccacagtgactccgctgcccggctcccctggttccagcaggatatgtgcttcggcataatgacggagcggctcgaaatgacctgcgccttcgatcggcgcagtgatggtctcacggtacaggatggagccggggccaaaggacacatccagaccgaaccggtcgtgcagggtctgctggatgatttccagctggaccgcgcccatcaattgcacatgaatctcggccatccgttccacccacaccacatgcaacaacgggtcttcgtcttccagctcacgcaatgcggtgatgaccttgtgcaaggtcagatcatcgaactggggacgggccggcgagctattgtccgccgcggtctggccggcggtgtcgttctcctcattgcggccggttcccgacttggcggcatcatgctcggcatcgtcccgattcacgctgtcatggccggctcccccacgtttggccgctcccgaggtgccggccgtatcggattccgctccgacgggcaacaccgtgtaggtcaacacgggttgcaacgacggcgattcggcgtccggttccgttcccagcccttcgccggggaaggtccgcgtcagtccggtcaccgcgcataccgagccggccggcacttcggtgaccgtctcgaatttggcgccattgtagatgcgcacctgatcgactttctcggaccacgccatgtcatcatcctcctgcgctggcgacggtgtcgacgccgcggcgcacgaggatgaggagacgatctccttggctttgagcgcaccgccggtgacgcgcagccacgtcatacggttgtgctgaccgtcgtgggcgattttgaacacgcgtgcggcgaaggcggccggccattcacgttcgcgggtgaacgtctccagcccgtccaggaactccttgaccccttcgagtttcaatgccgagccgaaatatacggggaacagctcgcgtacggcgatcatcgatcgcaatctgcccacggacagcgcgccatgttccaaatagtcgttcatcgcctcctcgtccagggtggcgatgtcttcggcgaacgcgtccaacggtagcgcgctgccctcagtggactgttccattgccggcaacggatatatcgcatcgctcagacgcctgcgcaactgagccaacacggcctcgcgggcaaatccggcggcgtcgcacttgttgacgaagatgaacgtcggcacaccgtatctggccagcagacgccatagtgtctcggtatggccttgcacgccatccgtgccggagaccacaagaatcgcgtagtcaagcacacgcagcacacgttcggtttcggctgcgaagtccacgtgccccggcgtatccagcaaggtcaggcgcaggtcgccgtgttctaccaatgcctggtgcgcgaaaatcgtgatgcctcgcgccttctccaaggaattggtgtccagaaacgcatcgccgtgatccactcgccccaatttgcggatctcaccggtacggtagagcagcgcctcggacagcgtggtcttgcccgcgtccacatgcgccacgatgcctgccactatctgtttcatcagctgtgctcccttcccgatgcgccgcatgttgccggccgcctaaccaatatatccgagaaaatccgggagggaaaaattttaccgtcagaccgggctgccggtacaataagtcaccgaacaccgactgatatgaggagcctccgtgaccacttccggcattaccgttttcggccaaccatcccagcccaatcatggtgccggcgggcgaatcgccatggacgatgccctctttcccaccgattatgtggcgctggatctggagaccaccggcttttacccgaacagttgcgccatcacggaaatcggtgccgtgcgcgtgcgggaggggcatatcgtcgatcaattccagcagctggtgaatcccttgcggccgattccgcgtcagatcaccacgctgaccggcatcaccgatgcgatggtggccgacctcgattcgattgacgaggtgcttccccgattcatcgcatggctcgctaccccggctgccggtcccaccgttgagccgattgtcggtcataacgtcagcttcgatctgcgattcctggattataacacccggcatatcgccggctgcggctttgcctgcgcggattatgacacgatgcagatcagccgcgccctgttccccgcgcagcggcatcaccgtctggctgacctgatcgtgcgcttcggcatcgcggacaatgaggaacaccgcgcattaagcgatgccatccagacccagcagtgcttcgaatggatgcggcattatgtcaccgagcatcacgaatccgaagcaatccgttggaagcaggcgccggccagaaacagcaccgaaattctccaccagcagctagtggtaaagcggtagttacagcccgtattattcgcacatagaggaaaactattagtcgctgggctagagaccttatagtggacggattcctctcgcatatcggagaaatgcgggataccacacggttagcggccaatttggggccggcgtcccgcaaccgtgcgggacgccacgcacgtcaaacgatgcacacggctggcatcccacaccccattccacagaaccattggaattctgccaatcccacaaaccggtgacgacaccgtacatcaggttctgtgggacgccagaggaaaaacacccgaaatccgctggcatcccacaccatgtcacaccgcacctgcagcatcgcaccacaccacatcacgccgacacctattcgtgccccccatttgcataattcgacgtttttggaagatggcgcacacatgcatgtgcccccatttgcatatcaaacggttgacgcacaaatggggacacacaaccacaactcagaatcctcggaattccgccaatcctgagatttcatcccccaacacggcaatcgccgcctctgccaccattttcgcatcaaacgattgacgcaacaatggtggcgcatgcccctttgtatcggtatgaatcagtccctgccgtcaggctctccccctattgtgagggccgactggcagggactgaacacgcataatcacatgagcacgccatgccaagcatggacatctcagtacgaacagaacctattcgcacacgttacagcccgtattctttggcgatgacggaccagaggtcggcggcggcctgatcgacggtttcgttgacgatggtgacgtcgaattcgctttcggcggcgagctccactttggcggtttccaagcgtcgggcctgctgttcggcggtttcggtgccgcggccgatcagacggcgcttgagctcttcgaagctcggcggcgcgatgaacacgtacaccacttccaagtcgagttcggcggcgcgctgcttgacgcggcgggcaccctgcaaatcgatttccagaatcgttggcatgccggcagccagatgctcctcaacaggcttgagcaatgtaccgtagtgggccatgccgtgcaccacggcggtttccaggaactcccccgccgcttcgcgggtcaggaactcgtcttcggtgaggaaccagtagttgacgccatcaacctcgccggggcgcggggcacgcgtggtggcggagacggacacccacacttcggggtggtcggcgcgcagcttggcttccacggtgcccttacctactgcggtagggccagtcaggacgattagacggccggcatgggtgttttcagtcatgggttcctccggagatgatgtggtgtgcagcgattatgaatccaatgtggtaacggctcaccggcgagatgaccggtaactgttacagccccgacgaacagggaagaatatgaatcgtgatgcgacgtatgcaatgagatagatacgtacgcatgccgcgacatctgattccgttctgattactggttttctgcgccttcggcagtggcttccatcagcgactgacgtacgtcaagcgcaatcgactcggtagcttggctcagtgcggcgatatccggcccatgcgaggcgataaagcgggacacggtaaccagcacgttgccgcgcgtaccgcggaacacggttttcagatccttggcctcggcaccctgccaaccgtaaccgggggaaagaatcggaccggtgaacttggaggggtccacgccggaatcctgcatccattggccgatggtggcaccgatgatcagacccaccgagcccatgccttcgatatccacgttatgcttctgcgcggtggaggcgatgccgtaggccacggtacgtcccttgtaatcgccgctctggcgcaacgcggtctgcagactcatgccttccggattggaagtcagggaggcgatgaacacgccgcgtccgttttccaacgcttcggtaatcaagccgttcaacgagcgcgcgccatagtacggcagcagcgtgatggcgtcggccagcaacggtgcaccgggcttgaaataggcgtccgcgatggcggaaatcgtggtggacaggccgccgtgcaggcagtccacgatggtgatgacgcccatttgtcgtgccgcgtagagcacgcgctcgagcgcttcgaaacctttggctccgtagcgctcgaacatcgacgtctggaatttgactgctgcggcgcgcccgttggcggcctgcagcatacgcatggagaagagttcggcgccttcggcgtcgacgttgtatccccagtcggtgaggagcttgcgatgtgggtcaatgcccacacacagcggtccgtatttggccattgaattgctcagtcgcagaccgaaatccgaacgttgtgcctgcaattcctcactgctgggtgtagtcatcagaactcccgtcgctccaattcgaacagctgcttcgaatgctcctgaatgctcatgatctgataatcattatgcttcacggcctcgatagccagcagtgcggcttggaactcggtgatggtggtaaactgcggcagatcggctgcaatagcggcagcacggatggagtagccgtcggaacgggagccgcgcgagttcggcgtgttgaggatcatgtcgatcttgccttcctcaatgagctgaaccacgttcttgcccacggagccggcggcgtgatgcacctcgaccggggcttccggatcggtgtccacgcgggtgctgatcttgtccacgatgttcgactcgatgccgtaacggcgaagcacggaggcggtgccctcggtggcccagagcttgaatccaagctcttcgaggcgcacggcgagcagcggcaactgacgcttgtcggtgtcgttcacggaaatgaacacgttgccgtgggtcggcaggccaccatcgtaggcggcgagctggctcttggcgaaggcgtgcgggaagtcgcggtcgaagcccatgacctcgccggtggagcgcatctcaggtccgagcaggatgtcgacggtcttgcccaccggggtgcggaagcgcttgaacggcagcacggattccttgaccgcgacctgctggccggggtggatgtcgccgccgtcgcccttgggcagcagcagaccgttggcgcgctggtcggcgatggtttcgccggccatgatgcgggcggcggccttggccagcgccacgccggtggccttggaggcgaacggcacggtacgggaggcacgcgggttggcttcgatcacatacagcgtgttggccatgaaggcgtactgcacgttgatcaggccctgcacgtggcagcccttggcgatggcgtaggtgccttcgcgcaggcggcggatctggtcgtcggacagggtggacgggggcagggtgcaggcggcgtctccggagtggacgccggcctcctcgacgtgctccataatgccgccgatgtacagttcctcgccgtcgaacagggcgtcgacgtcgatttcgatggcgtcctgcaggaacttgtcgatgagcagcggggagggcaggcggccggagaccacggtatcggccttggcctcggcaagcgcgcggtccacgtacttggtgagctgcttgtcatcgtagacgatttccatgccgcggccgccgagcacgtagctcgggcgcacgagcaccgggtatccgatgcggtgggcagcgtccatggcctcttcgaggctcagggcggtgccgtaacgcggggcgttcatctccgccttcttgagcacctcgccgaacagctcacggttctcggccagatcgatggattccggggtggtgccgagaatcggcacgccggcggccttcaggcgcgcggccaaggacagcggggtctggccgccgagctggacgatgacgcccttgaccgggcccatcctcttctcggcctcgtagatctcgagcacatcctcgaaggtgagcggctcgaagtagaggcggtcggacatgtcgtaatcggtggagacggtctccgggttgcagttgaccatgatggtgtcatagtccttgccaagctcctgcacggcgtgcacgcacgtgtagtcgaactcgatgccctggccgatgcgattcgggccggagccgaggatgatcacggcctcgcgctcgcgcgggcgcagctcggtttcgtcggcgtagcagctgtagtagtacggcgtggcggcgtcgaactcggcggcgcaggtgtcgacggtcttgtagaccgggcgcaggccgtaggtccagcgcagctcgcggatggtgttctcgccttcatcgcccaagccacgcaggtgggccacctgcacgtcggacagaccggcgagcttggccttcttgagcagcttcggggtcagggtctcggcctcgcgcaccgtcatggcggtctcgttgatgaggaagatctgcttcaggaaccacgggtcgatcttggtggccgcgaacacctgctccagcgtggcgccgccccagatggcgcgcatgagctgcaggtaacggtgttcggtcggggtgtggatggcctcaagcagttcggccacttcctcggcggacggcttctcgccatcccagttgaagcccatgtggcgcttgtcgatggagcgcatggccttgccgagggactcctggaagttgccggccagggccatggcctcgcccacagacttcatggaggtggtcagggtggggtcggcgcccgggaacttctcgaaggcgaagcgcggcaccttggtgaccacatagtcgatggtcggctcgaatgaggccggcgtggactgggtgatgtcgttgcgaatctcgtcgagcgtgtagccgagggccagcttggtggcgatcttggcgatcgggaagccggtggccttggaggccagtgcggaggaacgggagacgcgcgggttcatctcgatgacgatgatgcggccggtcttcggatgaacggcgaactggatgttgcagccgccggtgtccacgcccacgccgcggatgatggcgatgccgatgtcacgcagcttctggtattcgcggtcggtcagggtgaagcagggggccacggtgatggagtcaccggtgtgcacgccgaccgggtcgacgttctcgatcgggcagacgaccacgacgttgtcgttgcggtcgcgcatgagctcgagctcgaattccttccagccctcgatgccctcttcgatcaggacttcgtcggtgggcgagtaatggatgccggcgccggcgatgcggtgcagctcctcctcgttgtgggcgatgccagagcccaggccgcccatggtgaagctcgggcgcacaaccagcgggtagccgaacttctcggcgatcttgtcgacttcctcgatgctgtgggcgatgtcggagcgggcggattcggcgccggcctcgtcgacgaccttcttgaacagttcacggtcctcgccacggtcgatggcttccagggaggcaccgatcagttcgacgttgtacttcttcaggacgccggcctcgcccagcgccatggcggcgttgagtgcggtctggccgcccagggtgggcagaagcgcgtcggggcgttccttggcgatgatctgctcgaggatcggagtggcgatcggctcgatgtaggtggcgtcggccatctccgggtcggtcatgatggtggccgggttggagttgacgagga

SEQ ID NO: 407 - DNA, 6332 bp, Unknown
  R48_24m  MAG No. k141_5099
gacgtgcatacggcatcggtcaggccccacagcagaccgggcagcggcagactgagctggctgagatcgccgcctgtggcgatgagcaccgtgcccacaaaagcgagtaccacaccgatgctttcgcgtttgccgggcagccgtttgcccataatacatacgaatacgagtacaaccagcagattgagcgtctgcagcactgtggccgtgccggaattggtccagtcaatggccttcaagtaggagacctgcaccatgagcacgcagaagaacgcgcacagcagaagtctcgggtaggaacggtagtccttaagcgagttgatgaacttgtcaggcgtgaagattcctgcgcaaaccagaaagatgacaccggccaatagctcgcgcacgcaggcgatccacagcggatcggcgtgatagtcgttcatcaggagtttggagacggtggcgttgacgccccagaagacgcctccggcgagcgccagtccggcaccgacgaagatgtcgtgcggggtgcgttcgagggttggcgttggttggccattggttgcagcggtcttgggttcacacatcgcccatcacgatacgcggacgacgtgaattgttctcatatagcggtcatacggcaggaaaataagctctcaaaagagggaaaaccgttgaaatttcaaggaaaatcgatggagcggacgacgggagtcgaacccgcctctaaagcttgggaagctttcattctaccgatgaactacgtccgcatgtgcgcttccacgcacgagaggcaagtgtatcacctatgcggcaccttgcgccatgtgccggtttgagttctgtgctggactagtgaattgcgcgcgtggaatacgtggatgcggccaccggagtgccgttcatttcattggccatttgcatcaggcgtgcgatgcgctgatcagtcggcggatgcgtggagaacagtttggagaaaccgaccgcggagaacggattggcaatcatcatcgcggagacggactgggtgccggccgttttgcgcataggcgtggtctgggcaccataggagatcttgttgagcgcggaggccagggcctcggggtcgccggtcagcagactgccgtcttcgtcggcgtcgtattcgcgagtacgggagatggccatctgaatcagtgatgcggcaatcggcgcgagaatcacgctgaggagcacgccgatcaagccgagaccgcctgaattatcgcggtcgtcgcgcgagttgccgccgccgaaatacatcagagaataaccgaggtacgtgatgacggtggccatggcagaggcgatggcggaggtcagaatgtcgcggttgtacacgtgcatcagttcatgacccagcacgccgcgcaactcgcgggcgttcagaatctgcaggatgccctgcgtgcagcatacggcagcgtgacgttcgttgcggccggtggcgaaggcgttcggactcatggtgggcgcgatgtagatgcgaggcatcggcttgccggccttggcactcagctcgcgcacgatctggtagatttcgggggcttcctgctcgctgacttcccgcgcacccatggaggcgatggcgagtttgtcggagaaccagtaggtgccgaacgtggtaatcaggccgatgacgatatagatgctcagggtttgccgactgccgcccgtggcccaccaaatcagcatgatgatggcccacatcaaggcgaacagcagcgtagtcttcaggccgttgaaatggccgtgcacccgtactttggcatccatgaggctcacactaaaatcactgcctgaatattggctggatgtgcgccgaggggtgaatcggatgggggttggcggtgcttacggtgcggttggcggggatcggaatagcctgtttacatgagattgacgatgcttgacagtgcggttgcttggcctgttttaccgctttaccgctttaccgattggtctgatcgggacgctttgcttgtttggcctgctttggctgcttggatcgtttggcccatcggcctgctcgactggcatgacactggcttttatataaataagaacgctggcgtataaccggcgttcttatttatcgatgtatcaatcgcgccgattgctgctggtgcagttgccggtgcgatgagctgatagtcaatcaggccagagcgagctcacgcatctggtcgggctcgatgaccttcttgtgctcgcggccctccttggcgccttcggcgcgctcgaaggcgtcgaccttcttccagccagcgaagtcaatcggcttgacgccgcggctttccagcagtcggtcgatggattcggggtcgcgatcctcggccacgcgaccaccttcggcggccttggccagatcctcaagcatgttggtcacgatggcgagcgcatcggacttggtggagccgatcaggcccaccggtccgcgcttggcccaaccggtggcgtacaggcggtcgcgcacttcgccgccgtcggcctcggtggtgatgcggccgtcgccgttggcgttggccaggtgggcgccgtgctcgtcgtaggcaatgccgggggcttcggcgggcttgtaaccgatggcgtggtagacggcctcaaccgggtagtcggtgaactcgccggtgcggtgcatcttgccgtcggcaccggtttcggtgcgctccacgcggatggccttgaccttgccgtcctcgccgagaatctcggtgggggcggagttgaagtgcacgtagtactttcggtcggccgggttgccttcgaagtcgacgtcgccgtcgtcttccatgtcttcggccatctcgcggatggcgaacagctcctcgaccatctggcgggtgagcttgtccttgccggccacctcgatggtctcgtcgtccagatcgaagtcgtcctcgttgatgatgagctgcacgccgggcagcttctccatctcgcgcagttcctgcacgctgaacttggcctgggccacgccacggcggatgaacaggtggagcaccttggccttgttctggccgatgccctcgtacacgttgtccggaatatcggtcttggccttgaggtcgtcggcgttgcgcatgagttcgcgggccacgtccatggccacgttgccgccgccgatcacggcgacgttctcggccgaaagcggccattcgcgggcaccggtggggtaaccgtcataccattcgacgaacttggcggcaccgtacacaccttcaaggtcggcaccgggcaggttcagcggcttgtccttgaccgcgccggtggcgaacagcacggcgtcgtaacgggccatcaggtcgtcaagagtcacgtccttgccgaattccacgtcgcaatagaggtggatgttcgggttgtcgagcgtcttctcaagcgcggaggcgatgaacttgatggacgggtggtccggggccacaccgtaacgcaccaggccgaagggcacgggcagcttctcgaacaggtcgatgcgcgcttcggtgccgaggccaagttcttcgcccagcttcttgagctggcgcaggaagatatcggatgagtagacgccggccggaccagcgccgattacagcaatacgaagttcagtgttcacagattcagtcacgcgctctagcctaacgcaaagccttccgttgcaacagagggcgagtggtgggaattctgtgtattaggccatagtttgtgcgtttgggaaacctacgagcactgctaatgtcagattatgggtttccctattggtcaagttattgccgttctcattccaagaagcatgcgaggcggatcaggcccttacttcggatacgtttatgctgcaaggcggttatccacgcatttatgacacgagaatgccgctcaatctgttcttctcgaactacatcgacacttatatcgaacgtgatgtttccgaatatcttgatgtacgcaatttggctgaattccgccgattcttgactctttgcgcactcagttccggagcactcataaactacaccaacatcgccaatgaacttgatgtaagtccgcgaaccgtaaaggcatggatgtcgattctggaatcaagttacatcgcattccatctcatgccgttctacacgaacgcacgcaaacaggtggtcaaaacgccgaaactctatttttatgacactggcttgctgtgtcatctcttgggcattcggacggtcgaagcactggttgcgcatcccaagttcggcgatatatttgaaaacctcatcattgcggaaaccatgaaacagcatttgaacgccaatcaggagccacaattattcttctaccgcgatgccagcaaggtcgaggtggatttgttggatttcaccgatcctaacaaccgtatgctcatagaaatcaaatccggacaaacctatcatgaccggttcgcccgccatctcactttaattggcaatgttctcggtataccgtgtgagcaacagtacgtaaccagtcgggttgagcatagttatgtctcacaaggaatccgcgtcacctccgcccctcgattggctagaaggccgacggtaaagagccgccgcagagcagtaggaattctgtgcaatcagtgaatcccttgaggcattaaagacgtcacctccaacggctctttacgacctcgattgcattcattaggtcatttcttcgttcattaggtcggagagtgctgaagccatcccttggaacggcggggtttcaagggccgctccgaccaaggaccgacctaataaacgtcaaatcgacctaatgaataactccgatgctattgctgctttcgtgggtgggatttccgtttccgccacgtcaccaaccgtatcgccccgattatgtttcgatgcggtggactcgacatacgaccatcccggtcagtcaactgacctacaaaaacagcagaagcctcatattcttaatcagtcccgatcaattagggcagtgagggcccagaggatgctcaccacgtcgatggcctcctggaggaaggcaccgacgacgaccgggataaggttgaacgcggcggcaatcatgccgatggtggcaagcacaaggcccgcgattacggcttgaagcatcacgcgcttggtgcggcgtgcaatggcgatggcgcgcggcacggcggcgatattgtcattcataatgaccacctgagcgctttcggaagcggcggtggacgtgccatcggtcatggccacgccgatatcggcaacagcgagcaccggggcatcattcacaccgtcaccaaccatcatcgtgacggttttgccggctcctgtagcggccctgactgcggctaccttatcctccgggaacagttcggcgtgaacctcgtcaatgccgacttcgctggcaatgatattggcggaagcccgcttgtcaccggtaagcatggcgagctcggtgacgcccaactcatgcagtttggcgagcactgccttggcgttggcgcgcggcacgtcgcgcagcacgatgcgcgcgatcagccggccgtcaacggacacatacgacgccatctcatccggctgcagcaggccaaagcgagtgcgcaggtcatctttttgctgagctccccctcttagggggagctggccgcttcgcgggctgaggggggcagcctcgccgaccgccaggaatccatcctccccggcggccgcgaaagacagccggccaacgcgcaccgcgtggccgttcacctcgccggaaacgcctttgccggcgtcttcattgatgttcttgacgaccggatactcccgtccatggccgggccagctggcctccggctcggggcataggcgctgaccatcctcgaaccgctggcgcagtcgggccatcgcctccacgccagccttggcaatgcctttggacaggatgtgcaccgagtagctttccaccacgccggccatcatcagcacatggtcttcgttgagacgggttgcggcgccgggcagcatctcgacgcgcacgacctgcggctgcttgacggtgagcgtaccggttttgtcgaagaacacctgcgtgacgcggccaaggttttccagcacgtcctgcgctttgataagcacgccggctgcggcgaggcgtcctgttccggcgatgtacgcaaccggtgcggcgatgagcagtgggcagggcgtggccagcaccagcacctgggcgaatcgcgtgggaatgccggacatcgcccatgcgatgccggcgatcaccagcgagagcacggtaaagggcacggccaagcggtctgcggttttcaccacggctggccgcgattcctgcgcggaggccacgagctcgaggatgcgctggtactgcgaatcggcggccac

SEQ ID NO: 408 - DNA, 6198 bp, Unknown
  R48_24m  MAG No. k141_6372
ctgttcgacggcacccgcgtggccgccgacccggccgtcgccgagcgcatcggcaagctgtccgacgccgactacgtgcgccagcccgcccgcgaggagcgtcaggccctgcagcgcgaggccctcggcctgccgctgctgccgaccaccaccatcggctccttcccccagaccaaggagattcgcgccgagcgcgccaagctgcgcaagggcgaggtcaccaaggaagcctacgacgagttcatcaaggcccagatcgacgccgtcatcaagaagcaggaggagatcggcctcgacgtgctggtccacggcgagttcgagcgtaacgacatggtcgaatacttcggccagaacctcaacggcttcctgttcaccaagaacgcttgggttcagtcctacggcacccgttgcgtcaagcctccgatcgtctggggtgacgtgtcccgcgccaactcgatcaccgtggaatggtccgcgtacgcccagtccaagaccgaccacgtgatgaagggcatgctcaccggcccggtgaccatcctcaactggtcctggccgcgcgaggacatcacccacgaggagcagaccaagcagctcgccctcgccatccgcgacgaagtgctcgatctcgaggccgccggcatcaaggtcatccagatcgatgaggccgccctgcgtgagaagctgccgctgcgcaagtccgactggcacgtcaagtacctcgactgggccgttccggccttccgtctggtgcactccgccgtcaagccgaccacccagatccacacccacatgtgctactccgagttcaacgacatcatccgcgacatcgacgcgatggatgccgacgtgatctccttcgaagcctcccgtggcgatctggtggtgctcgacgccattcatgacgcgcacttcgagaccgaggccggcccgggcgtctacgacatccactccccgcgtattccttccgagaaggagatcgaggatcgtatctacgagatccttgacaagatggacgtcaagaaggtgtggatcaaccccgactgcggtctgaagacccgtggtaacgccgagacctggccgagcctggagaacctggtcgccgccgccaaggccgtgcgtgccaagctcgacaagtagcggaaatcaccgagctccctctgtatgagggagctcgggtttatgtaaggaaatcagcatgcattccccgatgttcacccttgaggtctttcccccgaagcgcaacgctcccgtggacaccatctatgacaccctcgacggcctggaggggctgaaccccgacttcatttccgtgacctacggccacggcacccattcggatcgcaccgccaccgcgcgcattgctcatacgatcagcaaggagtacggcattcccgcagtcgcgcatctgaccgcgttgtattccgacaaggcgaaaatcgacgaggccctcgacatgttcgagcaggccggcgtgagcgccgtactcgcattgcgcggcgactacatcgacggcgagcagctggtaggcgagttcaaccacgccagcgacctcgtgtcatacatccgctccgtgaagccgggcctcaaagtgttcggcgcctgctacccggaaggccactaccaggctgactcgctggaccaggacatcgaaaaccttaagatcaaggtcgatgccggcgtcactcacctgatctcccaactgttctacgacaacgaggacttctatcgcttcctcgacaaggcgcgcgccgccggcatcaccgtgccgatcgaggcgggcatcatgccggtgcgtggtgccaagtccgtgcgtcgcatggccgaacgcaacgcctcgcgtatcccggacaagctcaacaccctgctgaacaagtgggaggacgacatccagtccctgcgtgccgccggcatcctctacgcttccgagcagatcgccgacctcgtggcccacggcgtggacggcgtccacctgtattcgatgaaccaccccgccaccacgcgccgtatctggcgcaatacggaaccgttgttcctcggtacgcaaggttgacgcatatcgcggcgcggcgcatctcaatgcgtcgcgccgcacgttaatctgctggcgaaacccagagttcccccagcggccgatggatatcatgaacgtacaagccaaccaaagcgatggaaggaagtccgttatgtgcactggtgtccgtttctccgatgatgagggcaacacctatttcggccgtaatctcgactggagtttctcatatggggagaccatcctggtcactccgcgcggctaccactatgacacggtgttcggtgcgggcggcaaggcgaagccgaacgcggtgatcggcgtgggcgtggtcatggccgataggccgatgtatttcgactgcgccaatgaacatggtctggccatcgccggcttgaatttccccggctacgcctcgttcgtccacgaaccggtcgaaggcacggaaaacgtcgccacgttcgaatttccgctgtgggtggcacgtaatttcgactccgtcgacgaggtcgaggaggcgctcaggaacgtgacgctcgtctcccagatcgtgccgggacagcaggagtctctgctgcactggttcatcggcgacggcaagcgcagcatcgtcgtcgagcagatggccgatggcatgcacgtgcatcatgatgacgttgatgtgctgaccaatcagccgacgttcgacttccatatggaaaatctgcgcaactacatgtgcgtcagcaacgagatggccgaaccgacttcatggggcaaggcctccttgaccgcctggggtgcgggtgtgggcatgcatggcatcccgggcgacgtgagttccccgtcgcgcttcgttcgtgtggcctacaccaacgcgcattacccgcagcagaacgatgaagccgccaatgtgtctcgcctgttccacaccctcggctccgtgcagatggtggacggcatggcgaagatgggcgacggccagttcgaacgcacgctgttcaccagcggatattcgtccaagaccaacacctattacatgaacacctatgatgaccccgccatccgttcctacgccatggccgattacgatatggattcctcggagctcatcagcgtcgcccgatgactccttcccggctcatgccccattcggagggcatgagcgtatatagtggaatcttatggaatcgtcgatgttcaaacccagctccatggatctcatcagggcaggtctgcaagacctcgacaaggcccgcaccttgttcgaccagctcaagacggacgacattcccgatgagcgatgcgccgaactgctgagcatgctggcccacgcctgcgaccccgatatggcattgagcaatttcgtggatatcgtcaacgcgatgcaatccagccagcgcgatctgaaacacgtcatccccgacaacaacgccctgaagcgtctggtcacggtactcggcgtttccgacgcgatgggcaagttcatgcgcttcaagccgcagcttgtggaggccgcagcagtcgacaactgcaacagccatctgttcaatcacgcgcaacgccgtgcacgtctgctcaaggcggtcggcgcggacccggacgaaccggccatgcccgtcgcctccaaggatctggccgaagcggccacggccttgcgttccagctaccggaaccaactggccgccatcatcgcccaggatgccgtggcggacgacccggcctccatccaaccgaccatcagccgcgaactgtccgaccttgcggacgcggcgctcgaaggcgcgctggccatcgcccgccacgaaaccgagggcagcgagcacgtgcgcttcaccatcatcggcatgggcaaactcggcgcacaggaactgaactacgtctccgacgtggacctcatctacgtggtcgaaccggccgacaaggacgtggaccatcagacgctgatccgcgtgggcaccaagatgggcaccatgctgcagcgtgtctgccagtccgccatcatgggcgtggccgagcagccgctgtggcagatcgacggcggcctgcgcccggaaggcaaggacggcgcgctggtgcgcgtgctctcctcgcacaagaactactacgagcagtgggccgagaactgggagttccaggcgttgctcaaggcccgcccggtggctggcgaccccgacctcggccgggcctacatggatatgactcggccgttcgtgtggagcgcgtccaagcgtaagaacttcgtctacgactgccagaaaatgcgcaagcgcgtggaagatctgattcccgcacctctgaaggatcgcgaaatcaagctcggccgcggtggtctgcgcgatgtggaattcaccgtgcagatgcttcagcttgtgcacggccgtaccgatgaatcgctgcgcaccagcaacacgctcgactcgctgcagcgcctgtccgaaggcggctacgtctcgcgcaaacaggccgtgcgcatgtctcaggactaccgcttcgagcgcgtgatggagcatcgccagcagatctggtccctgaagcgcacgcacctgttcccggacctcggccgggcctcggtcggaggcctcgaaaagaagcgcgacatcgacgtggatgagctcaaccagaaccaggagctgcgtcgcctcgcccgcgcattcggcctgcacccggaagaactcgtcgacaaatacgacgacacccgtcgcgaagtacgccacctgcacctcgacatctactatcgcccgatgctgccggtcaacgcccagatggagaacgaccagatcgtgctgagcgtcgaggccgcacaggaacgattcgaatccatcggcttcggcgacccggacgccgccatccgccacgtgcaggcgctcactgccggcgtgggacgcgcggccaaaatcaaccgcatcatcctgcccgccgtcttgcagtggctgggcgagggccagaacccggacatgggcctgctcaactggcgcaagctggaggagaacttcggcaccgaatccggctacctcggcttcctgcgcgactccacctccgctgcccagcgtctgtgccacatcctgtccaactcgcgattcctgggcgacgcgctcaacaagtcggtcgaatcgatcagttggctcggtgatgacggcaatctgcaggcccgcacgcgcgaggcattggatgtgcagaccggctcggcgctggaacgtttcggctcgaacatcaacgagttcgccgcctccatgcgcgccatgcgccgccacgaaatcgaacgcatcggcctgtcttggatgagcggtgtgatcagcgactccgacagtctcaaggccatgaccgacgtgtatgacgcgatcatcgacgcctcactgacctgggccgtgcgccaccagatcgccgcgttcggcgtcgaaaccgcgccggccggcatcaccgtcatcgccatgggccgttacggcgggcgcgaagtgaacttcagctccgatgcggatgccatcctcatctaccgtccggcagacgacgccgacgacggccaagccaacgctttcgccaaaaaggtcgtggaagacctgcgcaacattctgcaaggcccgacgacgctggagcccaagatcgaactcgacctggacctgcgcccggaaggcaagaacggtccgctcgtgcgctcctacgcctcctgcgaggaatactacgaatcctgggcctcgacctgggagcgccaggcgctgctgcgcgcccggtacgcggccggcgacgccgaactggcgcgggacttcctgatcaacatcgccgacccgttgcgctacccgaccacggagctgaccgaggccgaattgcagaacatccgcaagctcaaggcccgtatggaggccgagcgtctgccgcgcggcgtgcgtcgagaacgtcatctgaagctcggcaagggcggcttgtctgacgtggaatggaccgtgcagctcatgcagctccagcacgccggcgatatcaaagatctgcgcgtcaacggcacgttggaggcattggacgtgctggaagccaagaagctcatcagcgctatcgacgcgattcagctgcgcaaggcatggacgttgtgcaccgcggcccgcaacggcaactatctgtggagcgggcgcgccaaccaggccgatattctgcctgatgacatctattcgctgggcggcatcgccgtctacctcggctac

SEQ ID NO: 409 - DNA, 6215 bp, Unknown
  R48_24m  MAG No. k141_6758
accggcacctccgcgatcgagccgggctacggcaccggtcgccgcaaggaggctgtcgcccgtgtccgtctggttccgggtgacggcaagtggaccatcaacggccgcactctggaggagtacttcccctccaagctgctgcagcgtgaggtcaactccccgatcgttctgctcaagctcgaaggcaagttcgacgctatcgtcctcgttgacggcggcggcaccaccggccaggccggcgctatccgcctcggcgttgcccgcgctctgaacgccatcgatcgtgatgccaaccgcgccgccctgaagaaggctggcttcctgacccgcgacgctcgcgtcgtggagcgcaagaaggctggtctgcacaaggcacgtcgcgccccgcagttctccaagcgttaatttcgcttgtcctgtaccgagcatacaaaggctctccgtggaattccgcggagagcctttgtgtttgtgtcgtgctgttttgagtgtgactcacacctgtttcatcagcgtgatgctcagcgccggcatggtccagacattgtcgtcgacgggagtgtccggcgtatcatccacaggggcatcaggcatatcatctgatacctcatcccgaggcgcggacgaggtgccgtttgcggcgtgatccgttgctggcatcgcgaattcgatggtatccgcttcatcctcagtcgaggattccgtgcgctgcatggccacttcttcgaccagcgtgcgtaccgtctcgctggcgtccggtacatgctgcgtccaaacggtggtgtcatcgttcaaatcgcattcctcgacctgaatgccatgcccggctcggcggccgttgatttcggccgagcaccatttaggcgtccagtgagtgtctggcggcaggtggaatgtgcggtcgtcagcggtgccgttgaccacaatgcacacgtccacctcactgttggacagcaatcgcatggtgaagctacgtacgcccagatcgaaccagtcacgctccatcggcgtggtgccgtcgggcaggaaccactgcacgcggcttgagggcttgagtaggccgagttgggtcagtcgggtgaagaagtcctcgtggtgatacaggtccagtgatttacgtagcgccaccagtcgagacacggttttcaggcgacgcatttcgcgtgtcttgttggtggaatacatccaatcccacttcagccacgtgatgtcgttgtcttggcagtaggcgttgttgttgccgtcctgtgtgttgcggaattcgtcgccggcgagcatcatcggcgtacccagcgagagcagcagcatgccgatcatgttcatggccgcctgttcgcgtgccgtgatgacgtctggatcatcggtgacgccttcgacgccgaaattggcggaatggttcaccgacgagccatcattattgttctcgccgttggcttcattgtgcttggagcggtatctggtgaggtccgtcagcgtgaaaccgtcgtggcaggacacgaaattgatggaggccggagcgccgcgcccgggttcggtggcgaacagatcggccgagccgcagagtcgcgtggccatctcctgcaaactgatacgaccgaaatcggagccgccgtccacatcctcaagccagaaggtgcgggccgtgtcgcggaagcggtcattccattcggcgaacggcacggagaattggccggtgcgccagccgaggttgcccagatcccacggctccataatgagcttcaggttgcccagcagcagatcggaacgcagggcgtagaggaacgggtgatgatgggtgaattcgccttccaggcgggccagcgtgacgccaaggtcgaaacggaaaccgtctatgccgatacgcttggcccagtatcgtaatgagtcgatggcaaaggtgaccacatgcgtgttggtgaagtccagcgtattgccgcaaccggtggtgtcttcgagtcgaccggtattggatttttgatggcgatagtaggccaggtcgtcgaggccgcgccagcagaccgtcgggccttcgacgccgccttcgcatgtgtggttgtagaccacgtccatgatgacttcgaagccggcctcgtgcagcgcgcgcaccatgtctatgacttcttggcgcacggcggccgcgcccttctcttgggctgctttggtggcataggagggttcgggggcgaagtagctgagggtggagtagccccagtagttcttgcggccgtgttcttgcaggaagagctcgtcctgcttggccataatcggcagcagttcgatggaggtgatgcccaatccctgcagataggcgagcgttgtggggtgggcgagtccggcgtaggtgccacgcaacgcttcgggcagccacggcgcgttggcggtgaagcctttgacatgcatctcgtagatgacggttttgcgccacggcacatgcgggtgctgcgggtcgccctcatgcttatggatatcgcgatcgtcgatggccacggataccggcacatggccgagcgagtctacggtgctcatggcaccgtatgccgagccggttaccttgcgatccacgacatcgcattcataggagaaggcggcgggggtgagctccatggagccgtcgatgcccttgccatacgggtcaagcaggaatttgtatggattgaagcgcacgccgtgtttcgggtcccatgcgccgtccacgcggtagccataacgcatgccgtcccatgctttgggcaggtgcacgtaccacaggccgtagttcggtccggtcatgcggaacagggtctcgcgcagatacaaatgttcgataatgcgcgtgcacaccggaaactcatggatctgctggatgaacgaggcgttcgggtcttcgaacaggcggatggcgtcttggaagaaggcgccgggctcgtcaatgggctccagcacacacagccaaacctgatcggcagtttcggaacgaacaacgacgtcagccccaccgtcgtcagtgaagtacagccctgggcgagtggcgtaacgatgcaacggtgggtttttcatacctccattgtagacgtgttgtcacttctggtggaagcccttgatttcctgccgcgttccgcagcaccacagatatcgtcgagataattctcggcgaatcgcaatgcggcaccgatgatgttctggtcttcggcgcagtagctcttgcgcagattgaaatggtcggtgccgaacggactgcgtgcgatgacgcgcgccttcagatcctcgatgtcactgtcttcaagatgctgggctgcttcaccgccgacaatcacgtcgcccgcgatgatggatcgcgcgttgacgatggcctgcgccacgtaatccagccattcgtccatgcgctcgcgatgatgccgttcaccctgctcaagcacgctgaagaagccgggaatactttcgtaatcctcgggcaaggtctccggcgagcagtaggtgtccatgcaaccgcgctggccgcagtagcattcgcggccgcccggcaccagcgtcatgtgttcgatggcgccattgcacatattcggaccctgatacagcttgccgcccacgatcaccgcgccgcccgggcgtcgctccagatagacgcacaccgcatcggtgagcgtggagtcgaaccatagctcgaccatggcggaggcatcggaatcgtggatcatcatgcacgggtaatggaccgactggctgatggtttcgagcgtaagccccgtgttgcccataatggtgccgaaggtgatggtggtggcgtcgggggagaggatgccttggatggcgaacgagacgccgagcactttgccgtgcttcttttcgacgtcggaggcgaagttgttgatgatgccgccgatacgctggtagtaaacgttggtgttgcggtaaggcagggcatcgttgcgtttttcgatgacgttgccgtacaggttaatcgcgcacaggcgcagttcgttggaccgcatcactacgccgatggcagtgcgatgatcgggattgaactcataattttgcgccttgcgcccgccggtggaatcctgcagttcgcctttgcggatgagtccgtcatcttctagggcgcgcagattttgggtgatggtgggcaggctgaggccgagttcgcgttccagttcctgcttggtgacatggctatggccatacagatactgggtcatggcactgcggttgtgcgctttcactgcggtcgatggcattgccctcatatttacccctttgtgcgatgagatatatgtaagtatactttatgaaagtggctttcatgtgcctcgacgcggagattatgaggcaacaatcgtatatttgtaggcgattttgggcacttttttaaaccaattttctagaaatgtggggaaaatgagtacttttggaaacttgatttaagaaagttgtcggattgcgttgtttgcaagcatgtgattttcggtaaaaagtgaacaaaaagtaccaaatcgccgaataaagtgaggatttgttcgatatttcgcacaactcttaacaaaaactgttcaatatcgcacgtgaaacgccgtcgattttgtgcgtatgcatcgcgccggaccgttcggtatattgtgactcaagtcacatatgcaatgtgacaacgcatcaccggtcattttcggttactgaggcggtatcccgctggtgcaactgaggtgacgaggcgatggcccagaactttgccataataccccaagaagatcgaggaggaccccaagtggcagaagcaaagaagaaagtcgaagctgccaatccgaccccagaagagaagcaggccgcagctgaggccgaagttgacgcgctggttgcccgcgccaagaaggctctcgacgaattcgagaacctcgaccagaagcaagttgatcgtatcgtcgccaaggcctccatcgccgctctgaacaagcacctcgttctcgccaagatggccgtcgacgagaccggccgtggtctcgtggaagacaaggccaccaagaacatcttcgcctgtgagcacgtcaccaactacctggccggccagaagaccgtcggcatcatccgcgaagacgacgtgatgggcatcgatgaggtcgccgagcccgtcggcgtggtcgccggtgtcaccccggttaccaacccgacctccaccgccatcttcaagtccctcatcgccctgaagacacgctgcccgatcgtcttcggcttccaccccggcgcgcagaagtgctccgtcgaggccgccaagatcgtgcgcgacgccgccatcgaggccggtgctcccgagaactgtatccagtggatcgagcacccgtccatccaggccaccggcgcgctgatgcagcacccgggcgtggccacgatcctcgccaccggtggtccgggcatggtcaaggccgcttactcctccggcaagcccgccctcggcgtgggtgccggcaacgccccggcctatgttgattccgatgtggacatcgtccgtgccgccaacgatctggtgctctccaagcacttcgattacggcatgatctgcgccaccgagcaggccatcatcgcccacaaggacgtctacgaccagctcatcaaggagctcaaggtccgtaaggcctacttcgtcaacgccgaagagaaggccaagctggagcagtacatgttcggctgcaccgccggttccggcgtcaagcccgtgctgaactccgtggtgccgggcaagtccccgcagttcatcgccaaggctgctggcttcgagattccggccgacgccaccattctggccgccgagtgcaaggaagtctccgacgacgagccgctgacccacgagaagctcgctccggtgcaggccgtgctcaaggccgacaacaaggagcaggccttcgagatgtgcgagaagatgctcaagctgggtgccggccacaccgccgccatccacaccaacaaccaggagctcgtgcgtgagtacggcgtccgtatgcacgcctgccgcatcatctggaaccagccttcctcccttggcggcatcggcgacatctacaatgccatcgccccgtcgctgaccctgggctgcggctcctacggcggcaactcggtgtccggcaacgtgcaggccgtgaatctcgtcaacatcaagcgcattgctcggaggaacaacaacatgcagtggttcaagatcccggccaagacctacttcgagccgaacgccatcaagtacctgcgcgaca

SEQ ID NO: 410 - DNA, 5334 bp, Unknown
  R48_24m  MAG No. k141_6998
ccggcttcagcggaaatatgttctgccatggcccatctccttaactcttcccggctcacgccgtcattggtcaattacgccgaggagcttcaataaaagaaccccctacaagaaactaagcatactcccacattctgttcaacaaaagcccaaagctgcaacaattggctattgcccgttcaaaccatggtaatcagcgaacgggaggggccgcccgtcttgcaccatgtgcggctcaaaagtggcatcagtcccccgccgcgaggggatgaataaaccacgcattggtgagtaaaggacaactccactcggtttacatgaatcgctggggcgctccgcgcatcgcgccggaaaccacctgctgcaccagcatgcgtgggtagatgttcaccatccacattgcggcaccggctgcggcgaaccgcacctgaagctggttgacgccgccatcctcgctgatgtacacgtatggggtctccccccggtctcggcgcggacagcacgcgcactgtacgcgccacgcacgggttgagccggtcggcgaacttcagaacgcgccgttcccgcacgcccggagcaacggccgaaggctcattggccggtaatgattcgttcagcgcctgcgaccatcggccgcgcgtggccgttaaagacgattcgaaggaatgggcgaggtacgccaaggagctgggcgtcaacctccagcgcctccgcgtcgagcgtggcctcacccaagagcgcgtggcctatgacgcaggcctgtcgagataccaataccaacgaatggaatggggcaagataggcaaggacacccccgccaaccccacgctgaagaccatcatggccgtggcccaagtgctcggcgtcaccctcgacgaactcctgccgcggccatggcccgacctgcacgccaagtaacgcaatacccatggagacccgcttctatcccctagatgggttacaataaaggtcacaatcaatcattcaagaaggcagatacgcatgattgcaacgtttatgcctgcttgtgtcgaatcccacaggtgacacaccgccggttccgacctcgatggcttgccgctcttcctgaccgtgctcgatgggaccggtcagggaaaggatgaccgtcatcatgatgaacgtaccggaaacgcgaacgtaccggaaacgtagaagatcgccgacgcgccaaagaccagaacgatgtcgccgcgaaacgggccgaacatcacgtaggccacgatcacgacaatcatgatgccaatgcgcaggtggcgacacggcaagccatcggcgtcttcggcattggcgcgaagcgtgcttcggttttccttgattcgacgagcgagcaaccagtaccgcgggttctatatcaggcccagctattggctgctcgctcgtcgacaggttgcacactggtaatcggttagtgcgaaaggtgatgctttcgcttcacgagcacaagcgcgccggccaacaagatcgtcatcatcgcgataacgacgatcggggccacatcggcaccagtggaggccattgcctccgggccggcattcgtctgccccttgccatggccatcgcccttctgcccttgttggcttccggactgtccaccctgatgcccaccttggcttccagtctgattgccggcaccgggcttggtgtcgggctgttccggcttggggaacgcggcattgtatgcggcggcgagtctgcctgccagagagccactatccgacggatcaccgaattgcgctttcacattatccggcaatgcggccagagcagtatatagttgccgtacttcgctcgccggcgtctgaccattcaacgcaccgatgccgcgcaccaaggagatcaccgactgctgcgtgtcataaccggaggaatgttcgtaaccggcgaatcgtttggcgaaatcgaacgatccgtcataggtgttgccgacaccggtcagggagttgacatcgaagaacgaacgctcggccgcgggcagcgatgccgagtatggcgaatacgtacgcatggtgatcttgttgttcgcttcatccatgccgacgtactggaagaacgcattgccgccgttatacgcgaactgatagtcggacaacagccccagcaccggattgccggcgtcattggtcagggtcatttgtccggatccgtgattgtgaccggagtacatcatgaatacctggttgtaccgtttcacgatgttccagattttcgagccagcaccttcatcgtcaccggcttcaccgttgtatccggaatcgtcatcgagggagatttcattcggacgtgaatcggagcacttgaagatatcgtggctcaccaccacagtcgggttgttcgggtggtctttgagcacctgctcgaaccatcgcatatcgtcattgcttgccgaggacgagttgctgaccaccgcgcccatgtcgatgttcatcaccagatacttgtaggagccgttgtctaccagatggtatgaggacaggccatcgggcgagtatgcaaaaccgtgttctttctgatacttgccgaaatcggagtcgggtccgaagtgtttcaggtaattgtccgccttgcgcaagctgggcactccgtagccatgcctgcctccattgtaatcatgattgcccggctgctccaggaaggggacgcccactttctgcatacgcccgaacaccttggacgatgcctgccattgcgcgtcactgtcccagttatccaccacgtcaccgagggacacgatgttggtcagattaagactggaatcttccgaatcgaactggtcgatggctcggtccatcaccgtgggcgcccaacggatggcattctgcgtgtccggcaagaaagccatcgtatgtacgctggggttgtccagcacgaaacgatcgttggtaccgtaatccttgagatactcggtcgggttgggcacgatccagttgccctgtgccagcgcaccgcgggagaatctcacctcctgcaggttgccacgcaggaacttgtcaaagtcgtccttgttgtattggctggtgtcgaaagtgtcgttgtaatacgacgagccgatgcggaagcgaccatcggtcggatcggcatacaggccattgccgttcttgttgatattgcggaatgctttggcaccgttggtgtatgtcaccacgttcgtgccatcggatacgacggcgatgtgataccaaacgccaccgtgatccatggtgacgccccagctggtgacgccgttgttgggatcatcggtgttcatggtcgactcattgtccttgttggcggccttgaactgggtttccttgcaattggagatcgacaggctcatcgaccccatctcgtgttcatccatgttgctgtttgtggattgcctggccgcaagccccatccacgaatcggtactggcgttgaagtcatcgggaaggtagtacacgaactccatggtgtatccgttggcaaattgctctttgttgatgggagcgccgctcgcggtgatgaaatccgcgcccttgggatctcgctgctcgggatgatccttcttatgcgccagatcgctgtcgccgttgagcttcaggcttccaccaccgtcaccgttcatcgaattcgacgaccagttgacatagtcgctgagcttgtaatcatttttcccgtaggtctgcatgtgcagatcgttgccgttgcccgacatatccttgatgaccaggtcaccaccgtcgatggaaccggtggaatgcgcctgctggaatttccaatcggccaccacatccaatggggcaccttcacgttcaagcgccgcggcggagactaccgtacccggcgcggcgaacacggcaagcgctatgcacaccaccgctggtttgatgatattgcgtatctttcctatatgcatgaccaggctctccctagcactctcctatttcaacgacgatgcgaatgtgccgttgcaatgcgcctacgcatcatggcctttacaaggctatccgccgcttttcggagacgatggctgattcaggcactgttcatggtgcgcgcatcaaatatcattcgtcgttcaactgatgttcaatgtgcgatgaaccgtatgaacttgttatggaccgtccctataccggtcgagttgccgtgtcgtggcggtaccgccggttccggcctcgttgccggagtaggcatggggcatgtccatgaccgccgaccatatgaacgaacaggcccgtccgctgtggacctcatcttgcggttcatagcggacgggcctgttatatgggaggggtggcggcgaacggcgatggcgccaccaggacttcggctgctatggggtcgagctcatgggcctggcgccgcgcgtggcgtgcgcggagcatggcgtggtggtcgcccaagtgccgtgggcggagccgggcagccggttcaccggggatttcgagatggagtgcgcgtggccggcggcggtcgccagccagaagaccgtgggcggattcccacgcatcgcgtggaggacggccggccatatcgcgcgcagggtcgccgcccgcttggaatcctcgatgccgtgcatgttcgacggtcccaccgcgataggcgtggacgagaccagctgcaggaagggggcacacgtacatcaccgtggccgtcgaccacaagcgcagacgggtcgcttgggcgcacgacggatacggcaaggaggtgctcggcctgttcttccgacagccgaccgacgagcagcgcgcctccatacggatcgccgccggagacggcaccgaatggatcgacgccggcgtgaaggagcgcccgccgaacgccgagcgcgtcccggactcgttccacatcgtctcccggatgagcgacgcgcccgaccaggtcaggaaacggttgcggaaccaggcccggcgcggcaacgacaagacggccaccgaggcgatgcgcggcgtcagatacgccgtgcccaagaacccggaggatctcaccgaacggcaggacacggatcccaggggccagccctaccggtcatggcaactcaaggaactccccaggacgctcccgcaccagcccaccggacaagccggggccaagctgaaacgatggatcttccgggcctcccacagccgcatccccgagatcgtcgaactatgcaggaagatccgcagacgcaaggacgacatccccaaaaccatcagactcggccactccaacgccaggcccgaggcattcaacaacaagatcaaggtcaccatccgcatggcctacggcttccgacacgtcgacaacctcatcgccatgatcaaactccgatgcagcggcccacccatccacctaccaacacccatcctc

SEQ ID NO: 411 - DNA, 3773 bp, Unknown
  R48_24m  MAG No. k141_7756
ctggtcagcaccaaggccgatatgaagatcctcgaggaactgggtttgagccgtgaggaatccaagcgcaacatcatgcacctgtcgggcggccagcgtcaacgggtggcggtcggccgcgcgctggtcgccccgggccgcgcgatcctcgcggacgagccgacgggcagcctcgacccggagatgaccgacgaggtgattcatctgctgcagcatgccgcccatcagctcggcaaatgcgtaatcgtggtgacgcattccaagcgtgtcgccgactccgccgatgtcgtgctgcgtctcaggagcaagaaactgacccgggcgtgacccacctgggccgggcggcacccatacaccgcttcggcatttcggcaccccggcgaccgggcactccggtatcccggcccttcggcattctggcacccccgcgctccggcaccccggcgacccactcgcgttgccggggtgccgtattcgctctgcgccataatgtgcgtgataatggaaccatgccagtgatgaatgatgaagtgcccggcgaggttgaaccgcaccccgattgttggactggagtaatacagattcgatgatcggaggtgcggttcaaaaggcccttttttgtgtcggattacgaaccgcgcgtttcaccgcttgccgttgtagatctcgttgtcgatcacatcggcgaacacgcggttgacggccgggcgcactaccttcagcgacggcgtcaggcacttgttctcctgcgtgaactgcgtgcccagcacggcgaacttgcgcacggattcggcacgcgagaccgtcgcattcgccttgtccacgtactgctggatctcctcgcgcaccgcggcgttcgtggcgagccggtcgaccggcgtctccgtggacaggccgtgcgcgggcagccaaatggccagcgactccgggtcaagtgtcaccagcgcgccgatgaacgggcgctggtcgcccaccaccacgcagtgctccacgatcgggcacttggcgatctcctcctccagcggaatgggggagacgttcttgccgccggcggtaataataatgtccttgattcgaccggtgatgatgatgcggccggcgtcatcgatctcggccaagtcgccggtcctgagccagccgtcggcggtgaacgcctcggccgtcttctccggcagattgtggtagccgcggaacacgttcgggcccttgacctgcagttcgccttcgtcggaaatgcgaatcgaggagccgggcgcgggctggcctacggtgccgatcacattgtcggtcacgcgcgtggcggcgaacggggcggcggtttcggtcatgccgtaaccctgaatcatcggcagaccgatgccgttgtagaaatgcgctagatcgagcgacagcggtgcgccgccgcaggccacgtacttgatcttcgggcccagagcgccgcgcaccgtgcggtagacgagcgtttcgtacttggcgcgctcggcgatttcggcaaacgtgtgctgctcgccggcctgctccttgcggctccagacgcgcgcggcctcggcggccttgacaaacaggcggcccttccagccggcaccggccttgtgcgaggcggcgttgtacaccttctcgaacacgcgtggcacgcccagcaggtaggtcggttcaaacgaacgcaggtccggcagcagggttttggtgtccggcagatagccgaccacgccgtcatcggaggcgatggaggcgtactggataaatcgtgcgaagcagtgggccagcggcaggaagagcagcaggcgcggatggtcgtcaagcaccacttcatgaagcgcctgcgaagcggtgatggtgatggacacgaagttcttatgggtcagttcggcacccttcgggttgccggtggagcccgaagtgtagacgatggtggccagatcgtcggcgcgcacggtggccacgcgctcgttcagttcctcgtccgaaacagccacgcccagaccttcgagcgcgcccagtgcgttgccctcgagcatgagaatctgcttcaaggcagggcagtggtccttgaccgagtcgagccggtcgaagcgctcgcgattgtcggcaaaggccagcttgaccaccgaatcgttcatgatgcgctgggcctgtggggcggagtcggtgtcatagatcggcacgcttaccgcgcccaccgcggccagtgcgaaatcgagaatgccccattctagacgggtggaggaaaagatggtcaccgcgtcgcccttggcgatgccgagcgcgatcaggcccttggcggccgagaccacgcgctcgtggaattcgccggtggtgacgttctgccagcggccggggccgattttcttggcggcgattaccgtgtccgcgccggtgcgggcaaggcgatcggtaagtagggagtagatggtctggttgtcgcggatctcgatggattcgccaggcgtggtgtagtggtcaagcataagcgggccgtgtccttacgtgcgttgcgtgatggctgttgacaaaatcgagccattctgacaagttaggttacgctggcgtaaggttgcgcgcgttgtgggcaatggagaagttgtctgtctggttttgtggattgtatacaacgccgtgtctaaccggtttgctctacggttatgacaccgtgtccatttcgggagccattgacttcctgcaggacaagtacgcgctgagcccggccctgcagggtctggtcatcagctccatcatgatcggcggcgtgatcggcgccggcttctccggcttcctgtccgataagtacggccgccgccgaagcactggtcgccgcgcaaaaagcagcactaggccgcgtttgctgcgtctattggcgaattgatcatatgggtcgtctgcgtgcagacgacccttttgcgttccgtcggcttctgacaccgtagaaacgtgctttctcggcttcgaggggctgattttgccttatctggaagtctacttccacttcgaggggctgatgcccaagtagacacggccctaaaacggcggaatgacgttgacgtgtagccgtttatacttccgattacatggatgaggagcccctcgaagcggagatagacttccggcaaatgcgaaatcagccccttgaaacggaagtaggcctccggcaaacgcaaaaattagcctcctcgaaacggataaatgcacgtattgggtgtagttgatgcttcagcccctgatatcgaagcatatttttctggttggcgcgtctagcatgcgcactccgcaatcgataattctgtggcctctctcactttaaaagtctggcgtgtgcgagggcgttcgcttaaggtgaatgggattgcgcggaatgtggagcgcagggtcatgaccatgcgcgtgctgcagatccagctgcgctcgctgaccgccatggatatcgtggcctacggcggtgcggcggccgacattggtgtggctctatggcagtatgcgcataccaccgcagccgccgcaggagccagcaccgccggctggtcgccgatcatgctcgccgcccacctgcccggcgcattcgcctatctggcctacggcctgcaatacctgatgccgttcggtgcgggcttccgctcaccctcgccggactgctgctgattgtgctgctgtccgccgaattctttattcccatgcgtcagcttggctcgttcttccacgtggcgatgaacggcatgacctccaccaagcgcatcttcgctctgctggacaccccggagcccgagcatggcacggcgacc

SEQ ID NO: 412 - DNA, 22759 bp, Unknown
  R48_24m  MAG No. k141_8309
gcgccgacgccgtcggggcgcatgcatatcggcaacgtgtacgccatgttgggtgcatggctttcggcccgttcgcgtggcgaccgcatgctgatgcgtatcgaagacgtggacaagccgcgcgtggttgccggtgcggaccagctcatgatggacgacctgcattggctcggcctcgactgggatggcgaaccgatgttccaatcccagcgcactgagcgctacgaatacgctctcgaatgcctgcgctcgcaaggtgtgctatacccctgtttctgctcgcgtgccgacattcgcgccgcctcggcccccaacgagggcgacggctttatggtgtaccccggcacgtgccgccgcctgctgcacgaccatcccgacgaggtccgtgcccgtctgtttcgcggcgaccagcattccatccgtatcgccatgccgaaaccggcagcgggagaaaagcaacgtacagtgcctgacgattccgctgcgctgtcgggagccgtgccgccggaacagcagggcgatgccggaatcgttgatggtgtcgcatgctttaacgaccgtgtctatagtccacagcactacgatttggcccgcgaggtaggcgattccgtgattcgccgagccgatggactgttcggctatcaactagtcgtggtcgtggatgacctcgatatggatgttgatgatatcgtgcgcggccgtgatctgctgcgctccaccgcgctgcaaatgtggattcgccagtgtctgttggctggcggctttgagccggaatgcggcaacacggaaaagcctctcgccgagcaccccgagtatgcgcacctgccgctcatcgacaatgcggccggtcggcgtttagccaagcgcgaacgttcgctggatatgggagccttgcgcgcccgcaacgtaacccccgagcaaatcatcggatactgcgcctggttgctgcgtctgcaacccactccaatcccttgcaaacccgccgatctgctggcagatttcagctgggagccgctgcgtgccaaccacctggaccgcgcgctgaaaccggacgatccaaccactccacaatggctggcagaagcgttaggctagaggcagcccaacaggaaggattccaatgtcgtcgaagctctggagaaacgtggcgctggcaggcgtggccgccgccggtgctgccgtgtgggccgtggccccgcgcacgttcaatgacaagcgtcgtaatttcgtgccctccattccgaaggtatggtatgcccatcgtggcttgcatgatgcgggttctggtttggtcggctataccgatatcgctgattatggtggggataattcggtcagcgcccaagccgataccactgagcgatccatcgccgaaaacgatgattatgtgtcgcttgcccgtcgcatggctgtcaaggccggctacggcagtgcggatatgaccggtccgatcgctcctgaaaactcgctggccgcattcgccgccgcctgcgaggctggctatggcatcgaactcgacgtgcagcttacgctcgacggtcaagtggtcgtggtccatgacgccgatttgctgcgcgtggccggcgaccctcgtcgcgtcgaagacctgacgtacgacgaactgacccgtattccgctgttcccgaacggcaagtccggtgacttgaaggccgaaccgttgccgggtgccgacgcgaacccgccgctggtggtcacgccgtccgccgcgccgaaggggtactaccagcatgtgccgctgttctccgatgtgctggacgtggtggccggccaggctccgctgattgtggaatacaagttcagcgacaacaaggcttgggatgagcgtagcgaagagctcatggaaaagggccacgccttgcttgaggcgtatgacggcccgtacgtgatcgaatccttccatccgggcgcggtgaattggtacaaggagcatcaccctgaggtgtgccgcggtcagctgagctggccggcgaagctgagcaagaatggtgcggctgaatgggccgccggcttactggcgttcgactggctgtctcgtcctgatttcgtggcttatgactggaccggtggcgcttcgccgcaagtcaagctcgctcgttcgatgggtgcgatgccggtttcatggaccgtgcgcagcagcgatgaactcgcccagtgcgcgccctacttcgaccgccacatcttcgaagcgttcgtccccgacgcagtgtgaggttgagggcgttattgatgtgctcatggggcggttacaggctcatcgggcggtaacttgcccatggggcggtttgaagaatatgtgaaaccgcggaattaagccattttggcataccgccccatgagggttttaccgccccatggggcaattaccgccccatgggggatttcccgccccatgaggtatggcgttttacttgtgatatggctcgccagcgttgatcttataagcgcgataaatctgctccagcagaatcacgcgcatgagctgatgcgggaacgtcatcttcgagaaactcagcagaaaatcagcacgacgcagaatcgcgtcgtcaaggccgattgagccgccgatgaccagctgaatatggctggtgccacgcaatccaaggtcgttgattttggcggccaattcttcgctggacagctgcttgccattgatggcaagggcaataacaaacgcgccgtccttcagatgcttggcgatgcgttcgccttctttggccttgatctgtcggtcaacgccttcggaggcgtggtcaggcgttttctcatctgccacttcaatgatgttgagcctgcagtagcgcgaaagtcgcttggaatactcgtcgatggcgtcgcgaagatatcgttccttcacgcgtcccggcgcaataatgtcgatttgcataaaaagcccatcacattggctcccctctctgaggggagccaggaaaatcagtcaattacgccatagagacggtcgccggcatcgcccaaccccggcacgatgtagcacttgtcgttgagcttctcgtcgaccgcgcacactacgaccttgaagtcgatggacggatcgatgtgctcttccacgaacttgatgccttcaggcgccgcgatgatgttgatcgcggtcacgtccttggcaccgcgctcggccagataatgcgtggcagcaaccagcgtgccaccggtggcgagcatcgggtcgatcaggaagcactgacgaccggacagatcctccggtagacggttcgcataggtgacctgctgagtggggtgttcctcgtcgcgcttcataccaaggaagccgacttcggcggtcggcataagacgggtcatgccgtcgagcatacccagacctgcacgcagcaccggcacaatgatcggacgcggtttggccagcttcttaccggtcatcggagcgaccggtgtttcgattggtgcggcaactacggacaggttgcgggtggcctcataggcctcgagcatcacaagctccgagacgagctcgcggaaagtggaggaaggagtgttcttgtcgcgcagcacggtgagcttgtgctcgaccagcggatgattcaaaacgtgaagttccatactccccagcctacccgtagttcgcggggaagtcacttgggcggcagtcgcgcgcgtatcgcacaccaatgtaaacagcgttcgacggcgggccgcgtaacaccgttgattttgtaacgtgagcgttatgtatgagacgcatatgaaatattcaggcaacggaaattcacgcaggcactgccatcgtatagtgcagtcggccggaagccagccgtcgatatacggcaagtggttcagcacgatatcaggcatcagggcacggtacggcaatcagcgtagacattccgcgggcgggcaacgttcgcggaatgtagtcgtatgtggggaggaagagtcatatgactcgattgcaaagactgaagatgggtgctgcggtgtgcattgttgccgcagtgcttgccaccagcggttgtggctggggtcgcaccgtggccgagaaagaggcccaagagaacaacgcgactgcggcaagcgacacctcatcatgtgtggacacctcaggcaacaccatcaaaatcggtttcgtgaattcgctgtctggcacgatggccatttccgaacagacggtgagtgattcgctgcacatggccgttgatgagattaacgcaaagggcggcgtgctgggcaagcagctcaaggtagtgcagcaggacggcaagtccgagccggctgtgttcgccgaaaaagccaagaccctcatcgaaaaggaatgcgtggccgcggtgttcggcggctggacgtcctcttcgcgtaaggccatgctgcctgtgttcgaggcggataacgcgctgctgttctacccgctgcaatacgagggcatggaagccagcccgaacatcttctactcgggtgctgcaccgaaccagcagattgtgcctgcgcttgattaccttaaggagcaaggctacaagaagctgttcttggttggctccgattatgtgttcccgcagaccgcaaatcgcgtggtcaaggcgtacgccgagggcaatggcatggaagtggtcggcgaggaatataccccaatgggctccaccgacttcaccaccatcgtcaacaagctcaagttctccggcgcggatgcggtggtgaacacgctgaacggtgattccaacgtcgcattcttcaaggaatacaaggcttccggcctgaaagccgccaccacgccggtgatttccatgtctatcgccgaggaagaggtttccgctatcggcgttgacaacgtcaaggaccagctcactgcttggaactactaccagacgctgaacaatgcgcaaaacaagacgttcgtgaagaacttcaaggcgcgctacggagccaatcgccccacctccgacccgatggaatcggcgtacacatctgtgtacctgtggaagggcatggtcgagaaggccaagtcgttcgatgtggacaaggtcaaggctgcagcagacggtgtcaccttcaatgcaccggaaggcaaggtcaaggtggacggcgaaaaccaccacatctacaagacctcatacatcggcaagatcggctcagacaagctcatccacaccgtctggaagtcggacggtcccatcaagccggacccgtacctgaagacctacagctgggccaagagcctgagcgccagcgtcgagagcaactgagagaagaggacacaacaacatgggtatgttatttccacaaattgtggcaggtctgtccaacggatcgattctgctgctcgcagccctcgggttgtcgttgaccttcggccagatgggcgttatcaacaacgcccacggcgaattcatgatggccggcgcatacaccgcatacgtcatgagcatggtcatcggcaataaaacagtgtccctggccgtggcgctggtggtcggtttcgtagtagccggtttgcttggtttactgctggacgtgttgctgctggagcgtatgcgcaatcgtccgcttgatacgctgctggttaccttcggtgtatcgctggtattgcagcagctcgcacgcgatattttcggtgccactccggtctacgcttcggctcctgaagcgctgaccaatccggtgaccatctttggctacagcttctctgcaggccgactgttcatctttattctgtcgattatctgcgtggctgcgctgtacgcgatcctgaagctcacgccgctgggtcgccagattcgcgccacttccgagaaccgcgacctcgctgaggtttccggcatctccaccaagatggtcgaccatgtgacgttcttcctgggctccggcatcgccggtatcgctggcgtggcgctgagcctgctgaactcgattagcttcaacttcggtacgaccttcatcgtgcaggccttcctggttgttgtggccggcggcgttggccagctcaagggcgcggttatcgcctcgttcgtgctgggcttgtgccagtcgtccatcgaactgccgacctctgcctcgattggtcaggttgccgtgttcctgattgtggtggtgttcctgcagttcaggccgcagggcttggtctccatccgctccaggaacctcgcgtgagtgcttcagaagggtaaggaaacgacaatgaagatgactttgagcgaatacgccacgaaatataaggctttgatcggtgtggtcattgccgtggcgctgatcttcctttctccgactgtgctgagcgtgtacaacctcggcctgctgtccaaatacctgtgctacgcgatggtcgcggtcggcatcggcctggcttggggccaaggcggtatgctgacgctgggccaaggcctgttctttggtctcggcgcgtacgtgatggctatccacatgaagcttgaggacattggcgtgggccaagtgccggacttcatgtcccagtacggcatcaccaaggttcctggattctgggaactcttccgcaatccggtcatcgccgtgattggcgtggctgcggtaccgggcattatcgccgcaatcctcggtctggctgtgttcggccgtggcgtgcgtggcgcctacttcgcaattctttcgcaggcgctggttgccgcgttcgccgtgctgcttatcggccagtcgaaaaccaccggtggcaccaacggtctcaacgatttcaagggattctttggttacgacttgactgataacgccaacaagcagatgatcttctacatctgcgcgttcctgacgctggccatggtgcttatcgtctactggattcgcaaatcgtttatgggcgacctgattatcggcgtgcgcgaccaagagaaccgcatgaagttcttgggctataaccccgcctccatcaaggtgttcgccttctcggtggctgcaatgttcgccggcattggtggcgcaatgttcgtgccagtggtcggcatcatttcgccgtccgatatcggcgtgacgccgtccatcctgatgctcgccggcgtggtgatcggcggacgtgccactttgctcggcccggtggtcggcacgctgctggtgcgctttgcggaaacgcagctgtctgaggcgtatccgtccgcgtggacgtacatcgaaggcctgatcttcattctggtgattgcctttgtgccgaagggcttgggacagttcaagggcgtatggccttggattaaggagaagatcgggctcggaaagagttcggttggagcttcggctggtgctggtgctggtgccgttgccggtaccggtactgctactgcaaaggcggtgaacgcatgagtgaggagaagaacatgagctcgaatccatcggctcccgcacctgcatcgcaggccgatttggagcagttgcgcgccgaaatgattgagatgcgcgacgaagccaagcgtatgcgcgacgaagcggcccagatgaaggccgaaatcgttgaagagcgtacgaagctgcacgatcagcttgcggtgctggatgatcgcggcggccagtggagcgattatctggaagttcgtggactgcacgttgagttcgatggattcgtggccgtcaagaatcttgatttgactgtgcagcacggcgatttgcgattcctgatcggcccgaacggtgctggtaaaacgaccatcatcgacgcgattaccggactggtgccggccactggttccgcggaattccgtggcgagcagctgttgggccgcaagccgaacgacatcgtcaagctgggcgtcgggcgtaccttccagaccgcatcggtggttgaagagctgtccgtgttggagaatctgcagctggccgagggcttccgcaagaagggtcgtgagctgttccagccgatgggcggcgtttcgcagaacatcgaatacatgatggacgtgtgcaatctgactgtggatgcaaacaagcccgcaggcatcctgccgcacggcaagaaacagtggctggaaatcggtatgctgctcgtgcaggacgcgcacctgctgctgctcgacgagccggtggccggcatgactccggccgagcgtgtgcagaccggtgagctgctcaagcgatgcagcaagaaccgcacggtcatcatcgtggaacacgacatggatttcatgcgtcagttcgccgattcggtcacggtgctcaaccagggcgaaatccttgccgagggttcggtcgaagacatccaaaacaacgaagaagtagtccgcatctacctgggcggcggagaaaactaactccctgtctcccctccctgaggccgaggcgttaagcaaacagcccagtgggctgtttgtagccgaaggcgagacgatagtcgaaccagcaggttgcaggcaaggcccgtccttaattgcggacgagctgtcaccgaaggtgactgaggggagtaggtaagaggaagaagcgcaatatggaccgcactgacaacaaccatcgcatcccggaatgcgctttttcagtgcatattgagggtgatacaacgcgcctcaacatcaatatgcacgacgccgtagaaagtgaataatcatggcaatgcttgaagtaaaggatttgaacaccggttacggcaaagtgaccgtcgtcaacgacatcagtttcgacgtggccgccggcgaatgggtgagcatcgtcggcaacaacggtgccggtaagaccacgctgttgaaggcgattctgggcttgctgcccgtttcgtccggttcgattagtttcgagggcaaggacattaccaaggctgcaccgaaccaacgcatccgcaagggcatggcgttcgtgccgcagggccagcagtcctttggcaccatgaccgtggacgaaaacctgcacgtggtcgccgaccgctacggttcagaggccaaggcccgttacgacgaagccgtggaaatgttcccggtcttgaaggaatttgctggccgacgtgccggtctgctgtccggtggccagcgtcagcagctttcgattgcccgcgcgctgatcacccgccccaagctcatgattctcgatgagccgaccgaaggcatccagcccaatatcgtcgccgaaatccagaaggccattcgcatgatggccgaagacaagggtatcggtgtggtcttggttgagcagaaggtccaattcgccgtcgagcgcgccgaccgctactacgtcctggcctccggccgtttcatcgccaccggcgaaggcggccccgaccaagtagaagccgccaaggaatccatgagagtgtgattgattcgacccccgtttatggccatagagcgttatgagaaacgtcccgttcttataacgctcttattattgggcgatgttagggctcacattggtgtgcctgaaaaactccagtcaacaacagaggatgttatgagacttacaccacgagagactgacaagttgatgctgtacttggcggggcagcttgccaaagaccgcaaagccagaggcgtgaagctcaactatgtggaggcgattgcgttgatttccgccgaatgcgttgagcgggcgcgtgagggaagcactgtggcggagctcatggcatacggtcgcacgctgctcaagcctgaagatgtgatggatggcgtggccgagatgctggaagtggtggaggtcgaggccacgttcccggacggcaccaagctcgtctctattcataaccccatcgaatccaccgagaagttggtgccgggggaatatctgctggctgacgatgatttggaactcaatgaaggttccgaagacatcgagctggacgtggtgaacactgcggatcgaccgattcagattggttcgcacttccacttctttgaagttaataagtacctgaagttcgaccgtaaggcggcgtatggcaagcggttggatatcgcggctggtacggctgtgaggttcgagccgggtgaaacgcatcgagtgcggttgattgatattggtggcacgcgtgagattcacggcttcagcgcactggttgaggggaagttggatgaccctgaggtgcgggaggccgcgtttaagaaggcgcatgagcttggattctcgggaatctgagctaagggccaccctcagtcagcttcgctgacagctcccgccagcggggagcggactacctctcagtctcgcttcgcgagccagctcccctgacaaggggagctgaaaaacagcaaggacttttgacatgaagattattacgcgcaaggattatgcgggaatgttcgggccgaccacgggagaccgcgtgcgactcggtgacacgaacctcatcatcgaggtggaaaaggactacacgcactacggtgatgaactgaagttcggtggaggcaaatcattccgcgacggcatgggccaaagctccgtgcagctcgacgttgaatcgccggataccatcatcaccaacgccctcatcgtggactacaccggcatctacaaggcggacatcggcatcaaagacggcaaaatcagcgccatcggcaaggccggcagcccgcagaccatgagcggcatcacccccggtctcgaagcgggctccggcactgaagctctcgccggcgaaggcctcatcgtcaccgcaggcggactcgacacccacatccacttcatctccccgcagcagattcgcactgccctcgccggtggcgtgaccacgatggtcggcggcggcaccggtccggccgacggcaccaacgccaccacctgcaacccgggagccttccacctgacccgcatgatcgaggccgccgaagcgctgcccatcaacatcgcctaccttggcaagggcaacgactccagccccgaaccgttgcgtgagcagattcgcgccggtgccgcaggcctgaagatccacgaggactggggtgccaccccggccgtcatcgacactgcactcggcgtggccgacgaaaccgacacgcaggtggctatccacaccgatactctgaacgaaggcggttgtgtggaagacaccatcgccgcgttcaagggccgcaccatccacacctaccacaccgaaggcgctggaggcggccacgctccggacatcattcgtgccgctggcttcccaaacgtgctgccgagttccacgaacccgaccatgccgttcacgcgcaacaccatcgacgagcatctcgacatgatgatggtctgccaccacctcgaccgcaatgtgcccgaagacatctctttcgccgactcgcgcatccgccccgagaccatcggtgccgaagacgtgctacacgacatgggcatcatctccatgatgagctccgactcgcaggccatgggccgcgtgggcgaggtcatcacccgcaccatccagaccgccgacaaaatgaagaagcagcgcggtccgctccccgaagacgaacacgacaacaaccgcaacgacaacttccgtgtcaagcgctacgtctccaagttcaccatcaacccggccatcacccacggcatttccgaatacgtgggctccatcgaagtcggtaagatggcggatctcgtgctttggcagccgtccatgttcggcgcgaagccggaaatggtcatcaagggtggctccatcgcctactctcgtatgggtgacgcgaatgcttctatcccgaccccggaacctgtctactaccgcgatatgttcggcgcgctcggccgtgcgcttggcaagtcctgcgccacgtttgtttcgcaggccgccgtggatgacgatatcaagggcaagctggagctgcagcgccaggtgttaccagtgcatggctgccgcacggtaggcaagaaggatctgaagttcaacgacgtgctcgccgacattcaggtcaatcccgaaaccttccaagtgacggtggacggcgaaccggtccactctgacccggcgtacgagttgccgcttacccagcggtacttcctgttctgagagaactggtggctctcctcaaaggggagagccacttggttttagccttcggccacgaaatcggtcacgaaatcggccacatctcgaatgaggtcgaaggcgtcgtcgcctcgggtggtcagtacacgcaagcagatgccattgattacgcggctcacgccgagctcgccggtgaagccgatggcgtctgcgtgttcatggatgcgagtgatgagcgcgtcttcggcggcgatgcgggcagtctcgatgcgctcgcggatggcggcggaggatgcttctttagttgcggcatcttgtacagcgtcgctagggtcgagttcgggcaggtgagcgtagagaacgccgcagtgggtgaattcgcgccacatgccgagttcggtgtagtcaaaagcatcaggttccaacagcatgcggtcagcaaaggccagatgttcgcgcggttgggcagcggcggcttccgccttggaaggccggcctcggcgatgtgcgtgctgttgcgccaattcggctgcggcggccttggtcacggcttcgggttcggccacatatacgcgcatacgattcgtaaaacgtttcatggcccaacgctcatccatcccaacgcggccacatgtcgccacatccgcatacacgaatgctgactcggcggaaatatgcgcggtggtcaggttcatgaatgagctgttcttgaacggaatcactgggaacggcaggaacacggctttggcattgccacgcgccctgagttcgatggtgcgttcggccgagccgtccgcggtgtcgaacaccttctcgtagctttgcgttttgatggtcgaatcggtgcctgggccgaagtcgatatcgatatgggcttcatcgcccctcaggaagccaggggaggcgagcatcacgacgaaatccgaatgacgtccgttggtgaacggggtcatcagtttgaacggcgcctcgaaataaatatcgtcgattttggtacgtccgtggcggaatgcagtggatagacgaaaagtgctactgcccatggacgaatcgctgccttcttatgattggtgcctgacgatgacatgggcaattatgccgcacttggtgcaacggtatgtttcggcccgtccgtttttggatacgggcgggccaaaacatcacatgtcctcgaacagcacgctcttcttgatccatgcgatgacgtcgtccactccggcaccgcccatcaggtcggtgaagatgaacgggcggtcgccgcgcatcttcttggagtcgcgggccatcacgtctagatcggcgtgaaccaacggggccaggtcggccttgttgatcaccagcaggtcggagcgggtgacgccggggccgcccttgcgtgggatcttgtcgccctcatcggtggcgatgacgtagattgtggcgtcggccaggtccgggctgaacgtggcggacagattgtcgccgccggactccacgaacatgatctgcacgtccgggtgggtgcgggccatttcctcacaggcctcgaggttcatcgagcagtcctcgcggatggcggtgtgggggcagccaccggtctccacgccgacgatacggtccggcgcgaggcgtgagtgctcgataaggaactcggcgtcttccttggtgtagatatcattggtgaccacgcagatgctgtattcgtcagccatcttgcgggtcaggcgttcgataagcgcggttttgccggaaccgaccggtccggcgacgccgatgcgtacgtatgacatggggtttctcctttatgtgggaattagttaggtatgtggtttgcgggtgaggttatcctggctcccctccttgatgggagccaggataattagctcatgtagagcctcgagtacaagatttcatgctgcatggcggcgatgtcgaggtaagctccggagatgccgagatcctcgggcttcaacgtcatcgcgatattcaccgcgcgcacgaggcgcgggaacgaatcatgcagggcgacttggccagcgtactggctgagcggaatcgccttcgcggcgcacatggtaagcgcgctcaacagcgaatatccatacatgatggccgcgtcgcgcacgtcgttcgcatggtcagccgcgtacaggcccatcgcgatcgaatgcaggccacggcagcggcgctcgcgaatcagcccggcatacaggtcgagcgacggcgagccgtacaggccgtcggcggcatcgtgcagctggtggcgttcggtgtgatgctcgtgcacggcgatgatgctgttttcgcgcgaatccgcagcggatgcggtggcattgtcggcaggacttggcttggcgaacccacgatgcccatccgaggtctgcgcctggccggcatccatctgctcggccagcttgaccaggcgggtacacatgcgctcgctgccctcacggatttcacgtgcggattgcagggccgaggccagctcgtcaagttcgatgagtcgctcggccagccctttgcgggagactcgcgaatcggtggcgtacttgccggccagcaccatctgcccgatttccttgtacggtgcgacttcgaggtagttcttcatatactcctcgaaatcggcgccacggcgcaagaagtcgcgctgtacgaaggtctccatgccgttggacagcgcgaacgcgcccacggggaagacgctgtcgcacacctgcagcatggccagacgtcgcgattcggtttcgttgatgttcatggggctatcagtgggtgtgccaggtgcggccgccgtcgtggctgtgggagccgtccgggcggtgcagcacgccgttcatctcatattcggcgggctcaccctcacctgcgtcgtgtgtatgcacatccagatggccggcggcctcctcggccgggaattccttgtcggcctcggcttcctgctcctcctcggccacgtcgcccgtggtcttgttggtgcccggaatcagtgtgccggtgccggcgtgggccttgacgatcaggaagccgtcaaacccaccctcgatgatatgcggttcataaccgatcttcttcgtgtattccatggtcggatggtcgtacggcaccagcacgcggtcgttctcgaccttgagactcaggtggcggttgcccagttcgaagcacaggcgtcccatttccttcatcgagttaaccggaatctcaatcagctgtgcggttttaatgcgtgcgaaatagcgcttgtcttcggtttcggcgagcacatcgccatccttgatggtcttgccaaccatgatgccgaactcggtgccgtcctcggccaccttgcgcatgcgcttcttatcggtttcgaaccagtcgaaggcaatcgacacattaagtttgccgtcgctgtactgctgactgatgatgttgccggtgatttctttggcgatcatccgttctccttggagaaaattgcttgtggcgtgagaatccccacgtccttcatgccacagtgtagagagcctgttgcgtcactttgtaacgaatgatcgaaatatgcaaaaaatatagcggaaaaatatccgaaaacacggaaaccggatatatggtacacggtgtgtcgctagtaattgcaagctattttgcatggttgtgcattagacgaatcacagttgtgatattacatatcacgttcctggagcgggaggttgtggtcgagctccgaaatcaacaaaaagagggaagttggatataatcgaagtacctgacaccgtcacattggcgatgcacattccggataatttcatttcgccgtccaccggggcgttgttctacgtcatcatgattccggtgtgggtgctgtgcctacgctacgtgatccgcaacagcacgccggagaagatggcctacctgggcgccggcgcggcgttctcgttcctcatcatgatgttcaacgtgcccacgcccggcggcaccaccgcgcacggtgtcggcggcgcgctgatcgctctgctgctcggtccccagtacgcgacggtcgccgtgtcggtggccctgctgctgcaggcgctgctcttcggcgacggcggcctgatcacgctcggcgccaactgcttcaacatggcgttcgtgctgccgtttgtggcttacggactgtacgtgttgctacgcaaggtgctgcccgacggctggaaggaacgcgtagccgaattcgtgtccggctatatcggcatcacgctcgccgcattctgcgtggcgctggaactcggcgtgcagccgctgctgttcaaagccgctgacggccaggcgctctacttcccgttcacctttaacgtgacgattcccgccatgctgatcccgcacctggccgtagccagcgtggtcgagggtctggtgaccgtggtggttgtcgaattcgtgcgccgcaccgcaccggagattatcgaagacaatgcccgtgtgaacttcgccgagaccgccggtgctgacggcaaacaggtcgcgcacgccggactgcgcaagtctgcgtggattgcgctggccgtggtggcggtgctttccccgatcggcctgctcgccaccggcgacgcctggggcgagtggggcgccgaggacttcatgagtgccacggggctcaactacgtgccgcagtacatcgcccatggcttctcgtgggatgcgctgttgcctgactactcgctgcagggtctgccggacatcgccggctacattctctccgcagtgattggcatcgccgtgctcactatcgtgttccgtctgctggcgctcgcggtgagcggcaacggcaagacatccgcgcgttgacgatacctgcatggatgcgtgagtcggaggattacgatcctccggctgacaagtcatccttcatcgaacacaacctggggcatttcggcagcgtactcgagcaggttggtcatgcgttgccgattgagtcgagcccggtcgacaaggtgctgggctcggtcaatccgggcgtgcggctgctgggcatactggccgcgattgtctgcgtcaacatcacatgcaacatgctgttctcgtacatcatgctggcggtggtgctgctgatgatggcaacccggccggcgcgcctgatgaaggcgttgctcggcccggtgctggccgtatgcatcctgagcctggtcgtggcggtgccgagcctgctgattgggcagtacagtgcgccggtccggctggtggtgcgtgcgttcgtggcggtgtcgctggtgatcgcactggcgcgtacggtgccgtggaatcgcctgattgccggactgcgcgcagttggctaccctgattcggtgatttatatctgcgacgtgacgattcagttcatcgatattctcggtcgttcgatggtggagttgctggatgcgctgcggttgcgcagcgtgggccgcgaccggaccaagctgatgtccgccggccagttgatgggcgcgctgtttctgcgtgcgaatacgcaggcgcggcaaatggctgaatcgatggtgtgccgggggtttgacggtacgtatcatatccaccacgagcgtctgctgacgtggcgcaacggggtgtatgccgtgtgcattgctgcaatgattgcgctggcggtgtattcgggatgagggtggttcgaatgaatggagcccaataatgttcggattaaagcgtaatcataaacaaactgcagccatgcagccagataactcatggttccgcggcgacccgctggtcgaactgaatcacatcgacttttcctataaagattacggcgacgccgacgatgaaacctcgtcgcacgccgtgctacgtgatttttcgctgaccgtcgaacgcggtgagcgcgtggcgctgctcgggccgaacggcagcggcaagaccacgctgatgcgcatcatcaatgcgctggaatttccggactcaggcgagtatcggtttggcggtactccggtggttcgcgaggaagtcgaggagaaaaacagtctgttcgccaaggcgctgcatcagcgcattggattcgtgttccagagttccgacacccagctgttctgcccgtccgtggaagaggaaatcgcgttcggaccgttgcagatggggctgccggatgccgaagtgcagcagcgggtcgatgacatggtggcgttgttcggcttggatcggctgcgggagcgtgcgccataccgcctatccggcggtgagaaaaagcgtgtggcgattgcctgctgcatgtctctgaacccggacttgctggttttggacgagccgaccgacggcttggacgagcgcaatactgacgtagtggttgaggtattacgcgccttcactgatgccggcaagactgtactgttctccacgcatcaccacgacatcgtggagcggctcgacgctcgcatcgtgcgcgtgcatccgtcactatggcaatgacattcacgtggcgtctattggatatcttcatcgaaaaaagcagaaaggcatcggtgaggatcgcgagtccggcgagaactgcgatagtcgctttggtgatggttgccttcatgagagtttccccaaggtgttgacgttgatttcatgagattcgaaaaagagcgtatctaggccgaaccggacagtaagtcaacggtttctggaaaccagctgaaaaagctacggtattgtgaaatatgtctcatcggaatgggtcaagtttggcctagcgctcgcagtcgtgcgcgaagattcgttggattgattctcggtggattaagtcataggaagaaactagacaccttgcggtgtaaaaccgggaatagaaatagtgtaaaatcgggaatgagaaaggtgtaaaatctatattgaggtgattgggtagctgagaaaggccggaaaatgaacgatttgaacaatcgtagtgataccttgactcaacctgattatcgtgctcgcgtggtcgatggcaggttaggtaagttacttaaagcattcggcgcggtggaaatcgtcgggccaaaatggtgtggaaagacatggacggcgctttcccgctcgcgaagtatggatcgtctggatgatgccgctacctttgcggccgcacagactgatccggcattggtactcatgggtaatgaaccgcatttggtggatgagtggcaagatgtgccgcaaatttgggatgccgctcgtcgtcatgtggatgacaatgcgaatcgcaaggggcagctgattcttacgggctcggccattccgaaggaccgagaaacaattcaccacagtggcacaggtcgaatttctcgcttgcgtatgtggcctatgagtctgtgcgagtcagggcaatctaccggtgtagtgagcttgtctggtttgtttgatggacaattcgagcctgccgaatgtgcaaccagcattgaagatattgccagatggtgctgtcgaggtgggtggcccgcaaatcttgatttggatgacgagtttgctctggaaattccgagtgaatatatcaagagtgtgcttgatatcagcgtgcccaagatgaacaagaaccctgaaaccgcgcgtgcactcatgcgtgcgctcgccgtgaacgtatcgcaggcaccaaaatatgcgacgctggctgcggatatggcctatggcgatgagcgccgtgagccggatacgcagacggtgaagagctatttggaaatgttcaaggacttgtatctgctgacggatttggagggttgggaaccgccactccgcgcaaagagtcgtgtgcgaaccaagcccaagcgatatttcgtggatccttcgttgcctgctgcggttttaggtgcgtcgccgaagacgctgatgcgggatacacagacgctcggcgatctgtttgaaacgctgtgcattcgtgatttgaatgtatatctgtcggccatgccgggtgcgaacaatcgcatcgcctactaccgcgatgacaaggggcttgaagttgatgtcattatcgagttgtctgacggcaggtggggtgccatcgaaataaaactcagtgaccttaaggtgaacgatgacaatgcggataagctcaaatccttccgcaacaaaatctgcggcaatcccatggctcaggtccgagaccccgaattcatgatgttccttaccggccgaggtgggaaggcctatcgccgcaatgacggcatactggtcgtgcccatcgcaacgctcggggcgtgaatctggtaaaagaagagaagcgccgaaccgcgaaagcgcctgtcggcgcaagggccgctcgcggcggcaaaaaatggagcccggggcttaagcacggtccgacgcggatacttagtatagcttgcgatgggtctcgccgcgccggggaaggggtggtgttggccggtagctgattgttggggtgcggtcggtggatttctccctcagtcatgggcatcgcccgtgacagctccctcatcagagggagcctggagcggggttactccaaccgtccgcgacgccagaggttggcaccgtgctggaaatccttggcggtggccatgaggctgccggcggtgtgcataaggcgggcggctttggtgcgtacggccttctcatcggcatccgaggagaaggcgccgttggcctcggcccgggtcaccatgcgccgcgcctccacgcgcaagcccaacgccaccacatcggtaaacgccgccgcacgctcaagcgccacggcaaaatcgcccacaaaagcaccggagagaatcgaatcggccaatcgcacgatgtcatcttcactgggagcctgatccacgccggcgatggcggaggcggtagtggccaccggctcacccaagcgccacagatgcgcgattgagtcgcgattcgatcgcatccacgtacgcaacatatacagtcgccacagcacaccaggcagcgaatccggctcagcatcgctccacagttcggcgatttcatccacgccgaccgtctccaccaacgtgagcacccgctcaacaaccgccgggtcctcgctatggcgcacacgatccagcaatgcggcagcggacagatggctcatctcgctcaacgcctgcgggtccatgccaccggccaatccatcggccacagccgggtcgagctgagccgggcgcgaggggcgtgaagaacccatgcgagcaggtccgaatgccgctccggccgcacgcaacgagccgaagcccgggcccagactgccggcggcaccattgtgcgcggcatgagctgcagcggcagcggccgaggagttggatgaatcaggaaatgcgggtctagtagacaagcggttgaaccttctgaatatcgatgattttgggaccatgaggcgtcggagtgacgaacagcgccaccgccgtgccggtcggcatgaacggtgtcttggcgatcaggcgtttgctcagagacggcgcaacgcacatgctgcgcaggtgtccgaacataccaccaatcaccggccggtgcatgcatatcgctatgggctgacggcgctcaagtgcgaactcgatttcgctgagtagacactcccatgcggtgtccggcgcagcggcgtatgcatcttcggtgagcggatcgagatgaaccatgtctcgtccggtctgccacgcgaacatctccaacgtctcctggcagcgcacccaaggcgacgtggccagtcgggtcggattgaaacacgccagctcgcggttcagcgcgtatgccgcagccgcgccgcgcggcgtgatcggacggttcgcgtccgaacccttccacagcttgcgcgcttccgctttgccgtggcgcacgataatcaccggcacggcgtcaagcgcgccctcctgcacccgatcaacgaatagcgcgaggatgtccttatcggtggaatggctgagcttcttgcgggcctcggccggcgtcagccacaaaacttcgtcgatttcgccgatgtccgcccgatgcaccgggccaaacgcatgggtacgccgcaggttgtcgatggcgctgatcggcgtggccatccagaactggatatgcttggtatccgccgaccgatccttggtatggcgctgtttgctgccttcttcggacagcgggtactcgatgtcgcccagataggggccaagttccacggacaggcccgattcctcgccgatctcgcgcacggcggcatgccggtgtgattcgtttggatcgaccttgcctttcggccagctccagtcgtcgtatttcgggcgatgcacgacgcacagttcgatgcggttgagtacgttgtccaccgcggccgggctgtcggcctgcgccaggtccggggtgggagccgcgtccgatgcgccgtgtgctgccgtggccttgccgtcagaatccgcggtattcgcgatgatggtgccatcggtggcaatattggatttcgctgatggagacgatgcctgcgtcggctcggcatcatccttccaccggtacagaataccgccggcggcttccacgattcgtctcatactgttcgtacccatctcttgtattgtaggtcacgttggaccgctgctacgtagtttttgcgcgctgaacaacgatgcccggcatcctctcgaaagaggagccgggcatcgtaaccaccctcagtcagctcgtgctgacagggagcatcgaatgaaatcagttgtgcgaattggggcggcgctggtgcttgcgaatcagatattcctgactgtcgaccagcgggcggccctcgtcgtccttggtgtgcagcacatacgtgccgtcgggctgcatgtgccagctcatggtggagtcggccatctgcaggtccacgtacttgatgagcccgtcgacctgctccggggcggtgacacgcaccagagcctccacacggcggtcaaggttacggtgcatgaggtcagccgaaccgatgtagacctccgggccggaagccggaccctcgccgatctgcgggccgtccgc

SEQ ID NO: 413 - DNA, 18920 bp, Unknown
  R48_24m  MAG No. k141_8460
aagatgctcgttcggagcatcgcacagcacgcacactatttgagggagatctcttgctatccgtcaacgatgagacccgacaaggcgcattgcgcttctggaacaacgacggtgacgcgctagctcccagtgagaccggcgttccaagagaagtgaccattcagtcccgcatccatagcaatgatgagcagctgctttgaatccggcattgcgcggcttcgcgaagcaaacgcacaatgacttcacattcccgccttgcaccagctggctgcaatctgcgtatggtcatgtatctgtaggccggcacgaatgcggctgatgggtgcggcgaatcgtgacattgcttattacccattcgccccttcaggcgtaccattcgggccggcgcagtttcaggaatggtcgctgtttgcgcgctgctgcggtttgtgtgagatcgatgtcggtgataatcaactgttcatggtcatcagtctcgctgacgacgttgccgtacgggtccaccaccactgattggccggcgaacgccacatcgccctccttgccgacccggttgcacatggcgatggccacctggttctgcatgacctggacgcgaatctcccacaggaacggcttcgacggttcggcgtcagtgttcggaaccgatgctcgccgtcggcacgatgatcaggcggcgccgcgcaacgcgcatgtgcggatgccttcacggggttcactcaaatagcgtcatccagtcgggatcgcggtgggccgcaaaacacatggcgatttgttccgcggtgtttcttgtttccgaaagccgcggcaaccggtcttcctcgaagtagcggatttccgtcgtttcgatgttggccgagaaccaaccgccggcgcggctgcacaatacgaagaacttgagcaccccgtacggataggtcagcgcgttgtgattggcgcagtcctgcaccgcgatgagtcgctcgcccctcacatcgagcccagtctcctccttgacctccttgacggcgttggaccgaatggactggttctcgtcgacccagcctccgggcagtgaccattccccgctgttctcatgcgtcatgaggatcctgccttcttcatcgaagatggccgcacgagtgtcgagtttcggcgtcggatatccggcgctgagcagtcgactcacctgtccggccggcgcatcaacctgcgtggagagcatgtcgaccgccatcgcgcggatacgctcgtagcgctcccggtcgaaggggtccttgcagtacatcagtccggtctgggccagcgcctgcaattctcgggcctgttccagtaacgtgcggttcgtggccatcatcgttcatcctgtcatcgtaaggtcttggatccgtttgcgctcaggcatcgcagcgtagtgcaagcagtatagcacttcgaaccgttccggggacgagggtctcagcgcatcccccgtaacctctcccatgtgccatcaacgcttggcgagctgcacgttcttgcgctgtctgcgattgcggctggcgaccgacttttcacgctcgcggcgcacgtgggcctcctcacgcgcggccgccgcgcgctcttcttccaaagacggcaatccggaggcgacgcggtgccggttctcccgctcatggtcgcgttcggccttgcgctccccgcctcggatccgggcgccggaaaccatcgcagttggcagagcgtctggccgaagttccacaggttattggtcagccagtacagcagcacgccgaacggcaaggtgccgcccgacaccacgtagatggccgggaacacaaacgcggtcagcttctgcgtgcggaactgcggtgaatccatggcgtccttcggcgtattgcgatggatgagcagccactgcatcgcgaacaacatcagacacatcaacgccacggccacgccgatgacgacgtgcgactgcggcgagacgaccgtgccgaacgagtcggcgatgcgcacgccgaatatggacgatgattcgatgtcgcccgccatgacgcggtcgatgccgctcaacggttccgcattcccggcggcgcttgcgggcagggattgcagcgtgtagaacagcgagcacagaatcggcgcctgaatcagcgaagcaggtatgaaccgagcggattggcgttatgccgctgctgcaaagccataatttcacgttgcatggcttctctggaacgcagatccttacgcgcggcgtacttgcgttggatacgttggatttgcggttggagcacctgcatacgctgcgtcgcgcgcatttgggagaagaagagaggcaatagacagatacggatgatgagcacgaggcacataatcgcgatgcctaagctgtgcggcaccgactccttctacggctgcggcatggtcaccggccagcccatcggcaccatgatcggctctcgcatgatcaacaatgcgcaagccggcttcatcatcggcgccgtgatcatgggcttccggattcgtggcgcttgacatctgacctcgcgaggaatcctcaaaggacatggaacgcaccaagatgacgctcaaggatctcgctgtctccttccacttcccgaagttctccacctcgcgtgacttctacaaggcgttcggctgccgagtgtgcatgttgctcagctaccagatgatctccgtgtaccaactctacatcgtcgaggattacgtgcaccagaccaagaccgaggctgccggcaccatcgccaccatgtccatcatcaccatggtcgtttccctgagcgcttcgctgatctccggcccgatctccgacaagatgcacacgcacaaggtaccagtcatcatcgcctcgctgctgttcgcgattggcaccgcgatgccgtggatcatgccgagtgtcacgggcatgtacctgtacgcgggcatcgccggcttcggctatggcgtgtactcggccatcgaccaggcactcaacgtcgacgtgttgccgaacaaggaagaggccgacaaggacctcggcatcctcagcttggccaccacgctcggccaagcagtcggccccaccatcacctccgtggtcaagaccacgaccggcacctacacgccggcgttcgccatctccatcgtcatggccgtgtacgctgccgtgttcgtgctgcgtatccagaaggtgaagtagccgctgcgagtgcctatctccgtttcaaggggctgattttgactttgcggaacatctacttccgtttcaaggggctgatgccaaagtagccactggttaaaaacggcggaatagtgatagaacaatgccatttctatctgcgttccgccagttgaccagccccttgaaacggaagtagacctccggcaaacgccaaatcagccccttgaagctgattttgactcagcatcatgcagcgcagctatatcctcagtgcgggtatactattccgggccgtcacgacgacgcctatggaacgcacgcatggcaaagagagaaacatgagtcagcccgacaccgacacggcggcacagtcgccgtcctcgcagcaggaaccgcagattcagacggatggccgtcaaaaccagccggaacaggtgaaccaaccagcgcaaatcagccagtccgagtcgccacatgacggcaaaggcgagcacgcgctgcataccaacctgaagcgcggcatggaatcccgccacctgcagatgatctcgttgggcggcgtgatcggcaccggcctgttcctgagctccggatacaccatccagcaggcgggccccatcggcaccattctggcgtatggcatcggcgcgctgatcgtctacctggtcatgctcacgctcggcgaactgtccgtggccatgccggtgaccggctccttccatgtgtatgccgagaagttcatcggccctggcaccggcttcgtgatcgcgatccagtactggctcacatggacggtggcgctcggatccgagttcaccgccgccgggctgctcatgcagcgctggttcccgaacagtcccacatgggcgtggagcgcggcgtgcatcacactcatcttcaccctgaacgctttgtcggtgcgtttcttcgccgaggcggagttctggttcgcctccatcaaggtgttcgccatctgcgcgttcatcgtcatcggatcgctcgccatcttcggcgtcatcccggtcgccggctaccaacatgccccgatgttcggcaatctcatcaaggacggcgtcttccccaacggcttcatgccggtgttcgccacgattctgaccgtcaacttcgcgttctccggcaccgaactcatcggcgtgaccgccggtgagacgagggacccgcaaaccgccgtgccgaaagccatccacaccaccctgtggcgtctggtgctcttcttcatcggctcaatcaccgtgatgtgcgcgctgattccgtggcgcaaggccggcgtgggcgaaagcccgttcgtgctcgtgttcaacggcataggcatcccctatgcgggagacatcatgaacttcgtggtgctcacggccgtgctttccgcctcgaattccggcctgtacgcctccacgcgcatggtgtggtcgatgggcaacgaaggcatgattccgcgctggttcgccaaaacgaaccgtcgcggcgtgccgatgctcgccttgtgcgccgcgatggccggtggcctgctggcgctcctgtcttccgtgatcgccgcctcgactgtgtacctggtgctggtggcgctttccggcctgtccgccgtggtggtgtggatcgccatcgcctactgccagatcgtgttccgtcgccgttggctggagtccggccattccaccagcgaactcaaataccgcacgcccggctatccgtacgtgtcttgggcggcgttcatcctgtgcaccgcatcgttcgtattggtgattttcgacgtggagcaacggttcgcgctcgtggccgagctcgtgttcatcgtggcctgctatggggcgtatttcctgcaacagtgggtacgcaagcgcaaaaaggcgaccgaggccgacgacctcgatacgctttgggtcgcgcgtgactgaacggctcgcgacctaccggcgcaccgctattcgcgccgtgaacgtgcactgatccaacgcaatgccagacccagcaaatccacaccgccacgattgcccatgatgtgggtttgagcgcggccggggagaacggcagcacctgcaggccaatgatgattaagccggcggccagcagcgaagctgagatgaccataccgaacttcttccagtcaaggccttcgcttgcctcttcggcactctgcggaatcgtgtcgaaaccggtgtagaagagcggcgtcatcaccagcactccgggcagaaacgacccgaccatggtaaccgcgccggacgtcgagccgatcggcagcagaaacacggcgcccagcacgaaggcgatcatcgcctcgaccgggccaccgccgacgatcatccagtcaccgaccagcagcacccatacggtgccgatgattgcgccgaatcccatggtgaagtagttccacaggctcagcgatctgaccatgccgccgtcgtcgccgctgccatcggcactactgtcgccgttgccgttgttaccatcctcgtgcacaggaatagcggcactgggcaggccagtcgattccaccaaactggccgtcatcgtgcttgacgggctgaatgccgtggatgcggcgaccatgaccgagcctcctttaattcggcctgactgtgatgataacgccgttcacgatatgccgtattatgaacgcagtgagagcccgcttcaccggccctattcggctcatgaataaacttcgcctatctgcggcactgaacacatgaccataatgtgatacacgtcacttcctgaaatacgtagtcgttatggaatcacccgcacgtttcccgtatcggagctgtacgatagctgtgagacagggggtcgtcagatttcggggggagggttccggaaacggtccgactgcaggatgcaccgggccgtgcgacacatgtcaacttgcgtattcacgccaaactcaattgagcaagccgattctcgtaaatggccagaagcggaacaacgccacaccttggatatcgtcgtatggcactagcccattgttgccgtcgtcaagatggtatcgagaatctctggaattggagcgattatcaccaagcacgaacacgttgccgtcagtaacggttacggaaaaaggactgtcgcttggattcacgccggacttaagataagcgctttcatcaatgggtttgccgttgaccgtgatgggctccccggatcccttgcaggcgacggtatcgccgggcagaccgatgacacgtttgattaggtaacgattgctgtcgattatcgacatcagattggtgggaagctgctccccctccatccagtctgcgggatctttgaacacgatgatgtcgccacggtgcagtgcaaagagtctcggagtcaatcgcgaggcaaatacgcggtcgccgatttgcaacgtgtcttccatgctacgggatggaatcacatagacgttgaacacgaaggtgcgtcccagcaacacgaccagcatcaccgcgatcaccgtcagcagatagccgcgaatttcactccaaacggagggctttcgcgcatgtctcctcgactgtccacgcgcttttttgctatgacgccccaccatcatatcctttccgaccggtaacgcaacaccatagtcctcaaaccatgccgttacctacgcccatgtttgagctcagctgtcacaccagcggttcgcgcacgtctagttcacaggcgatgccggtttccttgcgggcccattcggccgcctgcagtgcggcgatgttccataatgcgcacggcactccgccaaggtccggatgcgatgcccagaatgtgaggtcatcagcgtatgcggtgatgaccgattcttccgtgactggcatgatcgtgtggtacagacggtccgcaagcgtggccacgaattcgttggccgcggcgaacgtgtcgataagatgctgttcggcggtcaccggcgggccgaccagctcccaggattcgacgtccgtggcgctccaatgcgcggcttcgccgtccacatcgcgttgcaaagagacgaacagcctggcgaactcatccgaagtcagtcccgtaacccggcgtcgggttgacaattcaatcggagtcatcagataccgttcctttcgcttcgttcattccgttgtctcgctggtttgatttgctgccaaccggtacaaagcctatctcgcacacctcacgatagcccaaaccaccggcatggccatgattgccagccctacgaccagtgaccatgaggagccggcgattccggtcagattggtcatggcggcggagacgtcatacatgccatgagccacgatcagcggtgtaatcatgcccatacggcggtacagcagcacggcgagcactgcaatcagcacacgcggtggcgtgccgccggcacaatggccctatcgagcatcgccgcatgattcgtgcggtccacaatcgaggcagcatcggtttccattcggttcatgcggccagactatcgcccgttcttgccgattgcctgtaagcaggttcggatagactggcgcgagaacaatgcgagaaagaggcaagaatgacccggaaacggtcacaacagcacgacgcacaacgcaaaccgtcctggcgcgtacgctggaagaccatgagccgagccgtagacatggaaatccgcgaacacaaaagctcattcgcggtctatgtggtgctgcgcatgctggtgctcgccatggcaatactccagttctttaacggcgactacgaaaatgtgttcctgtgcatcctgacgttgctgttgctgttggcgccggcgttcatccaggtgcagttccgcatcgagctgccttcggtgctggaagtcatcgtgctggtgttcgtgttctcgtccgagattcttggcgagatcagttcgttctatgagatcttcccgttctgggacacggtgttgcacacgatgaacggcttcctcgccgcggcgatcggcttctcgctggtcgacctgctcaaccggtccgaccgggtgaagttcgagctttcgcccctgtatctggcgatcgtctccttctgcttctccatgaccatcggcgtgatctgggagttcttcgaattcggcatggaccagttgttcggattcgacatgcagaaagacgccatcgtgcattccatcagctcggtgatgctcgaccccacgcacaccaaccatgcgattcgcatcaacgacatcacccaggtcacggtcaatggccaagacttgggcctcggcggctacctcgacatcggtctgatcgacacgatggaggatcttatcgtcaacttcatcggcgcggtcgtgttctccgtgttcggcttcctgtacgtgaagaaccgcggcaagaaaaactccatcatcagtcggttcgtgccgcgccgcaagtccgccgaccgcgattatctgcgactggtgatcgatggcgggagcgcggctgatgccaaggccaaagccggcggtgccaacgctgacgatagtgctaacgccagtgcggccggcaccgattcagctgatgcagccggagccaaagccggcaatgccggcgccgctccgaccgtcaccgccaagccctgagtacgctctacagcactttcgaagcgtcgaaacggtagtgcccggtgaccgtcatgtgcttcttgaaggcgaagtagtcgttttcgcgctgccgctgcgccatgttgtgaatcacgtacggtgcacgccccgcgatcggccggcggatagccgccctgatagtagccggaatcgtaagccggatggttttcggcgtccttgcgcgcacccgccacgatatccgcgtaatcgtccacaccattgtcattgaaatcgaccgaactggcgactctcgaatacttgcggtccgcctcgccgtgtgattcgatgattcatgaacgtattcgggtcacactgtgatcgtccgacccgccgcccgcacctcccaatccgcccggtgcttgaacttgtggggctttggcggtatcgcgaccgcagcatcgccatgctcatctccagccatcagctcaacgaattgcaggagttgtgcgggcgattcctgttcatcaaaggcggccggcttgcggacgaattcgccggcgaacagaagcggatcacggttatcgagcttggccggccgctcggtgtcgcgaaacgtgcggcggtcgcggctttggatccggccgccgtcattcatactgattctgccggccgtgaacctgttcaactccgatttcatgaaagtcagcggaaagaccggttcggtgagtgtgctggatttcctcgctggcgagttcgtcgtacagaacatgctgatgctgccgatggtggtcatggcctatctggtggctggtgccatctatacgcccgtggcctccggccgcatgttcctgtacaaggatctggaccgcgccacgatcatcaatgcgaaaatccttgccctgtttggtatctacgccgtgtacgtggcattgcagacggtggtgacggtcgctctctacatcctgtacatcgcgcgcttcgactacgcttccggcacactgctgccggccgcaggtgcggacatcgcttcggatgtggcctccatcgccggcatcctgtgcgccggtgtggtgactatactggtggtggccgcccttgccacccggttctcgaccggcagtacgaaagcgcggaccacaccgtgcacctcgctgtgaaggtggacgaggatacggtgtggcttaacagaaagcaattggccttgctgtttggccgcgatatcaaaacaatcggcaagcatatcggcaatgcattgagggaagagctcaatggattttcagttgtcgcaaaatttgcgacaactgcatctgacggtaagacataccaagtcgagcattacaacttggatatgatcctgtcggtcggataccgcgtcaaatccaaggaaggcatctaatttccggcgatgggccaactcagttctgaagcagcatctcgttgatggttacaccatcaatcacaagcggcttgacgcacttcacgccgtcgtcaaggtgctatcgaggtccaccgaaccggaaattgctggcaccgcagagatcttggaacgatatttgccgagtcttgtgctgcttaacgactatgacacaggcaatgtccctatacccaagggcgacgagtcccagtgggtcttgacctatgaggacgcgatgctgttcatccggtcgatgccgttctacacgcaatccgatctgttcgggagggaacgcaacggttcgttccaaggaatcgtcgcaggactctaccagacgttcggaggcgaagaactgtaccgttccacccagaagaaagccgcgaacctgctgtatcaagttgtcaaggatcacccgttctccgacggcaataaacgttgtgccgccgcactgttcgtgtatttcctgaacggcaacagtatagcgacgatgactcccctgcttgtggagggtaacgccttggcggcgatgacgctgatgattgcgctgtccgcacctgcggggaaggacacgatgatcgccttggtcgagaacttccttatacggcatgaatcgcaggagatcaattgagagaccgtcaatgaagggtgcacatcaatcacgttctagcattgcgcgactatctgtacgagtcgtctgaacgatctgctgggagtgctcttcgcggaaaaccaacagcagaccggaggccgcatccactatgtgttgttcaacccttgggccgtacgcagcaatgaggcattgaacagtttcgattcgccactgatgaagctgctggcgcgtgccatttacgccattgtgggcgtcagcgtcgaggaggcgattgcccccatcacccacttgatcgacaacccgccgcacaccgcgctgtcagcgttcatcaagaccaaacccgtcgatctcactatgaacaccttcgacaggggcaaggcggtccggttggacgatatcaccaaaagctgctgaatcgctagctgtcatagcacaaggccttagacagaacacccagaaatcgaacgggtagatggatcgcgtctccccttgacttccggcaagcacacgccaatcatggggcgtatgggtattgcaatcaaacgtatatatgaagagccgactgcgtcggatgggtatcgggtgctggtggatcgcctgtggcctcgcggcatgacgaaagagcgtgcggcgttggacctgtggctgaaggacgtcgctccctctcccctcctgcgcaaatggttcggccatgaccccgccaaattcgcggaattccgcatgcgttacatcgccgagctcgacgccaatgccgccgtggacaatctgcgccacatctgcgcggagcatcccgacgtgaccctgctctatgccgccaaggacccgcacatcaatcacgccctcgtactgcgcgattatcttaactgaatattgactcaggacgaccgtcgtttcagtccatctgctagattctcgccgattttcgtatctttgaatcgaagtgcacagtcgtcactccttggattgccaagtaaagggatgcctccaaaccaaatcaatccgtcatcgattatggcaaaatcggaacacgattcgacggtccggacaatgcacccaatagcacgcagccgattaatattccgttctattcgtgttctggttgccaccgcagcagtcgccggcaaacggacataaacttcgatgagcgctttcctgtcggccagtcggagcaattcatcgtcaattgcgctgagtccctgttgtgatacatattcagccgagataatcagggaacgtgcgcaaccggcaatacccttgcggagtatctctgcataattcgtggctgtaacgatgctgccttcgaataatccgtcagaccgggtgtcgagcaacgcatccgcagcatcttcgccctgcgtcgcggccgtcatgcaagcgcgcaacgcttccgcctttgcactgagcatgtccattttctcagtatggtcaggatttaccgaatatccttgatttgcgtatgccttcagccgttttcgatacatgacagcggataaaggcacggtcacgtcgatgtaatcatagacacgaacctcggtcttgccatcattctcgcgatgaagtcgccctacatattgcgagagagtaccctcaaacgagaccggagcggcaagcagaagcgtgtcgaaacgcttctgatcgaatccttctccgatatagctacccgtagccactacagtcaggctctcattattcggcaccaaggatagatcatgcatttttttggttattcgctgtttgcggtggggcgggcatgggttagtgtttcgggttcgatttcctgtcagaaaaaataatcgagtgcgggattacggccggtaaggctcctgctgtggatgcggatgcgcgtcagccttacggtgatgctttcccaaaacgcggattatacgaggtgtgggacggcacgcggattcggccgttttccgcccgccgtcccacagcgctcgctatgaacggttgtgcataatcatggagctgcagcgagaatcggcgttattccgcggtttctacagtcgtcggtgtgggacgctacggacgttaaacggttgacttgtctgccatcccgcgctcttgagggacggcgcggacgacaaacgattgactcgtctgccgtcccacagatattgggatgtgtgcggctgcctgctgtctatagcgggtgtcggtcaccccccaccgatcgccccccccaccggtcaccaccctgcttggcggaaatacgcaactcgactttctgtaggcatcatggcggcatggcgacggcggacagtcgaagagatccccatgatgcctcaacagccatcgcccacacacatcacagctatcaaccgcaaatatcaagaggccgaaaatctatgagacaagcaaccccggaaagcctcagaccctacaaatggctttattgcaagggtatatgccggttcaaactccactaatagaacaaatagaacagccggcttaggtacggcgcggcaaatggcgcaaaccggccgcgatagtagtagcgtggtgcataccagtacaaccatgcgaggagaacagccatgatcaatgaggaatacaaggccatgcttggcggcaagtccgtgattcgcgggctgagcgagtacgccacgagccgcggtgctgaaatcggctaccagaacgtgttcgattacagccttggcaatccctcggtgccggctccgaaatccttcaccgacgccatggtcgacctctacgaaaacggcgatccggcggccatccacggctactccccctcgctcggcatcccgtccgtcaaggacgcgatcgccgaaaacctcaacgaacgtttcggcatggcatacaccggcaaccacatcttcccgaccacgggcgcggcgggcgcgctgtcccacgcgatgcgtgcggtgaccaagccgggcgacgagatcatcaccttcgccccctacttccccgaataccagccgtacgtcaagggcaccggtgccaagctgaccatcgtgccggccgacaccgagaacttccaaatcaacttcgacgcattcgaggctgcgcttaacccgaacgtgcaggtcgtgcttatcaacaccccgaacaacccgtccggcgcggtgtattcggcggacacgctcaagcgtctggccgcgatcctgaccgccaagcaggccgagtacggccacgacatcttcctgatcggcgacgaaccttaccgcgaaatcgtgttcgacggagccacccagccctacccggccagcttctatgcgaactcgctgacctgctactcgtggtcgaagtcgctgagcctgccgggcgaacgcatcggctacgtcgcggtgaaccccgcagccaccgacgccgacctgctcgtgccgatgatgggccaaatctcgcgcggcaccggccacaactgcccgccgagctcgatccagctgggcgtagccaaaatcatcgaccagaccgccgacctcaacgtctacgagacgaacatgaacctgctctacgatgcgctcaccggcatcggcttcgacgtggtgcgccccggcggcacgttctacatcttccccaaggcgttggaggacgacgccgtggcgttctgcatgaaggccaaggaatacgacctgatcctcgtgccgtccgacagcttcggcgtgcccggatacttccgcatggcctactgcatcgacaccgagaaagtcaagcgttcgatccccgtgctcgaaaagttcgcccacgaggtgtatggcctgtaaacacgggccgcaagtaacaaacacaagaaaggggttgccatggaatacaccgaagacgccgatcatcgcgaactgctgctgcacagcgcctatgactccgatacggtccgggccatggagcgacccctgctggacaaaggcgtgccgctgatgcgcatggccgcccaggccgcggcccacatggcggccggcatgctggacgacgaggatctggcgctggaggacacgtcgatcgtgctgctggccggggccggagacaatggtggcgatggtctgttcgcggccgccgcgctggcccaggagggcgcgaacgtcaccgccatcgccgtgggccggtcgctgcatgaggccggattcgccgcgctcgtgcgcgccggcggcaaggtgctggtgcttgacccggcagccgatattcccggttgcgcgtccgggttttccgccggtgaggccggcgagcgactgcagaccgccatcgccgtggccaggaaatcgcatctgatcatcgacgcgatgaccggcatcggcattcaaggctcgctacgcggcattcccgccgcgctcgcctccgcccttggtctcgacggcgagtctcccgatgagcccgccctgccgaaccgtgagtcgtcaggcgattttccgctggtacttgctgtggatacgccatccggcgtcggtgtgaacgatggttctctgcccggcccgtacattccggccacggtcacggtcacgttcggcgcgatgaagccgtgcgcggtgctgccgcccgccacgttcgcctgcggccgtatcgagttgttcgatttcggattcgatatcgacgacaaggatccggacgtcgaggtggtggataattcgttcgcgtccgacgcggtccgtctcccccggttcgaggattccaaatattcccggggcgtggttggtctggtgaccggctcgcagcgctaccccggtgccgccgtgctcaccaccagcgccgccgcccgcgcgaacaccggcatggtccggtatctgggcccggagcgcgcgcagaacatggtgctcaccgcactgccggaagccgtgatcggcaagggacatgtgcagtcctgggtcgtggggtccggcgtgcccgaggctagcgtcgagggctccgacggcgatatgcagcgggacaccatcgccgcattgctcaagcattacgcgctcggcagcgaggatgagaacaaggacgcctacgacatgccgccaatcgtggtggatgccggcgcactcgacctgctgccggagcgtgtgcccggccaggtggtgatcacgccacatgccggcgagatggcgaaactgctcaaccggttcgaaaccaccgccagcaccgcggagcatgccgattcgcacgagccgtacaccgccgacgacgtgcggctgaacccgttggccagcgcgaagcgcgcccacgagctcaccggtgccaccgtattgctgaagggcgcggtgaccatcgtggtggatgaggaccatgtctatgcgtcgggcagtgcgccggcctggctgggcaccgccggcgcgggcgacgtactggccggtctgaccggcgccctactcgcccagcaggatgacgtggccaccacgggcgagaccgtggcctcggccgcctacctgcatggcctggcggcggcgatcgcctccgaatccgagcagcagggctggcaggagccggaactgatcggccgcgagcatcgccagcgcttcatgacgctcggccacccaatcgtggccggcgacgtgatccacgccatccccgaagccatcgccgacgtcatcgcataaccttgttgacctccctctgacgagggaggtgtctcggcaaagccgagacggagggagagaaacataagcctcaaactccacataccccgacctatacacaaaccccgtacactaaatcgcagaccccacccaacgacccaaacacacaaggaaccatcatggccaactcccccatcaccgacgtgattttcgacttctgcggcgtgctgctggactggaacacccgcgcatgccttgaaggccgattccccgatgaaatcgtggaacgcatctgcgccgacgacgacccctgcggcttcttccactacgaggaccgcatggacgccggcgaggatttcgcggacatctacccggatgtggtacgcgaacaaggccaggaactcgccgacatcttcaagttctacatcggccactacgcggacgcgctgccccgcacgctgccgggcatggtcgaactgctggcggatttgaaggcccacggctacggcgtatggggtctgaccaactggtcgcatgagaccttccacctggccttcgagaagtacccgcgcctcgaacagctgctgcagggcaccgtggtctccggcgtggagaagatgcacaagccgaacgccgacatctacgagctggtcctgacccgcttcggtctcacggccgagcgctgcgtgttcttcgacgacaccgccaagaacatcgtcggcgccaacgaggtcggcatccacggcatcctcttcgagaacgcgtcgcaggcgcgcgaatcgctcgccgaactcggcgtacgcctgtaagtcgccaaatattgcgtcgcggcagttgaagtctatggacccgtccttgacgacggtgaccggccgtttggcgaccggcatgtcgcactgttcggtgagcacttcaacgacgcggcacgcggcaccatgcgcagaatcatcatgaaggcgttctggatgttcatcacgtcggcgccgagcctggtcatcaggctcggcgtggagaagcggtcgatgctggagaaggagaaggtctggatggcatcgtactggtcctgcctcaggttaccaatgtggcgcatatcccgttacacagcgtccgcgatatgcgaggcgtctcatattgtgtcgccatagtggattgatgaggttataaacccgtgtggcgaccatccctagcgatataaatagactttatgacactgctgcagctgaaatacatcgtcaagatcgtcgagtgcggctcgatgaacgaggcctcccatgccctgtacgtctcccagccggccctgagctcgtcggtcaaggaactggagaacgagctgggcatcgagatcttcacccgctcctcgcagggcatcgccctgaccgtggatggcgcggaattcctgacctacgcccgccaggtgctcgatcaggccgacctgctcgaagagcgttacaagcatgccaagccgcgcaagcagctgtgccaggtctccacccagcactacatgttcgccgtcgaggcgttcgtggagatgatcaactccatcaagtccgacgaatacgagttcaccatccgcgagacccgtacgcgcgacatcatcaaccaggtcgccaacatgcagtccgaaatcggcatcatctacctgtccgatttcaacaaggacgtgattggcaagctcctgcgcgagaagcacctcgaattccatccgctcttccgcgcgccgctgcacgtgttcatctcgcgcaacaacccgctggccgccaaaaaggtcatcaccatggaggacctgaagccctatccgttcatccagtacgagcagggcgaggaaggctcgttctacttctacgaggaagcggtctggccggagtactcccccaagcagatcaacgtgaccgaccgcgccacgatcctgaacttcatcatcggcctcaacggctacacggtgtgcaccggcatcgacaacggcgacctcaacaatgagaagattgtcaccgtaccgctcgacaccgacgaaacgatgctggtcggctggatcacgaacgagcgttccaagctctccaaggccgccgaaacctatctcgacaaactcaagtccgtagtcgccgaccacggctacaagctcatcgattaggagtaagtaaaacaggcatggtcagcagtgagatatactgcgattaagccaaccccgctggggaaatggaagtaagagccggacgccctgagtatctcaggggccggctcttgcgctattgagactgactggcaaaaccagtttgatggcctccgactacttggccgagattaccgacgtggcggctgtcgcggcgaagcctttgagcacttcgatcatcacgtcgcgatcttcgacatcaatgttgcgggccgcggcgagcataatcggcagtgactgtgtcaaatgcgaagtgaggtcgccgaatgtggcgtatccgccggcctcgaagatcgcgaacaggttttcgatgaacttgcggcgatgctcgtcgtcgtattttgccatccatccgttgatcgtgcgtgccaggtatcgcgcgctacttgtcagtccatcagcctgtacgaattggccatgatcgacttgccagtgcaatccgaaatgctgcatgatgctggctccatcgctgctgaccaccgtatagccgtcttccacatgctcacgagtctcaaacagcatgccgatgatcgacgatcccggtaccgatttatggattttcggc

SEQ ID NO: 414 - DNA, 3671 bp, Unknown
  R48_24m  MAG No. k141_8695
acaccacggtgacggtggtgccgccgtccgacggccggttccacggtggtacgaaggtgttctgcggtcttgcgggaacggtgatgcgctttgtgcccggccttgccatgtttgcggacggtcctgtggatttcgacggtgacgagcaagcgtacgcgcgtccgatgaagccggtgttggatggtcttgaacagttgggggcattgatcgaataccacggcgaggaagggcgcttgccatttacaatcactccacctcaaacggtgagccagcgcgtcgagccgagcgtggtcagtattgattcatcgggatcctcacagttcatttcaggactattgctcatcggctctcgagtgccaggcggtttggaactgcatcacacgggggagaagacgccgagtttgccacatattcgcatgaccgtggccgacctgcaaggttctggcgtgcgtgccaacgcagacaaacccgtccgcgtgtggaccgtgcagccgggagccgtgcagttacccgaaaccgtgacggtcgagcctgacctgtcgaatgccgccccgttcctcggcgccgcactgatcgccggcggaaccgttcgcgtgcctcattggccggaatccaccacccagccgggcggcctgcttcccggatacttggaacgtatgggtgctgaaatcagcttccccgtgatcggcggcgtccggtactgcgaagtgaccggcagcggccatatcaacggcttgggtgatttcgacctgaccgcggcaggcgagatcgcgccatcgctggccgcaatcctgatgttcgctgacaagcctacgagcatgctgggcatcggccacttgcgcggccacgagacgaaccgtctggaagcgttggtcaacgaaatcaccagagtcgggggagaagcccgtgagctggccgacggtttggagattgtgccagtgccggcagcgaatctcagacccgccaaaatggaaacctacgcggaccatcgcatggcgacgttcgccgcaatgcttggtctgagcatcaacggtatccaagtcaagaacatcgcgaccaccgcgaaaacgcttcccgatttcgcgaatatgtggaccaacatgcttgcctagcaaggattgtcaaagataatccgcaaataatccacgatactgaaaacggtacggaaatgtccttcatccgcaaaaacagaagaaggacatttctacgtttgcacagaatacgtatttgtattgcatttcgagcgatgggagcgcagatgcctgacagctacaagaagctcatcaagagcaaccccgacgagaccgagatcaggagtttcctagtggacggcgaccaggtatccgtgaccctgcgcattcctgataccttgcgcgacgcggcgaaggaggaggccctgcggggcatgagtttctccgctttcgtgcgcacctgcatgatcgaagagctcgcgaagaagggggcgcgagcatgatccgggtcaagactctcaccgtccagcttatagatgagcagccggaccgcatccgcatctgccgcatcaccggcgagtcgctcgtgaccgtcatcgttccgagggaggacctcgccgaggcgaagtcgctgccgaacatccctcagcgcggcgtctactacctgctcgacgaggaccacggcaacgtgagccgcgtctacgcggggcagacgacccagggcatcgcccggctcgacgcgcacaagacaaagaaggaattttggaacaaggccgtcatgttcctcgacgacgaccagaacatcagcagggacgaactggatgtcctcgaggcgaaggccatcgactacgtgcgcacccacggctcgtacgagaccgacaactcggcgacgcccaagccctacgtcgacccatataaagaagagtccgtcgagcgcttgcacaagaggatcctcttcaggatggcggctctggggtacgacctcaacagggtcgaccaaggccccgcaggtgcgccggcggtcttccacacgaagaagaacggcatacgcggtgcggggcgctatgacaaggccaccgggcacttcaccgtgctcgccggctcgaaagtgaacctctcgaggcccgtgctgaagaacgtgggcgtcgcggtcgcgcgcagggagatattcggcgattcgtgcggcaccgcagagctcgccgaggacatcgagttcccaacgcccagcgccgcggcggtgttcgtgctcggcggcagccagaacggctggaccgaatgggtaagcgacgacggagaaacgctcaaccaagtctatagaagcgaaggaaactaaatcaacaagcagtggctggcctccaagatataggattccgccaacaagatgcgctccaagattgaggttaacgagtacgagggttacattctgggattcattttctacaaattcttgtccaggacggaagtcgaccgcatcgatgtcgctttcgacgtccgtcccagccgtgcggatgagaagtggctgaacgcatggtgctctcatagctgattgaagaactttgtcaggaaatgattgctttttcggggagcccatcgaagtcaagcatcgaaaaacaaaataagttcagagccaaatgcaagtctttataatagatgcgaccgagatttgaggatggtggttgcacaatcatacttccgatggggcagcccatcggaaccgacgaagatcacggtatcgtttttgatgtccttcagcttgagttcgccgtgcgctctttacctgctgagttttttactccctgttacatgtgaacacgtttccggcatatctgggtagtaaatgccgcggcatttcccctgataactcccatttttatcaagacggcaggattttttactccccaaaccacttgggaaaacgccatgcggaggccatcgaaaagcccattgagttcgatttgagtttcacgggccttgaaacggccctgtctcgccctcagggacaaaaaccgcgcgtccactcacttgggataaatccttactcccattcctccgaatagaaccccgtaccttgttgtcttgaaacacggggagtaaatagcgaaatcgcaggtgaaagggaataaaatgacaaaagcctctatcccaacgcggggacggaggctcgattatcgtttttactcaccgatgccgctgacggctttgccgtgagtcgcatacgaaacgaaactcagcagtacaccacggcactcaaaagtgcaggtcaaagccttgtcggcttattcccactcgatggttgccggcggcttggaggtgcagtcgagtactacacggttgatctgccggcattcgttggtgatacgcgtcgaaatcgtggcaagcacatcgtacggaatgcgggaccagtctgcggtcatggcatcttcggaggaaaccggacgcaacacgatcggcgaaccatatgtgcgctcgtcgccctgcacgcctacggaatgcacatcggcaaggagcacgaccgggcactgccagatatcgcggtcaagaccagccttagaaagctcctcgcgagcgatggcgtcggcctcgcgaagcagatccagacgttccttggtgatctcgccgatgatgcggatgccgaggcccgggccagggaacggctgacgccagacgatttcgtccggcaagccaagctcggtaccgatg

SEQ ID NO: 415 - DNA, 38129 bp, Unknown
  R48_24m  MAG No. k141_9924
atggacgcgatcaagccggacgcggacaacgtgaccccacgccgcgaacccatcgaccccaatggcccggccgcctattggacccgcctgccgttgcgctcgatcctgaatgatttcacggacgattcgattccggccaccctgagctcggacgcaggcacgttcgtatgtaattcgctgttctacaacttgctgaactggaccgccacccaggagcgggtgctgggcggattcgtcagcttcccgccggtcgtgccggcggattccagccagcatggtctgccactcgaccagcagatcgccgctggccgtgatgtggtgcgcgaagccgtgcgctactatctcaagccctccagctccggcatcctcatcgcctagcacgctgcgcgccacgccggaatagaacatggttcgcacgcattgtaacgattgcgcgtcactcaacgcccagcgctagtgcgatgcgctacagtgcttcaaggatgtgccaagagctttatgcgtgtgcgaaaggaataaacagcgatggtggatcgtttcccggtggtgctgcgaggatatgacaaggagaaggttgatgctgccttcgacgctactcaggagagtgtgaagcgtgcgcagcagacgttggccagcatgcgtgagcagattgcggcggatgacgaccgtattctgcaactgcaggcccagcttcaggaagagaagaacaagaagccggaaggcaacagcttcgcttccctgggggcgaacgcccagcagatgctcgcctccgccgagcagacgagtaccgaactgttggaacgcgccaagcaggacgcatcctccatccgtaccacggctcaggctcaggccgaaacgctgatcaacaacgccaagctggatgcccagcatattgttgacgacgccaatgccaaggccgcctcgattctgacgaacgccaacaatcaggccgaatcagtgaccacctccgccaacgaggacgccgcacaactgcgctccgaaaccgccaagaccatcaccgaacagcgtcagaccgtcgagcttgagctcagcaacgcgcgcgaagagcacaccaagaagatggcttccgaacgctccacccaagagcgcgaaatcgccgatatgaaggcggaagctacccagcaggtcgccgcaatgcgcaaaagcgccaatgaggagatcaccaagcttaagtccgattccaacgatcagattgaggcggcgctcgccgaggccaacaagaagctcgccgacgtgcgcgagcaagtgtccaagatgatgaccgaagcccagcgcaaggccagcgaaatcattgatgcggccaaaaccaagggtcaggaaatcactgatgaggccgaggtcaagcgcaccagcacgatgagccaggtcaacgccgaagtcgagcagatccgtcacgacatcgccgctcagcaggatgaggccacgaagaaggtcaacgaactgctgcagcacctcgaagagcgtcgtgtggcggccaagcgggaagccgatgagttggtcggccaggccaagaacactcgcgaccaagccgattcatatgccgcgtccaagcgcgaggaggcggacatccaggccgccgcaatcgtgcataaggcgggcgaggaagccgatgcgcagatcgaggagcgtcgtgccgccgcccaaagcgagcttgacggtctgtccaagcgcatcgccgatctgcaggaacgcgagtccgtcatcacccagcgtgtttcggaactgcgttctatgttctcgcaggcgttctccggattcgctttcggtggtaatgcggcggcctctggtcagagtcaggaagccgctgccgtggcgtcattgccggtggtcgcgcccgtcccggaagtcaagcctgtacacaacgaggccgatgatcagccgggtgagttgagcggaaacgagtcggctgccgacgatcacaatgagacagatgcggcaccggctgattcggctgattcagctacgcagaatgagcagtccgaatcgtctgagccgtccgagcaccagacacagggcgaaccggaggccccgactcaggagaatccagccgtatctgagcagaacggcgaatgacaggccttcgattagactactagcggtaagaattacggcacctgcgctttcgagccaggtgccgtattcgtttggatctgcgccacaagcgcaccatcacagaaggagtatgacatgagtgaattgacgcctctgaccggcgaagcattgaataccctgcgcggcgatttcgcacagagcggcaccaaccgtctggccatgaacgcggtgaccgccgccggcatcgacaaggtggctcgcaattatgaccgcgctcgtctgatgcagcgccgtttctccaccatcgttgacaatggcgaagccacccatcaggatcgctccggccgctgctggctgttcagctccctgaacgtggcccgtttcgtggccaagaagaacatgaacttgaaggagttcgagttctcccagaactacgcgatgtactacgacaagctggagcgcgtcaactacttccttaaggatgtggccgctctggtggctgccggagagccttccgactcccgcctgatgcagcacctgctcgccgacgtgatgggcgatggcggccagtggaccatggccatgaacgtgtacaagaagtacggcgctgtgcccaaggacctgttcccggagaccgaatcctccaagaacaccggtgaaatgaacacccagctgcgccacatgctgcacaccgccgtggcgcacatgtacgccgctgacggcgatgcctccaaggtcgaggcgattattgccgacgccactgctgccggccaccgtattctgaccatccacctgggcgagccgccggtctccttcgactgggaatggaccgacaaggatggcgaattccaccgcgacggcgagattacgccggttgagttctggaagaagtacgtgggtccggctggtcttgaggactacgtgtgcctggtggatgatccgcgcaccgagcacgccaagggcaagaagatcggcatcgagcacctcggcaatgtggctggcggcgacgccaccgagtacctcaacgtgccaaaccagttcatgaaggactgtgtcaagcagattctcgttgagcagggcatcccggtatggttcggtgccgactgccacccgttcatggaccgtgagaacggcgcttgggccaccgacctgttcgagtacggccgcgtgtacgacgtggacttcgatttggacaaggaagcccgcgtgcgcttcggtgactccgccatgaaccacgccatggctttcgccggcgttgacgtggccgacgacggcaccacccgccgctggcgagtggagaactcttggggcaccaagatcgccgacaagggctacttcaccatgtccgacgactggttcaccgaatacgtctacgaggtagccgtcccgaaggccctgttgccggaggaataccagaaggctctcgaagagccagccaccatgctccccgcatgggacccgatgggcgccttggcctgacttcgccagcctcccggaatcggcctgacggccgatgctgtgttttttcgcagcctgccggctgctagggtctctccctctgtcagcgcgaagccgctgacgggggggggggaggccgcggtcgcaggccgcacaacaacacagcatcgccgcaggcgagtccacgcaggcgagtccacgcaggcgagttcacccaaagtccataaccgccggcccaacaagcagtccccgtaacagactgctatagttgggcttttgcgtctatagcgccataccgacggtacgtatacaaggaaaggagtcgagcaatggcagcactacgtggtccggatagttccgaggatgaacgtcgtttgggggagcaggccgtctttcccgagaccgtcgatgtcaacattcgtcagcttgaccccattcccgcgccgcgtgccttcctcagggagcagccgctcaccgatgagatgagcgagctcgtgctccactcgcggcaggaaatccgcgacgtgctcaacggccgtgacgatcgattgctcgtcatcgtggggccctgctcaatccacgacccgaaggccgcgcacgagtacgcagaaaagctggctgccgtcaagcgcgagctggaagaccgactcgtgatcgtgatgcgcgtgtacttcgagaagccacgcaccaccatcggctggaaaggcctcatcaacgaccccgatctggacggtcgcttcaatattcgtaagggcatgtggctggcccgcaaggtgctcaccgacgtgctgagcctcggcctgcccgccgccaccgaatggcttgaccccatcaccccgcagtacatctgcgacgcgatcagctggggtgccatcggcgcgcgtaacaccgaatcccaagtccaccgcgaactggccagtggcctgtccatgccggtgggcttcaagaactccaccgacggctccatcaaggccgccgccgattcctgcttcgcggccggcttcgagcatcacttcctgtccattaacttggacggtcgcgtgatttccgccgaaaccaaaggcaacccggattgccatctggttctgcgcggttccagccacggcccgaactacgatgccgaatccgtgcgtcaagctctggaagacctcaaggtttccaaagcgtccggcccgagccagcatggcctcgtcatcgatgccgcccacggcaactgcggcaaagacgaaaaccgcgaagccgaagtcatcgaagagatcgctgagcgtctggcgcacggcgaacaaggcatcaccggcgtaatgatggaaagcttcttggtcggcggtcaccaaaagccggccccgctcgaccagttggtctacggtcagtccgtcaccgactcttgcgtgccgtgggaacgcaccaacgagctgctgcacaccctagccgacgccgtcaccgctcgccgcgcggctaaatagctttgtctttgtaaaaatgctcactgagacccactcagtgagcattttttgccaataacggtggtcatgtcagtttgttcccgtgacaccttatccttgggaaagatactgatccaaggagagatgttatgcagcagcaggaggaagcagcacattcgctgcatccgttgcaagtcggtccgcagccgttgaacaccccggaagagcttcgcgccattcgtcaggcgatgggggaggggaagaacccgctcgttgccactgatgtgccgcgctgggaagatcaggtgggtgtcagtcgcatcatcaaccgccgcgtattggagctggagccgctgcccacgcccgcgcaagtgctcgctgaactcccgctgaccgatcaggctcaggaaatcgtcgcctactcgcgtgatgagattcgcgcgtgcctgtacggccaagacgacaggttgttggtcatcgtcggcccctgttcggttcatgacccgaaggccgcgctggactacgcgcaccgattggccaagctgaaggacgagctcggtgagcagctgctcatcgtcatgcgcgtgtacttcgagaagccgcgcaccaccatcggctggaagggcctgatcaacgacccggatattgatggcagccacaatattcgcaaaggcctgttgcttgctcgcaaaaccttgcttggtgtgctgaaggaaggattggcggccgccacggaatttctggagcccaccagcccgcagttcatctcggacgcggtgagttggggcgccattggtgcgcgcaacacggaaagccagatccaccgccaattggccagcgggctttccatgccggtcggcttcaagaacgccactgacggctcggtgaaggcagcggtcaacggttgcttcgccgctgctcagcagcacacgttcttcggcattgaccatctggggcgtgcctgcgcagtcgagacccttggcaacccggactgccatgtggtgttgcgcggctcgattcacggcccgaactacgatgccgagtccgtggccaaagccatggaagacgtacgcgccgaaatgcccgccgaatccgcagcctcgcacggtctgattgttgattgctcgcacggtaactccggcaaggacgagcatcgtcaggccgaagtcgtgcgcaatattgccagcagaattgcagctggcgaacagggtattaccggcatcatgatggaaagctttattgaaggaggcaatcagaaggccgcgccgcttgatcagctggtctatggcaagtcgattaccgacaagtgcatcagctgggaagaaaccgaggccttgctgcgcgagcttgcggaagccgtggccacgcggcgttggcactgagttgcgtcatcggctctctcggggggagcaatgtgacgaaacgtctgactacccctcagcccgccattcggcggccagctcccctgacaaggggaaccgaaagtgttgtgaaaggaacttacgtatgggtatgaaaactgtagctattattggcgcattggatgaagaagtggcactgatcgccaaatcgctcacgcatgtgacgcacaccgccaagggcagccttgacatcgtgtccggcacggtcgactccttcggttctgacgtcatcaaggttgccgcaacggtaggcggcatgggactggtcaatgcggccgccaccacgcagctgctgattgacgagttcgccccggacgccgtgattttcagcggcatcgccggcaacctcaacacccacctgcacatcaacgacgtggtgctcggcggcaccctgcgctacctcgacactgacatgcggctcgtaggccagtggaagcccggcactgcggacgctccggtggaggaattccactctgatgaccatctgctggaagttgccgacgaggcgcttgccaatgcgggcattacccacatcaccggcatcatcgcctctggcaactacttcgtggacacgccccaaaaggtcgaggaggtcatccgactcaccggggctgacgccgtggagatggaaggcgccgccgtggcacaggtcgccgcccgcaatgacgtgccggcactggtgattcgtgccctttccgacaacgccgacaccgattacgaggtattcaaggagttcgacatctccgagtacgccgataccgccgcccgtctggctgtcgacatcgtcaagcgcctgtagtcggcgggctggcccatctcaccatccacgttttgggtatgatgaccacaatatgagcgttttcaaactattgcttataacctgagccatactcggtgttcggcacagcgatgtgcggggttcatcgctggggccacaagccgtaccagttcttctcccgcatgccggtcgctgtgctcaattcgttaagcgacgacaacaccgtcgcgaagcattgaatacacaatgcgcacgctgcactggggtttatctgcagcatgaggagagaaaaaatgactgcaagcgcaaccgcggctgtgaccaaaccggtgaagaaggattcggttcctgagatcatcgccgcttccatggtcggtacggccatcgaattctacgataactactgctattccattgccgctgctagctacttcggcatgatcttcttcacggacgtcgccaagtccaaccagaccctcgccacgctgatggccttcgtgaccttcgccgtttcgttcctcgcccgtccgttcggctccatgctgttcggccacttcggtgacaagctcggccgtaagaagacgctggttatcgccctgatgaccatgggtatcgccaccttcctggtcggctgcctgcccggttatgagcagattggcgcatggtccgtcgtgattctgtgcatctgccgtgcctgccagggcgtgggcctcgccggcgaatggtccggtgccgcgctggtcgccactgaaaacgctccggccgacaagcgcgccctgtacggttccttcccgaaccttggcgccccgattggcttcttctgcgcttacggcctgaacctgctactcgaatccaacctgagcaaggaacagatgattgccttcggctggcgtatcccgttcctgtgctccgccgtgctggtgatcattggcctgtacgtgcgtgcccgcatgtctgagaccccagtgttccagaaggccactgaagagaagcgcacctccaagcacccgctgcgcgacctgctgccgtactggaaggaagtcgtgctcggcaccgtagccatgggtatcacctataccctgttctacgtactcggcacttggtcgctggcctacggcgtcaagggcttgggcttccagcagggcgagtacctgctcatgcagatgtgctccgtggtgttcttcgccatcttcatcgtggtctcctgcgtgtacgccgacaaggtgggccgcaagaaggtcatgattgccgtgaccgccgccgccttggtgttcagcttcttcgtgccgatgctgctcgtgcactccgccgcccatatcatgatcttcctgtgcgtcggcttcatgatcatgggtggtttgttcggcccctgcggcgcctacctgcctgagctgttcccggtgcacgtgcgttactccggcgccggcctgagctacaacctcgccgccatcttcggtggcgcattcgctccgaccatcgcccaggccctggtcgcctccaagttcggcgttgccggtgtgggctggtacatggccatcatggccgccctcgctctgctcgctctgttcctgattaaggaaagcaaggacaaggactacgagctgtaaatagagctccccatattatgctcccgctggcgggagctgtccacgaaagcggactgagggtggccaatgggatttcggttctttgaccaccctcagtctcactgcgttcgacagctcccgccagcgggagcatattgttatgtcgtcccaccaaaaatgaacaatagacgaacttacgtagtttgggcatctcactacgccttgcacgttttactctggaaatcatggatatctggcagatcgtcgtgattgtggtgctcgccgcgctgatactggcgtgggttgccgtcatcgcctacaacaaaggccgcgtttcaggtcggctcgccgccgaacaggacctgtccggcgacgaggatacgcgttctctattcggtgatgatgcgcccgtgcgccccaccgagcgtcgcctgattgaagtcctgcccgaagccctgattgttaccgaccgcaacggcttggtccaatattcaagccccggctcagtgccattcggcctggtctccggcgaccgactcaactcgcgcgaagtcgaggacatcctcactcaggccgccgccgacggtggcgtgcgtgagcgtgaggttcagctgccggtcaatcgcaattcctatccgtcctctaatggacgaggactggaggccggccagtcacgcccgtccaacatgctgtatttgcgtgtgcgcattggcgatatcggcgatgacctgtacgccatcttcatcaacgacatgtccgagcagcgccgtttcgaggccgttcgccgtgactttgtgaccaacgtttcgcacgaactcaagactccggccggtgccatctcgctactggccgaaaccgtgaccgacgccgccgatgatccggacgccgtacggtatttttccggccgtatctccaaggaatccgcgcgcctgaccgaactggtacatcatcttatcgacttgcagaaagcccaaagcccgcaaagtgtgattgatgcgcggcgcatttccgcgctggatgtggcacgcgctgccatcgccgccaatcagacccaagccgactcccgccatgtggatattcgactgagtgtcaacggacagtcagtgcccacgaaggtcgaggagctggccgatggcgaaggttccttggaagaatcaggcagcccggccacgagcggtccgatgatcaaggccgacaaagaggccatgcaaaccgccgtcaagaacctcgtagagaacgccatccattactcgcccgaacacaccactgtggcggtcggcgtgggggagcgcgatggcaaagtcaccattcgcgtggtcgatcagggcatcggcatccccgccaaatcactggaccgcattttcgagcggttctaccgggtcgacccggcccgttcgcgcgagaccggcggttcgggactcggcttggccatcaccaagcactgcgtgcaggagaacggcggtcggatttcggtctggtcgcgtacgggggaggggtcgacgttcaccatcgagctgccggccgccccggatgaggatgacgacgaggcccggccggacgagtcgacacaagcgtagggccttggttggtgcccgatatggtgccattccattgccgcacaatcacacagtgggcgaggtgcgcacaccgtgcgtagcacaattacgcaattacgtactttcaggaaacagcaggctaacggagaacaaatggttacgatagtatcggaaaactttgcgcctatgcgcacgggaacatacccaagaaaggctactatggcacgcattcttatcgtcgaagacgaggaatcctatcgcgagccgctggtataccagctcacacgcgaggggtacgacgtgtccgccgccgccactggcgaggaaggtctggaactgttcaccaagggcggcatcgatttggtgctgcttgatttgatgctgccgggcattgacggcactgcactgtgccgtcgcattcgtgagcagagccgtgtgccgattattatgctcaccgccaagagcgccgaaatcgataaggtcgttggccttgagattggtgcggacgattatgtgaccaagccgtactctttccgtgagctgctggcccgcatccgtgccgtgatgcgtcgcaatcaggccacggcccaggcttccggcactgtggatgacgatattccgctggtgtgcggcgatatcgccatgcaggtaggccagcatcaggtcaccgtacgcggcgaaaccgtgttcttcccgctcaaggaattcgaactgctcgaatacctgatgcagaacaagggccgtgtgatgacgcgtcaccagctgatcgaccgcatctggggttcggattatgtgggcgacaccaagacgctcgacgtgcatgtcaagcgcgtgcgctccaagatcgaggaagatccggcgcaccccaagtatctgactaccgtgcgcggtctcggatacaagatcgatactcccgcggagtaaatggaaggcggccttcgggccgccttttttgttgtggattgtgggctcgccgcaggcgagtccactccaaaaactacgtagcctcaacgtagcccacaaacatccaagtgttcatcttctgtttactgatttcggttttgggcccttgaaaccaccaatacgcttgtagttgtcatgaattgaccgggcagcgctgagccgcccgcgaatagttgatagagggattaagtaataatcatgcagaagaacatcctcattcgctccattgccgctctgtccggcattgtgatgctcgcttccgtggccgcctgcggcgataacaccgccaccacgaccgacaacagctcctcctccgattccacttccaagtccaccccggtctccggcaacttctcgggcgccggcgcctcctctcagcaggccgccgttgaagcctggatcgccggcttccagggcaccaaccctgaagccaagatcgcctacaacccgtccggttccggcgctggcgtgcagaccttcctgaccggtgccaccgcttgggccggctccgataaggcccttgccgatgacgaagttgagcagtccaagtccgtgtgcactgaaggcaccgccttcgatgtcccggtctacatctccccgatcgccgtggtcttcaacctcaagggcgtttccgatgccggcaagcacatcaacatggacgctgccaccatcgccaagatcttcgacggcaagatcaccaagtggaacgatccggccatcgccgatcagaacaaggacctgaagttgcccgacaccgccatcaccgtcgtgcaccgctccgataagtccggcaccacccagaacttcgtctcctacttcaaggacgtcacccctgacaactggacctacgacctctccgagaactggccgaacgaggttggccagggcgccaagggcacttccggcgtgatctccaccgtcaagcaggccgacggcaccatcggctacgctgacttctcccaggtcggcgacctgggcaccgtggccgtcaaggtcggcgacaagtacaacgagatttccgccgaggccggctccaaggtcatcgaggactccaagcaggacgacaccgttaagggcgacaaccgcatcgtcatcaagatcaaccacgccaccgaggccgagggtgcctacccgatcgtcttggtctcctacgacatcgtctgcccggcctacaaggacaccaagcaggctgagttcgccaaggcttggctgacctacgtgacctccgacgagggccagaaggccgctcaggatgccgccggcaccgctccgctgccctcctccctgaagtctaagatcaccaagtccatcgaggccatcaagaccaagtgatgacgtcggcccgcaagggtcgtgtggactggacctgacaactgaacgatagactgtagtagtaagagcagtcgccgccaactttaagccgcagtcgtaaaccatacggctgcggcttaaagcgggtcaggacccgaacggtttggcaaagtcacagacgaaaaccgcaccacttgaatacttgataaccaccctatataaggagaatccgtgagttcgcaagacaaaacggctgtgcagccagttggaggcaagaccgccgacaaggtgtttcgcggtgtggcatacgcctgcggcatcctgatcctggttgtacttgccgctgtgttcctgttcctgtttttccgcgcctggccactcatcggtggcgatcaggccgccaacagcgacaccgtgtccagctttaccggcggcaaggccagcagcttctggggctacgtgctcccgctgttgttcggtactgtgctcgtgtctttgctggcactgctgattgccttcttcgtgtccatcggcattgcgctgttcatttcgcactatgcacctaagaagctcgccaccgcgctgagctatgtggtcgatctgctggctgccatcccgtccgttatctacggtttgtggggcggcctgattctggtgccggccatctacccgttctggaactgggttgccaaccacttgggcttcattccactgttcgagggcccggccgccaacccgtcgcgcaccgtcgccaccgtggctgtggtgctcgccgttatgattttgccgattatcacctccatgtcccgcgatatcttcatgcagaccccgcgcctgcacgaagaggccgcgctggcgctcggcgccaccaagtgggagatgattcgtctggccgtgctgcctttcggcaagtccggtattgtgtccgcctccatgctggctctcggccgcgcgcttggtgagacgatggccgtgttgatgatcctgtccccgggcctcaactactccatcaagctgctgcaggcctcgcagaaccagaccatcgccgcgaatattgccgcacagtaccctgaagccaacgatctgggcgtctccacgctgattggaaccggtctgattctgttcctgatcacgttcgtggtcaacttcatcgcccgtaagcttaccgagaaagcgactgcgtgatgactgctgctgagaacactgaaaagactccgatggacggcacgcccgaaatcgacttcgatcgtttccgcccgacccgttccgccatccagcgccgtaatatcatggaccgcttcatgtgggccctgatcgcggtggcgtttgtgatcgcctgcatcccgctgatctccctgctgtggaccactatcgtcaacggcatcaagcgcctgaacctgaacttcctgagctacaacatgaccggtgtggtcggtggtagccagaccccgtccggtggttacggcggtgtgctgcacgccatcatcggtactctcgaaatcaccgctggcgctatggttatctccattccgatcggtttgatgtgcgccgtgtacctggtcgaatactcgaaccgcggcaagctcgccaccacgatctccctgctcgtcgacgtgatgagcggcatcccgtccatcgtggccggcctgttcgccttctcgatgttcacgattctgctgggccccggtaccatcaacggtttcgaaggctccgtggctctctccctgctgatgctgcccaccgtggtcaagtccagcgaggaaatgctgaagatcgtgccgaacgatttgcgtgaggcttccttggctctgggcgttaccaagcagcgcacgattaccaagatcgtgctgcgcaccgctctgccgggcatcgtctccggtgccattctggccatcgcccgcgtgattggtgagaccgcaccgttgctgatgaccgccggctacatctccagcaccaacgtgaacctgttctccggccagatgaccaccctgccggtgttcgtctaccaggagtactcgaagctcagcgcgaactgcccgcccaacgccgacgccacctgcgtgaccacgattccgatggaacgtgcgtgggctgcggctctcgtgctgatcgtcatcgtgctgctgctgaacctcattggccgaatcgtggcgaaggtcttcgccgtcaagaccgagcgctaagccagtcgctaagcctaagccttaagaacacaaggaaatataaggaaacatcatgggacaacgtattgacgtcaaccacgagaacatctattacggcgactttctggccgtggaagatgtgaacatcaacatcgagccgaacaaggtcaccgccttcatcggcccgtccggctgcggcaagtccaccgtgctgcgcaccttggaccgtatgcacgagatcatccccggcgctcacgtcgagggcgaggtgctgctcgaaggcaagaacctgtacgacaaggacgtggatccggtggccgtgcgccgcgacgtcggcatggtcttccagcgcccgaacccgttcccgaccatgtccatccgtgagaacgtgctggccggtgtgcgcctgaacaaccaccacctggccaagtccgacgccgacgatctggtcgagtgggctctgcgcggtgccaacctctgggaagaggtcaaggaccgtcttgacaaccctggcatcggcttgtccggtggccagcagcagcgtctgtgcatcgcccgcgccgtggccgtccaccctcaggtgctgctcatggatgagccctgctccgccttggacccgatttcgaccttggctgtcgaggatctgatcaacgagctcaagagcgactacaccatcgtgatcgtgacccacaacatgcagcaggccgcccgtatcgccgactacaccgccttcttcaacctgaaggcagtgggccagcccggtcacctcgagtacttcgcggacaccatcacgatgttcaacaacccgcaaaacgaagaagccgagcgctacatctccggtcgcttcggctgatcgtttcctgcgcgcagcgtaatgatttgtgcgtaggagaaacggcaaagcccgccgcaaggcgggctttcgcatattcaacgcgagtattgccgagtattatcgttctcgcaacggagcgagctggaatactttgtcggactgggcggcgacttcccgcttcggtcgatcgacgggagaacggcgggtaaagcggtacaagacaagtccgcacgatgaatactctgtgatgaatcttctgtttacggtgcgagtgtggaagaatggtcacagcaaggtccagcaaaggagcataggtgagtactggtctgatcgtcggcattgtcgttgtcgttattatcgttgtcttgattggttggggcgtcagcgcctataacaacctggtgacgctgaagaaccgtgtgaagaacggttgggcgcaaatcgacgtgcagttgaagcagcgtgccgacctcatcccgaacctggtgaataccgtcaaggggtacgcatcccacgagtctgaagtcttcactcaggtgaccgccgcccgcgccggcgtagtggctgtggccagcaacccgagcacgaccactgctcagcgcgccgccgccgaaaatcagctgtcccgcgccctgttcaacctgcaagccacggctgaggcatatccgcagctgcaagccaaccagaacttcatggatctgcagaaccagctcaaggaactggagaacaagatcgcctacgcccgtcagttctacaacgacgtggtcctgaagctcaacaccgccatcgaaaccgtgccgacgaacatcatcgccggtctgttccactttgagcaggcgcaatacttcgaggccgatgacgcttcccgtcaggtgccacaggtccagttctgacccgcttcaggcccgtccggtaagccgccggccgggcccgtattgtcttaagagagggaagatatgcggatacgattcattcgcgccggaatcatcagcattgttgccacggtggtgttggcagttatcaccttggcgataatcgggacttccgcgttcggcgattcggccggcctcagctaccgcacgctggactatgacgtgaccgccaccgcgaacggtgatttgaaggtcacgcagcatatcgacgtcaagatgcgtgagcgtaccgacagtgacgacaacaccaagccgtggaagcagctgttccagcaatacacgctgaactccggcaccttgactgatatcagcgatatcagcgtgcgcaacgtcaccgacggcatcgactacgcacaacagagcgagcccaagctgcccagtgacgtctcttccgacaaggaatggaacagcgactacgccaaccattggtatgtcgccgatgtgagcgatggcagcgaccatccaaaggcatacacgcccggtaccgatggcctcaagcccagcgcctccgccaccgaagatgacacaaccgtggagatcggctggaatattccggtcaccaccgaggccgacagcatgaagttcgatgtaagcttcaccatgcacgatgtggccaccaaatggaaagacgtggcctccttccaatgggagccgttcggcaagaagaaccaagtgcctatcggcacggtcaccggcaccgtccatttccccaacggcatcaccggcaaaacctcatggacatggctgcacaccgagcgcacctcggaaaccaagcgcaacagcgacggcagctacacgttcacggcctacaacatccacaatggagactacctcgatgtggtcgcggcgttcgatgccgccaaagccaagggcatcgcccgcaagggaaccggcaatcatctcacggacctgaaacaggacgaatataagcaacagcagcgctggctcgacaagcaacgattcgctgccagagctcgtctcgtgttctggattgtcagcatcgtgctcggcatcgcgttgtgcgcgtggggtatctgggctgtgatctccagcaaccggcgtgcgcaatacagtggcagcgtcgaatactggcgcgaccagcccggcatcagtccggcttccgcagcccgtctgattcgcgtggtcgatccgtcgacgcgccaatccgatgaagaccgccagctgaccgccaccatgctgtcgctcgccgtcaagaaggccatcgccatttatccggggccgtcggacatgtatcgcggcatcgacatgagccaggccacgccggtgggcttgagccaaatgattgccgccgaccaaggcaagcagtatgcggcaggcatcaccagcaccatcgtgattctgccgctcgccattgatgaggcacccaacgcgcaacagttgggattgagcgaatcggaagatgcgctgctgaacctgctcatcgtcatttctcagcgcgtgggcagcccggtattcgacctgaaccagatgaaggcgacctgccagaactggcaagacggctatattgagctcggcaaattcaccggtgcatgcagcatggaataccagcggctgggtgccacgcgctctgtgggctggcaatggatcctacccggcgtattggccgccgtgctgggatttggttcgctgctggccaacagctttatcggatacccggtggctggtcttatcgggctgccgatattcctggtcggactgttctgctcgatggccggcgcgatgaccgtgctcactgatcaagggcaggatatcgccggccggactctgggccttaagcgttatatggaagacttctccaacttcaccgaccggggtaccgccgatttggccttgtgggattggtatatggtctacgccgccgcgtttggcatttccgatcgcgtgatgcgtgaactggccaaagcatatcctcaggtcaacgacccggcttggctggatgccaacgcctccaactcgttgttctactggaactaccgcccgtatggctggtacagccaccgtcataatggtccattcgaccacgatgctgccgggcagacggacctaggcgttggcggcccagctccggcttacggaggcacgtcgtttgccggcggattctccgacctcggctcgcagctgaactccggtctggcggacatcagctcgaccatcagcgcggcagcaccatccgccgattccggtggcgatttctccagcttcggttcgggcggcggctccggtttcggcggctcgttcggtggctcaggtggcggctcgttcggcgggcggtagcgcatgcctatgtcgaaacgcattgttcgtgccctgggcttaagccttgtcggtgcgctgattcttgccgcactctgtgccggtgccttgattctcggcacagatggtgccgacctgagctaccgcacgcttgattacgatgtgaccgccaccgccgacggcgatcttaaagcacggagcatatcgatatcaagttgcgcaaacgcaaggatgacgatggcaagaccaaaccgtggagatcggctggaatattcccaccaccgtaaaaccaacagcatcaagttcacggtgagcttcaccatgcatgacgtggccaccaagtggaaggacgtggcgaccttccaatgggagccattcggtgagaacaatcaggtgccgattggtacggtcaccggcacggtgcatttccccaaaggtgtgaccgcgagcaactcgtggacttggctgcacactgaacaaacctcggaaaccggccgaaccaaggatggcagcttcaccttcaccgtaaatgatgtgaaaagcggcgagtacctagacgtggtggccgctttcgacgcggccaaggcgggagatatggctcgtgtcgagaccgacgatcatctgcaggagttgaaggaagacgaagccgacgacgaacggttctggcgcaatctggaacgccaacgcgccacaaggcgcctgaacaactggatgaccaccatatcggccggcctgatattcgggattattggtgttgttgcagccttacgctcctccggacgttcacgttaccgtggctccatcgaatattggcgcgatcgccccgagctgagccccgcatcggcggccaaacccatcgatatcgtgacttccggcgacaaacccgacatttccgagcgccaactcgtcgcgaccttgctttctctggccgtgaagaaagtcattgctgtgttccccggttcggcggacctgtatatcggcgtggatctgaaacaagtttctccggtggagctcagtcagcgaatcgggtccgatccatacaagcgcaataatgcgcgtaccaatagcacgattgtgatgctgtggcagtacgattacggcgtatctgagggatttgatgaatcagtattcgtcgaatccgtatttgatggatctggatctggcggatctggatctgccgcatctagcgtgtccgatgcacaccagcccgatctcagtgcttctgagcgggcattgctctatctgctcaccgtgatttccgagcgcgtaggtcgtacggcatttgacatggatgacatcaaagacgcctgcaaggattggaaagatggctacaaggaactcgaaaagttcaccaatgcgtgcaagaccgaattcgcggcggcggatatcgcgccgaaaaccgagaacggatggctcattcccggggcaatcaccgtgctgatcggtggcgccagcatattcatcaacggtttggccggatatctggtggccggggccctcatcggcattcccctgatgacggtcggcatattctgcttcctgatggggaattcctacgtgctgaccgatcatggtcagcagatggccgggcaatgcttgggtctcaaacgatatatgcaaggcttctcgaacttcaagtaccgtggagtcgcggatttgacgctgtgggattggtatatggtctacgctgccgcatttggcatatccgaccgggtgatgcgggagctggccatggcctatccgcaagtatccgatccggaatggcttgatgccaatgcctccgacacggtgttctattggaattatcgtccgtacgactggtatgggttgcgtttctacaatggctcggcgttcgcggattccgtggctgacagcggattggccggagcggtgccagcgttcgggggcacgtcgttcgcggctgggttctctgacctcggcacgcaattgtcgtacggatttgcggatatcaccgcgacaatcaatgcggcctcgccatccggtggctcaggcggctttggcggtagcagcggcggttccggcggcggttcgttcggcgggcggtaagcgatgtgcttctgaaagtccctatagctttgaaagtaaaaggcccggtgtcataagacatcgggcctttctctcaaaatcgaggtgaggagacctcaacagtcaggtccaacggggcgaaagtctgtggcgccgccgagaagattgcctcgaagctagcgtgacctttctgctacaacacagcataccagcctccaccgaagctcaccagtacactggactgaccaaaccaaggtctactagcgtgccactttggcgcggtgtcgttgtgtcaaccggcataatgacgtctcaaaattcaagagaaggttctcatggtaggcaacaaccatgacaaccgtccgagacaagaccggcaataccgggaaggtctgatgaccggcctgttgatcgccctggccaatcaagttggacagtggcggtcgacggccatcatcattgccgcactggtattgctgggaatgagtctcagacgaggccactgatctatcagcggaacagccggaatccatggggttccggctcctcgttttcgctgaactgggtatgagtaagttgcgttttctattccgtgaagttgcggaaatttcatagattgattgtgcgggcaggccgagagtgtgaaatccaacgggatgcttaggcttgatcgtggatatcgagtttccataagtttcacgaagggaatcaccatggcattgttccgtaacctcggaccgttctccaccaccgccatcggccacggcgaaatgccgctgaccatcgaaaacaaccgcggccatgaggtcggcatcgaaaccctgcatgcctcgctggacgccggctgccgccacatcgacaccgcttgggcctactactgctccggcggcgaggagcagaccggtgaaaagctggtgcgcgaggcccttgagacctggaaggggccgaaggacgaggtgctggtggccaccaaggtgggccacttccgcaacttcaccgacggccgccccacgtgggatgtggacggtcgcccggagaacctgattcggcgcggcaaggagagcgcactggcgctcggcgtggacaccatcgacctgctgtacttccaccgcccggacccgaaggtgccgtacaacgagtccgtcgaagccatcaagcagctggtggacgcgggcgtggcgcaggaggccggtatctccaacgcctccatcgagcaaatcgacattgcgcgcggcattctgggcgacaagctcgtggccgtgcagaaccagtactcgccgattcacctggagacccaggacacgctcgactactgcgccaaggtcggtctggccttcgtgtgctggagcccgctcggcggctaccgtcacccctatgatgagaccaagttcgacccgttccgcgaggtcgcggcggcccacggcgtgagctaccagcaggtcgtgctggcatgggagctcgccaagggcgaccacatgttcgtgattcccggcgcccaccaccccgagaccatcctcgactccctcaaggccgaccagctcgaactcacccccgaagaactcgccaagctcggctgattgcccattccccatcctcccgaatttgtgccgctgacgttggcttaacgtcacaaattcgggaggattgattcgtcttgaaggaaccgccatgcgcaaaaaactcatcctcgacctcgataccggcatcgatgacgcgctcgccatcgcatatgccctaggcagtgccgacgagatcgatctgatcggtatcacggccacctacggcaatgtcgcggtgccgctggccgcgcgcaacgcgctggcggtggtgcacttgttcggccgtgacgacgttccggtctatcccggagtcgaccatcccatcgccccggcaacattgccgaaaatgcgtggcaccacaccagacgagcggacccaggcctacgcgcgctggcagaacggcggcgcggacggctggcaaacggacgcttcgtgggcaccaactcccggctcggtggcggtccaccatcccaacggcatcggcggcgcaatcatccccgactccccgcgcgctccggaagcaccaggctcggcggtcgatttcatcatcgccgccgcgcgcgaatacggcccggacctgaccatcgtacctacgggcgcgatgaccaccatggccaccgtattccgcaacgctccggacctgaaggattccggcgtgaacgtgacgttgatgggcggtgcgttgacgctgcccggcaatgtaagcccggccgccgaagcgaacatctcccaagacccagagtcagcagactatctgttcaagtgtggcgcacgcaccaccatgatcggcctcgacgtgacccaccagaccgcgctcacccgtgagaaagcccatgaatgggcgtctctggggacgccggccggcgacttcctcgtcaccatgaccgactactacatcgacttctacctgaagaaccagccggagatccgcggatgtggactgcacgacccgctggccgtggccgccgcgctcgacccatcgctggtcacgaccttcgggttcaacttgcaagtcgatctcgagggcccgttccgaggccgtaccattggtgaccgctcgcggctgcaagatttcgacaagcacactcaggttgcgctcggcgtcgacgtgtcggaattcctcgaccgctttatggctcgcgtcaccgccgcggctcgtgggtaaacgcttatgctttggcggtcgtgtcggttgctgaagcgtcggttagtagtgcggacaatgcggttctagcttccggggtgatccacatggtgtgtggataaccctgtggataactagcggtacgattcgtcgtcgtgtatatgcgggatggcatcggtcggtgtgcatatgtttatacacttcaatatgctggagggtgaatgttccatgcctgatctacggtgacgggcggcaagcgacgaggtgtatggatggttactgcaagggatgtggcaaagcgcgccggggtgtctcaggccacggtgtcatatgtgatgagcggtagcaggcccatttccgaagccaccaaaaaacgggtgcgcaaggccatggatgagttggggtatgttcccaatatcaatgcgcgatcgttggcgggtggcaaggtcggtgtcatcggtgtgctggtgcatatggatgagaataccgatttggccgagcttcgcccgttcctggtggtaatcatggaggaggcgagaaagcgggggtctagtgtgatgctcgttccggccgacgaggggattgagggactgtgccgtatggtgcgtcaaggcgtggtcgatggcgtcttggtgttcgacgtcgagtggcatgatgaacgcctgcctgagatagcgcgattggatattcccgttgtgctggtgggtacgccagaaaacgcacatggcctgccgtgcgttgatgtggattatcgtcgagtggcgcagatggccgtcaatcgtttggcggaacgaggggcgcagcggatggtccttgttggggactggggaagaagtctcgaccgttatgcgtttgctaagttcttcgccagcgaatctcgtgtggtggctcaagtgctgggcatggaatatgagatattcatcccgcgtgaaaaaggatggagaggcatctgggcgatgaaggatgaattgaagcgaatggctcaatgccatggcggtattgcagtgcgcacccctcatgcgttagattcgctgctgcagctttgtgtggaaatgcagattcagcctggacgtgatttttccctggtcgcggtgtatgtggatggtcatgacgaagagttgcgcgtgccggtggataatgtggatccagtgccgcagtccgtctccaaagccgccatggagctactgttcgatcggatcgatggacataaaactggtgaaagattgctggtttctccgcatatcaccatccgcagctaaggaatatgtccgattctcggcctcgtgcggttcttgacgtcgcgtagtttatgcgcatcaacacgccggtgttgcgtgcgtcaggttcaatgatatattcatttatgcgcatcaatattgaagcgtataactaattgaaaggacttaggtatgaggggtaatacaaagaagttcgccctaaagtcagccgtggcggtggccgctacggcagccatggtcgtgccgatggccgcatgcggttccggtaccgcaggtggcgggaaaaccaagatttcgttctattcctacttcaaggacaaccagattggtgaggtcgtcaaggggttcgagaagaagaaccccgacattaccctcgacgtgcagtatggccaggatccggcacagtacatctcgacactgcaaacccgtcttgctggtggcaagccgccgaccatcttcaatctgacgatggataaccgtaccgatgtcatgaaatccggtgccgcgttggacatctccggcgaggatttcctcgatggcatcgacgacacaaacttcgccttgttccagcaggatggcaagacctacggcatgccggtttccgcatgggtgggcgcgttcttctacaacaaagacattctcaagaaggccggatgcgataaattccccaagacctgggatgaattcatcgagatgggtaagaagatcaactccaacggaagcaccgctttcctggaggacttcaatactcagatcgctggctcgttcaccggcttgctggctagctattacggcgagcagggtaagtccggcgatcttgacgcggacatctggtccggcaagtccactttcaccaaggactggactccggtattcaagagatgggaagctgccgccaaggccggtgtaattcctcagaaatccgttggtctgtcggccgatcaggtcaagcaggaattcgtgagcggcaatcttggcgtcatgcgctccggtccatgggatctgcctgatctgcagaagtcagacatcgacttcggcgtggcaccgttcccggcctacagcaaggaagacggccagtggatcaacggtggccccgaccaaggcttcgccatcgcgtccaaggcctccgacaaggagaaggccgcagccaaaaagttccttgcctatctcaacagcgaagagggcctcgaggcgtttacctctgccgctggcaccctgtcgctgtcgagcaagtacaatgccgaacctcctgccgaactgaaggatgtagtggataactacttcaagcagaacaagttctactgggtcaactggccgaagtcccctacggtgatgtccaccgaggacatcgcccagcagcagaagatcgtgcagggccagatttccgccaaggaggctgccaaggctctcgacgccaagtgggcgacgctgaagtaacccatcacaccaccagttcctttctctcctcctgacaaggccgtgccgatcgcccgttcggcggcaggcacggccttgctatgtcaaatcgaccataattctcaaggacttcccatgaccgctgcaaccattgggcatgcttccaaaccaaaatccaagcgtgcatcatccttatgggcggaaaacctctcctcattctggtttcttctgccaatcatcatcatcttcttcatccttaccgtcgtgccgttggcacagtcgttcttctattcactgaccgattacgacggatactccgaaaacttcagcttcgtggccttcagcaactacgctgcgatcttcaaggacccgtcgctgctatccgccctgggcttcaccctgctgtatgccttcggcaccacactgttggtcacctgtttcgccattccgctggccgtgaccctcaacaaagccatgtggggacgtagcttcgcccgttcgctgttcttcttccttggtgtcccggcgcaggccatcattggtctaatttggcagtacatcttctctccactgggttccggtgtgatgaacaaagtcatcgcggtattcggtataccgaatatcccttggctggccgatgacaattgggcccggttctgcgtgattttcgtggccgtatggatgcaggtcggctggcacgccaccctgtacctcgcctatctgcaaaccatcccggcggacctgtacgaacaggctcgtgtcgacggtgccaattcccgtcagcagttcttccatatcactctgccgcagctcatccccggcatcgtcgtctcgatgttcctcttgatgaccggcggactgaaaatctacgatctgccgtacaccttgaccggcggtggccccggatacgccaccaatacgctgtcccaggccatcatcctcaaaggtatcggccaaagtcagtacggactgggctcggcgttgtccgtatgcttcaccatcgcctgcattctcgtcatcgccgcgcagaccggcattgccaacgccgtggaaaagaggttccaatgacaccgtctcagcgtgaactcgttcgcaaaatctttcgcaccatcgtggtgcttggcctggccctgatttgcgccgtgccactgtactatgtgatcgtcagctccttcaagacctcaatcgatatgatcaagaacccattggggcttccggagcagtggacgctggagaactacaaggaggccttcgccgacggcaccatcattcgtgcgttcgtcaacacgctgattgtcaccgtggtggcggtgctgctgcaggttctggtcggttcgatggccgcattcggcgtggtatacaagaaatccaagttcaccgccatcgtcggtggcgtactgatggtcaccttcgccattcctgtgcaggccacaatgctgccgctgtaccgcatggagtccgagaccggacttgtggattcgctgcttggcttgattgtgctgtatatgggctcgtgtgtgttctgctacttcctgatcgtcggctacatgaagtccctgccacaggaattgttcgaagcggccaaaatcgacggtgccggcccatggcgcatctactcgcgcatcgtgttgccgctgatcaccccaatattgaccaccgtcgtcgtattccaaaccatgggcacttggaacgacttcctcctgccgagtgtgttcctcagctccacggataaccagaccgtcgtgctgcaggtatacaacgccgtgcagcagttctccacgaactggcctctgttcatgaccatcacggtgcttgccctggttccggtgttcattttcttctgcttctgccagaagtggattgtctccgggttggttgccggctccgttaagggctgaggacgaaatgagatcagtcatgagtgacgtacagaatgctgcacagcaagccgctatcgaacgtgctactgcagaagtcggtgcctcaacggatttctctcaattcgctggaagttcgctgccgttcggcaatggccaggttcttctggatcaatccaccggtgctcccatcgcttttgtgaacgaagataatcccaatcgtcattatctgctggacgacagtgtctcttggcacacatcggaccagtattggggcagcggctatgtggtcactaccagtggtggctcgcagtggaacacgccgcaggtatatggcataaccaatggtctggaacagcagacgttcgcactgtgcggtgcgggactcgtcctggacgttacccgcagtagcggcgaacggctgaccgagcgttatgaatggcgcaacgtttcgaaccagccggtgaccatcacaggcttgggcatccagaccccattgaacgaccggtatccgggcgctcgcaaagcgttgagggaatgtgtgcatgcgcatatattcgcgggaggcgactggagctgggtgctggccgagccgatggacggccgcggtgcgcgcttggggctgatcgttacggaaggcgcaatcaatgcctatgccatccaatcgcgtaaccaggtcacgtattcggatatccgcgggcacatcgtgctgcaggtcaccgattatgcgctgaatcctgatgcgttcggcgggcagccgaccatcacgctggagccgggggcctcgtatgcgctgacgtgggaactgggatggtatgcggacgaggatgcattcctggccgctacgattgctcctgcatcgttctcctcgttaagcgccactgtgggcgggcatatcgatatcgccacgaatcgtgctgttacggcgctggatgacggtcttaccgtcgaacggactgtgagcggagttcggttgacggccgaacaggcgggtacctaccaactgcagcttgtggatggagaccatcgtgcacataccgaagtactcttccacaagacgttgagggataccgtcaacgaccgtgcgcgatacatcctggagcatcaggtggcgtatgagcgcgtcggcgcgttggctggggccatcgtggctaccgatacccgcaccggacagcatgtgctggatcccagttgggatgactggtcggatggttccgagcgtatcgccatgccggtattgctacaacgtgcgctgaatcttgggctgcttgacgagtccctacgagagccggcccagcgtgccgccgatgcgtggcgcacgttcgccgagtccgcgctcatcgacgccagcggcgcggtacgtcgcggctcggggctgccggaatccaaattcggaggccgtatctatgactgcccgtggattatcagtttcttcaccgaacattatctggccaccaaggatgcgcacgatctcgatatggcggtgaacatcgccgatcgggcggccgaaattggcggcgaacacttcctgagcatcgagttcgccgaatccagtgcggccttggcgcgtgtgcttaagcagaccgggcgaaccgaggagacccaacgtctgctcgatcgtgtggtggtcagtgcggactacttcctgggattgggtatcgacctgccctaccatgaggtgtcttacgaacagtccatcactgcgccgttggtgagtctgctgttggaagcgcatcgcattaccgggcgcgccgaatacctggatggtgccgtggagcgattggattggctattggcgttcagcggcccgcagccggactcgcgtctctacggtgtggcgattcgacattgggatgggtattggttcggcatcaaccgacaattcggtgatgtgttccctcattattggtccacgttgaccgccgaagtgctggcacggttgccgcaagaaaggcgctccgcacgtaccgatgatttggccaaggcgattttcgaggccaatatggcgaactatggcgcggatggttccgccacgtgtgcctatgtgtttccctccaacgtcgatgggcggtccatgcatcaggccgacccattggccaatgatcaggactggcatctcaatatctggatgcgcatgattgccgaagagggcttctctgcgctctgagcccagcggcgctctattcggggcacgccattgcagcggtggcgtgcccttttggggatgctcgaatagggaagtaggcaaggatttttcatttggtgccgtccgagctaattggctataaacgtatcgaacgtgcctgtaaccgatggagaaaacgtaaggaaagaattctcggaactttgtcatctgcctgaactgacctttagcagtccgatgccaatcagctgccgtatgacgtgtcggccacgcagtcatcgcaatcgttgctctccggtatgaggaccgccgcgactttttaagcgataccagagacataccgaggccggagccacgagacgagtaacagtttgcggtagatccccatcgctctactgcagagcatgaaccgccttatcaaaacgttcggccatcagattgatggaatgcatgtcaatgcggcgcatcgctgctcgagataatgcctgagataaggctgatcgcaatgtcggcaaccaatgatccgcatatttacggcttacaccgaacaaagacagactctcatcggacatcaatttatctatatcgacttcggtgtcacctaataatgacatctggtgtgagtcgggtagcgacggatcgaatggttcaggattcatgtcaaaagcgggtgccaattgccaggaattattcttacgcaaatacccgtggtttcgtagatggtcatcagtgttgccgatggccgcgccaaacattgctctccgccatagctctatggtgtctcctcctgccctacgcgtaaattctgctagatccaaccagtctccgccgtccccatctcttgcttccagcgcggtcattgcggatatataaggtaatcgctccattcgctcaactgatggtgcagacacgcgatcaaaacggtgagtcaatagcacggtccggcttctctcctccgaatcctttattgcaatgacgcgatgttcgggcactttgatgccggccatgttcgcgatttccaaggtgacggcttcccagccgataacatcccaatcatcgccgttcggtttcggaaatttggccagccacagcgcattacgatccgacaccgaagctttaggtcgtgcgcctccgagtgagccggttgcccgatacaacctgcgtaaggagacatcacttacctcgcggttctgttccaccgcatccgcagtgtccaataactccggcagctttgacagtacgggtactccttcatctcctgccgctggcttgccatcaacaatgaatcgaatggcaccctgtcttgtcagatcgttgacgccgaacaaatattccgactcgctgacacgcgtccgtttaagactgcgggaaaacacctttctgccccaacggtctggggcggaatccgaaaatggaccaagtccagagaagaagaatggggccagcgagcggggcatagatgggaagaggtcgaaggaatcgctgctgattgtgtacgtcgaatcatagcggaacgataggtcgtcgccagtcgcatacaatgtgccggcaggagcttccattccaggccctagcgtaatcagtacagttgattcgatagtttttgccatcagggattcacctccgaacgcgcttcgggagttgttggccagcgcggagacgcccaagatcggtggaataggggtcgcatgcggctacgagtgtgtcagcaagttgcaacacgcgcgcgatggttaacagcgaatctgaccggacagccttgccttgctccagatttgacactgtggtcgggctgacaccagagcggtgtgctacatccgcaaccgtcaacatcagtagtttgcgctgttgcgagaactgttcgcctaggatgcgtaaatcgcgtttggtggtggtgggcacatacttcattgcgatactccgagtgttataacatatagttttccatgaataaaatcatttattcactagtatactattgattatctgctatgcgataccggaatgaggaaggtttagcgtctcgatgtttctgctcatacgcaaaaggactttctgccaacaaatagccagaaagtcctttggtctcacgcgtatatgaggtttacaatcccggaatcagaccgccgggcggatcgagcgtgaggtattgctcctccagatcgatgtcggggaccaaggcctccacgaacgggaccaatgcggtcttctcgaccacatcctcgcccttggaattctggccggttaccaccggctcggtcaaacgaatcttgagcagggactgagcgggggagtcgaccacatccaccactttgccgaccacttggccggcgggcagtcccagaccgttgccctcgactagacgggcctcaaggccaataagatccttgggataccattcgtcggcttcgagcatatcttctgcgtcgtcggcctcgccatagagttcgacaccgtttagggcctcggcggcattgcggtcgtcgacgccctcaagcttgagaatccaacgatccttgaacgtgcgcgagccctcgacgatgtactcggtctcgccatcctggctgtagagcacggagtccggctcgaagcgccactcgggatcatcggtgtacaggcgcacggtgacttcgcccttcaggccctgtgcgcggccaatacgagcgaccctcagcaactcgagctgctgagggtcgtcgtgcatgtcttgctgtgccatgctgtgaattgttccttatcggttatcgacggacgtccatgatgtcaacgcggaccttgtggtcagacagtgcctgaatcacggtgcgaatcgcgttggcggtgcggccgccacggccgatcacacggccgatgtcttccgggttcacgcgtacgcgaagcagttcgccgcgcgcgttctcatgggacttgacggaaacatcgtcgggaaaatcaacgatgttcttgatgaggtgttccacagcctgtgcaagcatagctagcctttcgtttccgctcaggcctcggccggagcttcttcggcggcctcttcagccggggcttcctcagcggcggcagcggcttcggcttcagccttggccttggcggcagcttcggccttggcggccttcagcttctgagcctggttctcaacggccgcgatgcgggcctcggcgtccgggccagcctcaacggtcttcagggtgccttcggcaccttcaaggcccttgtacttctgccagtcgccggtgatgttcagcagcttgaagacgggctcggacggctgagcgccgacgccgagccagtactgagcgcggtcagacttgatctggatggtcgagggctgggtgttggggttgtaggtaccgatctcctcgatgaccttgccgtcacgcttcttgcgggaatcgacgaccaccacacggtagaaggcgtagaacttcttgccctgtcgcttcagacgaatcttggttgccaaaatggctctccttgtaatgctaggtgtgcgggttctcggtttgccatgtggggcatgaccggccggaatccacgtgtcctcgcggctcggggtgtagagggcgccacgcgcgcgcgaataaccgtactagtgtaacgcggaagccggatattgcgcatcggtccggtcgtgacgcacggaatcgccggacggacggcgtgtcggcggcgcacctaccgtcttcatgactgatagcctgattgatggcagtgcgagacgggaaagggggcgctgatcgatgggtgagtgcgtgatcggccccggtgcccgggcgcgtgtggatgcggatgacggattcttcttcggcatgggggccttcgagaccatcgcggtatccggcggcgcgcccgtgtttctggacgaccatctgacgcgtttgggtgagacgttgcgatacctcggcatcgaggcgcgtcgcgccgatctggagacgatggttctccgcgcatgcgccggactcggcgcatcggacgattcggccctcaagctcacggtcaccgagcgcaaccgcgtcgtctcgttgagacgcaacccgtatgccgcgccgggggcgaagcgcgtcttccgctgcgacttcgccgatgtgcgcaggaacgaatcctctcccctcgcgcgcatgaagacgttggcgtatgccgaaaacatcatggagaagcgtcgcgcccgtgaccgcgccgtcgacgagccgttgttcctcaatacgcggggcgaggtcgccgaaggggccgtctccaatatcttcgccgtcatcgggggagacgtcgtgacgcctcccgtctcctgcggtctgctgcccggggtcatgcgccatgccgtgatcgggttcacgggggccgtcgaacgcccgatcatgcccgacgagctgcttcgggccgacgaggtgttcctcaccaactccctgatgggtgccatgcccgtggccggtatcggcggcgtggaattcgaaccggggagcgtgtcgcgcgacgtgaacgacgcctatgcccgcatggtggcgcggacgcgggcccgggcgcagacgaaggagttccggtgagcgcgcaggtgttcaagctcaggacgttccgaccgcttgccgacatcgtggagcgcgtgcgcggcgaggaacgcttcgcgttcctggactcctcgatgccgggggcgcaggggcgctactcgatcctgggactcttcccctatcttgtgatcgaacacgggcggggcggatgcctcgtcgacggcgttgccgtggagggtgatttcctcgatgtcgtgaagaagcggcttggaccctgcgatggcgcgcgcgatccgcgtctgcccctcacgggaggcgcgatcgggtatctgggatacgatttcggccgcgaatcgtgcggcgtgccgactaggcacgatcccgtcgcggccacaccggaggcgagcatggtcttctacgacctgctactcatcgaggacgtccggtcgcggtcgttgttctgttgctgccaggggcggacgatgacggccgcccacgccctgacatgggcgcaggacctggtggattcatgcccgcccgcccctcatcccgcgcgccgacgttcgctcgccccatgctcctccgatttcacgcgggccgggtacggcgacgccctggcccgtctcgtcgatcatctgcgcgccggcgacgcctacgtcgtcaacatggcgcagcgcctgcgcctggagacatccgggagcccctatgccatctaccgttatctgcgcacccacaacccggccccgttttccgcctatctgcgcgcaccgggtctcgacgtgtgctgttcgagcatggaacggttcatggagattcgctcggggcatgtggtgacgcggcccatcaaggggacccggccgcgcggcggcacgccggacgaggatcgggcgaaccgagaggaactcgcccgcagcgagaaggaccacagcgaactgctgatggtcgtggacctcgaacgcaacgacctgtcgatcgtctgcgaaccgggttccgtcggcacggaccccgactttgccatcgagacgtatccttccgtattccatctcgtcgcgaccgtcgaggggacgctgcgcaaggatcgttgcgccgtggacgcggttcgcgccgcgttccccaccggttcgatcaccggcgccccgaaggttcgcgccatgcagatcatcgacgagctcgaacgcgcgccccggggattgtacacgggcagcatcgggtatttctccgatacgggcgattgcgatttcaacgtcgtgatccgcaccatcgtgcgggagggaggcgagacgtcgctcggcgtgggcggaggcatcaccgtggaatccgatttcgacttcgagtacgacgagacgatgcagaaggcccgggcgctgcgtgaggccgcttccgttgacagggggagcgtcggcgagtacaatcacgggcaaaacgaataactatcttcagggcagggtgcgattccctaccggtggtacagcccacgagccgcaaggcatgatttggtgagattccaaagccgacagtacagtctggatgagagaagatgaaagtacgttcatgcttcgtcgtacgccctgaaatgatgccatatcatttcagggcgttttcgtgttcgcatgaaccttcttttgtatgccttggatagcgtatgggcgcaacatgcttggaggcgtacatggacgatgcgcagtacatgggactcgcgatcgagctggcgaagcgaggggccggatacgtgaaccccaatcccatggtcggcgcggtgatcgtcaaggacgatcggatcatcgggcaggggtatcacgaggagttcggcggattgcacgccgagaggaacgcgttgcggcattgcacgcagtcgcccgccggggcgacgttgtacgtcacgcttgagccgtgctgccattacggcaaaacgccgccatgcacggaggcgatcgtggaaagcggcatcgcaagggtcgtcgtcggaaccttggactgcaatcccgtggtgtccggcaagggcgtgcgcatgctcgaagaccacggcatacgggtcgatgtgggggtgctggccgacgagtgccggcatctgatacgggtgttcagcaaatacatcaccacgcatacgccgtatgtcatcatgaaatacgccatgacgatggacgggaagatagcgacccataccaatcaatcacggtggatcagcggcgaggagtcgaggcgtcgggtccatcagctccgtcgatccgtcgcggcggtcatggtgggggtgaacacggtgatcgaggacgacccgttgctgacatgccgcatggcacacggaaggaacccggttcgcgtcgtctgcgatacgcgattgaggacgcccctcacctcgcggatcgtgcagacggcgaatgacgtcaggacctatatcgccaccgcctgcgatgacgaacgcaaggcggaggactaccggcggcacggctgcgaaatactcgccgtcggaaggaagggcgaccacgtcgatctggcggacgtggtgcggcgcctgggggatatgcagatggacagcgtgctgctggaaggcggtagcgcgatgaattggagcgccctcgaacagcggatcgtcgatgaggcgcacgtgtacatcgcgccgaagatattcggcggcaccgcgaaaagcccggtgggcggccaaggagtcgccctgccttccgacgccgtcatgctccggccccgcgcctgctcccgggtgggagaggattatctggtggaaagcgaggtggtgtattcatgttcacgggaatagtggaggaagtcggaacggtggcggacatacggaggagcgccgccaactgcacgctgtcggtcgatgccacgaacgtgatggaggacctccatatcggcgacagcatggcggtgaacggcatctgtctgacggtcgtcgatttcgaccggcgacgcttcaccgtcgacgtgatgaatgagacgtggcgcagaacctcgcttggcgtattgcgccgcgggaacggcgtcaacctggaacgggccctgccggtgaacggaaggttcggtggccatatcgtcaccgggcacatcgacggcacgggcagcatatcctccgtgcggcgcgaaggcaatgccgtgtggtaccggatcgcggcgcgaaacgagatactcgaaggcatcgtcgagaaaggctcggtcgccgtcgacggcatcagcctgacggtcgcggaggtcacggaaagggacttctcagtatcgatcatcccgcgcaccttggcgcagacggtgctgggcgagaaacgggtcggcgacgtggtcaatctcgaaaacgacgtattgggaaaatacgtgcggaacatgatgacgacccggacgggactgacgcaggatctgctgtcccggtgcgggttctgagaaaggatgcatgaatcatgaaccatcagtcggtgcaa

SEQ ID NO: 416 - DNA, 4394 bp, Unknown
  R48_24m  MAG No. k141_10013
ggtatgagtagcttggtgcgtattgtcaatgccggtgttccggggtctcaggaccgcgtggatgtggtgcttcgcgatggggttgttgcgtctgtcggccctgctggaacggtctcggcttcggacagcacgatgcagactaaggcgcatacgacatcgttggaatacgcgacgaatgccattgcttctggcagcgtctcaatcccaacgtcggccgccgcacccgccgacgaaaccaccatcgacgccgacggcctgtgggttattcccggcctgtgggactgccatacgcacttcacgcaatgggccaagacgttgggccgtctggatctcatcaacgctcgctcggctgctgaggcgatggatatgctgcaccgtcacttggacgagcgccgcgccgccggcacgcttgacccggatgccttcgtggtgggcatgcgattccgtcactcgctgtgggctgatgatgagcagcccacgttagccgccatcgacgccgtgaccggcgaccagccggtggccctctccagcgcggacatgcactgcggttgggtgaactctgccgcggctcgcagacttggcgtacatgtggacgaatccggactggtcggcgagctcgaatggtttaacgcctacaccgccttcgacaaagcaccgggcgccgccgaggagaccgatcgtctgctgcgcgaggccgaacaggacgccgcaagcaagggcgtggtcggcatccgcgattatgagatggccgaaaacatcgacacgtggatcaagcgtttcaaggccggcgtcaataacctgcgtgtggatgccggcgtataccccgaacgactgcaagccgccatcgacgcgggctggcataccggcagggaacttccagacagcaacgggctcggccgcgtgggtgccatgaagctcatctcggacggttccctcaacacccgctccgcttattgctccacgccgtattcgggcatcgagccgacgacgtacggcaccctgagctacacgccgcagcaaatcgaagactacatgcgcttggccacagagcatggcttcgacatcgcctgccacgccattggcgacgaggcgaacaccattgtgctcaatgcagccgccgccacgcatgcacatgggtcaattgagcacgcgcagatgctcaagcccgtcgatatcccacgctttgccgagttgggccttacggccagcatccagccgcagcatgctatggacgaccgcgacgtcatcacccgtttctgggccaacccggccggcattccctatccgttcaaggcactccacgacgtcggcaccacgctgcgcatgggttctgacgcgcctgtggccccgctggatccgtggctggctatttccgccgccgtgttcggtaccgagagctctgaccgcgagccgttccagtccgagcagtgcctagatgtgcgtacctcgctgtcggcttcgaccgccaccggccgtgaccgtcttgcagccggcgacccggctgatgtggtgctgctggacaccgacccatacgccgcaaccactccggaagccatgcgcgccatgccgggacacgtggtgatgacgctattgcgtggtgtacgcacgtattgagcgaaggtcttggtgttcggcggctgtcaccgctcgcctcgacagctatatcgtgtatatcgcgcaaaaagcagcgttgaaatcttgaattgcggttatgagtgtttgattctccgtttcaaggggcggatttacgcttctgcggaggtctacttccgttttgaggggccggtcatccactgaacctcgcatagaagcccatctgtgccaacgtcattccgccgttttgtaccatgtctacttgggcatcagcccctcgaaacggaagtagacctccggacaacgagaaatccgcccctcgaaacggaagtacgggcgcaaaagcagtcacacaaggggagggtggacgttttggacggctatgcggcccgtccagggtgtttgcggcattgcacagggctcgcataaataagaaaaggactaatctccgccatattgcaatgaggaaccgttctgattctgcgctacgaggcagtctgtactcatgcacgcggttccagctatgcgataaagagaacgcgcagacgctagtgcgccaaaacgaagctgggctggacgcccacactaacccatcaacacgcgcggataagacccacgttttgtctatgaacccaaaacgaaagacgccgtgtcagtcgccccgatgggtctgacacggcgtcttgccgcgagcagtgaaagatcagtacttcatacccatggcctcacgcacctggtcgagggtttcctcggcgatggcgttggcgcgcttgttgccgtcgtgcaggatgtcgcggatggaatccatgtccttggccagttcggcgcggcgttcgcggtgcggggccaggaactcgttgacggactcgatgacgtacgccttcagcgcgccggcgccggaatcgccgatctcctcggcgatgtccttcgggtcacggccggtcaccagaccggcggtggtcagcagggcggagacctgcggacgcgcaaccgggtcgaaggtgatgcgacgctcggagtcggtcgggctcttcttgataagcttggcggtctcctcggctttggcgcccagcatgatggagttgccatatgacttgctcatcttgcgtccgtcaagacccggaatctccggcgcttcggacagaattgcggccggctccgggaacaccggattcttcttggcgtaacgctcgttgaagcggcgcgcaatggtacgggtgatttccacgtgcggcaggttgtccttgccgattggcacgacattggccttgcagaagaggatgtcgcacgcctgatgcaccgggtaggtgagcagcaggccggtcagcgcgtggccggaagcctccatctcggacttcacggtcgggttgcggtgcagctcggcctcggtgaccagggacaggaacggcagcagcagctggttctcggccggcacggcggagtgggtgaacatcatggtcttgttcgggtcaatgccggcggccatgtagtcgagcaccaggttcagcacgttgtcctgaatgtgctcggtggtgtcgcggtcggtgatcacctgatagtcggcgatgatgatgttcgtgttcacgccgcgctcctgcatggcgacgcgctcgcgaatcgagccgaagtagtggcccaagtgcaggcggccggtcggccggtcgccggtcagcatggtgaagctcgacggcttggcctcaagcttggcaagcgtttcgtccgaacgcttcttcgccgcgaggaagctcgcgctcatctcattgcctgccgctgtcagttgctgctcgtcggtcatgcgaaatcctttgaataggcctcagataaacgctttttatggtaaaagtgtgagccgacaacgaacaagccagtattagtggtactctctattgttgatgaatcgaacagcacagtaattcgcagggggtcagatgggccgcggacgtcaaaaagcaaaacagcagaaaattgcccgaaagctcaagtacctgaccaccgataccgattacgatgagctggcaaaagagctaagcgagcaggagccgggaacgggctctcctgacccgtttgccgacgttgatgaccagtatgcggacaaggatgtggattccgctgctgacgccgacgccgccaaggtctcgcccgccgcgcaggcggacgacctcgacgagtacgccaagtgggcagccgaagccgccgcaaaggcgaccagcggcgaattcccggcctccgcgccggccgcgcccaagccgaagccggtcccgcgcaagccgattccgatgcccatgccctcagcgctgaagccgaagaagagctgaactccattacttattagccgcggatcgattgacttacgcggcgatatttggggtgcactgaggcgtgctgagacgttcgccgtatcgggcttggaattcttgacgtgataacgcctttgtgcagtttgaatgcgcgaatgccgtgcaatgacgtgcataggggagggaacgtgcctgatatcagcgggcgggatggatcgaagcccaccatgctcatcatggacaacgaccgcatggccttgatggcattgcagtcgattctacggcaagcgtgctgctggtatcactgggcattgcgttgcgctggcgcaagcgcgtggtgaatcaggagaacgaaaacgagcggatggaatcggcgctggccgatctgcgccacggcaaccagctcgcgatcgaactgcacgacacgctgtccaacgatctgacgtatatctcgaccatcgcccggaataatctggccgcgccagccggcatcgatggtggcga

SEQ ID NO: 417 - DNA, 5471 bp, Unknown
  R48_24m  MAG No. k141_10765
aactccctgattccggtcgtcacttacctcggccaggacatcggcggcctgatgggtggtgccatgatcaccgaacagatcttcaacatccacggcatcggcttcctcacctaccagtccattctgaagggcgaggcaaacctggtggtgtccatcgtcacgttgctcatgctgatcttcgtagtgtgcaacctcgttgtcgacatgctgtacgcggccctcgatccgcgtatccgttacgcgtgatagggaggagtgagtcacatggcaaacgaaaccactgaaaacgagctcaaccagaccggcgagccaggaaccgaatacttcatggaaaccctgcccggtcaggaccgttacgtagctcctctcgacgagaccccgttgcaggacgtcgattccgtcgacgaatccgcaccggccaccagcatgtgggccgacgcatggcgaaccctgcgccgcaacccgctgttcatcatctccggcctgctgatcctcttcatcatcgtggtggccatcgcccccgggctgttcaccaaacaggatccgaactcctgcgatctgggcaattccctgaacccctcctccgccggacaccccttcggcttcgacctgcagggctgcgacgtgtacacccgcgtgatctacggcacgcgcacctcgctgtccgtcggcgtgctctccacgctgctggtcgtgatcgtcggcaccctgatcggcgccgtcgccggcttcttcggcggttgggtcgacgcggtgctgagccgtatcaccgatatcttcttcgcgctgcctatgctgcttggcgccatcgtggtgctccagatgttcaagacctccaagtccatctggaagatcgtgctggtgctgacgctcttcggctgggtcggcgtatgccgcatcgcccgcagcgccgtgctggaatcgaagaacctcgaattcaacaccgcctccacggccctcggctccacgccggccagaaacctgttccgccacatcctgccgaactccctggccccgatcatcgtcatcgccaccacctcgctggcctcctacatcgtggcggaagcgacgctgagcttcctcggcgtcggcctgccgaccaccacggtgagctggggcggcgacatctccagcgcgcagaccaatctgcagaccgatccgatggtgctgttctacccgtccgccgcactggccatcaccgtgcttgcgttcatcatgatgggcgacgccgtcaaggacgccctcgacccgaagagccgtacggcctgagcgaggggagtggagaaacattatgactgacaacaccaacgccaagatgctggctatgcagaaagagcatggtccgctgctcgaggtcaaggatctggccatcgacttcaccactgacaccggcaagccggtgcatgcggtgcgcgatgccaacttcaccgtctaccccggccagtgggtggccatcgtgggcgaatccggctccggcaagtccacctccgccatggctgtgctgggcctgctgcccggcaccggtcacgtggtcaacggctccatcaagctcgacggcgaggaaatcgccggtgccaagcagagcgagttcgacaagctgcgcggcaccaagatgggtctcgtgcctcaggacccgatgagcaacctcaacccggtgtggcgcatcggctcccaggtcaaggaggcgctgaaggccaacaacatggacgtggcccacgagaagcgctccgccctcgcccaggccctggccggcgacgaggtcgaagtcaagggcaacgacgacgagaccttcctcggcacaaaggaactgcccgagctcatgaccgaggccaagaaggccctgaccgaagccggcgtgtccggcgaggccttcgacaaggccgtcgcccgcttcaccaacgaatgggttccgggctccgaaacccgttggcgcgtggccgacgacctcatcaaggccggtgtggccgatgatcaggcctggtacctcgccaagaagtacgtcatcggctccacaatggatgaccgcatcgcgggtctgctgtccgaggccggtctgcccgacgccgctacccgtgcccgtcagttcccacacgagttctccggtggtatgcgccagcgtgcgctcatcgccatcggtctggcctgccgccctgacctgctgatcgccgacgagccgacctccgccctcgacgtgaccgtgcagaagaagatcctcgaccatctgcacatgctcactgactcgctgggcaccgccgtgctgttcatcacccacgatctgggtcttgccgccgagcgcgcccagcacattgtcgtgatgtacaagggtcaggtcgtcgaatccggtccgtccctcgaggtgctgcagcacccgcagcacccgtacaccaagcgactcgtggccgccgccccgtcgctggcctcccagcgcatcatctccgccaaggagcgcggtgagaacgcggacgccctgctcgatcaccacatcgccggcgaaagcacgcttgagaaaagcgagcacatcatcaccgtcgaccacctgaccaaggaattcaagctgccccgcaagaaggagatgttcaaggccgtcgacgacgtgtccttctccgtcaagcgtggcaccaccctggccatcgtgggcgaatccggttccggcaagtccaccgtggcgaacatggtgcttcacctgctgaatcccacttccggcaaggtgttctacgaaggccgcgacacctccacgttcaaggccaaggatctgctcggtttccgccgccacgtgcagccggtgttccagaacccgtacggttcgctcgacccgatgtactccatcttccgttccattgaggagccgctgcgcatccacaagattggcgataagaagtcgcgtgccaatcgtgtcaaggaactgctggacatggtcgagatgccggcttccgtgatgggtcgttacccgaacgagctctccggcggccagcgtcagcgcatcgccatcgcacgagccatggctctggatccggacgtcatcgtgtgcgatgaggccgtctccgccttggacgtgctggtgcaggatcaggtgctgcgtctgctcaacgacctgcaggccgagaagggcctgagctatctgttcatcacccacgatctggccgtggttcgccagatcgccgacgaggttgtggtgatgcagcacggcaagctcgtggagcacgccaccaccgatgaggtcttcgaccacccgcagaagcagtacacccgagacctgctcgacgccatccccggcggcaagctccagcttggtctggactgataatctgcgtttgagcgcattgtattgggttctttccatccgtggaaagaacccaatattcgtatgcgcgggtttgcatgatggttcgcgtgggacgaaaacgcaaaaatcggtgttttcccgatgttgtcccacaatttgtgggacaacatcaacatcaatcgatagacatgagtgttgtcccacagcagatttctcacgaagcccggaattacgccattcttagtgtggtcgataattactcatgctgtggggcgtgggacgacccgcgaaaatcgtcgattttcggatgttgtcccacggaatacgtcatacctcgtatgtgatcgtgagtggggcgtgatcggaccagcgtttgtcatacgtgggagccttgtcgatgacgaatccgcgtgcggtctccgccagctcgggcgtggcgaactggtagtcgattctccagccgacattgttgtcgaaggcgcgccctcgttggctccaccatgtgtacggcccctgaatgtcaccggccaacgaacgcatcacatccacgaactcgtattcgtccagccatttgtccacgtaggcacgttcttcgggcagaaatccggcgtgcttctcattggccttggcgttcttgatatcgagcggcgtgtgtgcgatgttgaaatcgccgcataatacagcctgcttgccgccatgtgcggcttcatcacgaagcgcgcccatgcgggccagcatagtgtccagaaaacgatacttctgttccattttggtcggatcatcggtgttgccggcatgtatgtacacggatgccacggtgatcgtatagccctcaggcgttttgacatcggtttcgatccaacgccccgaatccacatcctcgctcagacctggcagaccatatcgcttgtcaagcacttccaagtcggtgagcagtccgactcccgcgcggcctttcacccggcagacctcgttcatggcatggaggttggccggtgcctcgattttgccggcggtggcgtattcgaaaccaaattcatcgaaaatagaatcgacatcgtcttgaggcgcgcgaacttcctgtatgcaccagacatccggcgcatgcttgccagcccaatcctcgatgcccttgcgtttggccgcacgaatgccgttgacgttagacgtggtaatggtgatggtcatgcggccatactattttggcctccctacgaatcgaaccggacaccggcggccgcgatgctcagctttctctaagcttgagtgctagtgttagcaaggttgcaaccgttatacgaaacgaggaatcatgggactgttcggattcggcaagaagaagagcaagaaggaagccgagccggccattgagcctgtcgatgaagacaaggtggccgccgcagaagcgaacgctgccgcaaaggccgagagcgcggagaccgtgctcgccgagccggccagcgaataccagggccgcggcgaagagcgaggcccgtgggacgtcaatgatgaggacgtgcccgattatgacgattatctggatctcggcgcctactacctgcccttcctccagggcatccagctgcgcatcaaggccaaccgcgccacccagcaagtgcttggttccaccatcaccttcggctcctccagcctggagatcgaagcctttgccgcacccaagaccctgggactgtgggatgacgttcgcggtgacctgcttgaagccaacaaggccgcttctgaagtggacggtgtgttcggcaccgaactgaagctgccggtcaatgtcaagggcggcaaaaccgtgaacacgcgcatcgttggtgtggacggcccgcgctggatgctgcgtggcatcttctccggcaaggctgctatcgatccggacagcccggagaccgaggcgctgaacaagttcttcgccgacatcgtcgtcgagcgtggcgaggagcctttggcgccgcgcgatctgatcccgatgcatccgccggtcgcccccgctgagcgtaaggccgccaaggccgcggccgaagccggcgaggagaacggcaaggaacacttcaaggacattccggacaacaagccgaagggtccgctgagccaggaccagcagaccgaagtgaagaccacgctgtctcgcggcccgatgttctccgaagttcgctgatttataggaagagacttggca

SEQ ID NO: 418 - DNA, 17262 bp, Unknown
  R48_24m  MAG No. k141_11225
ggtcgatgtcgtccgccagctcggacgaatagcggaacacggtctgcgaggagcggccagcctgggaggagtagaacttgccgatgttgtctagtcggtaccaagtacgtcttgccatgcgtcgcctccctccggtgcgttggcggtggtgccggtgccgggagccggcaccagcggtgtgtcgtcgaggaaatgctcgatgatccggtaagtggtggacaccagccctacggccgacgtgttgagcagataaccgtggatgccgtcgtgaatccggtaacaggagacgttgtcgttcaccaattgcagacgacgggcgtacgcttcgtcctcgtctctgagcgggcagtattcggcggacaacaccagcgtgcgcggctgattgctcaggtcatgcgcggtgagcggcgcgaaatacggattggtcaggtcggccacggacgaacggtacatgtcgatgtagtcggccatgtcctgtgcggtgaggatgtagtcggtgccgttggtccgcaccgattcgaacgggctggtctcgggattgtagtcgttgccgaccaccgggtaaagcagcatctgcgtgcgcggcatgaactcgccgcggtcgcgggccatgagcgagacggcggccgcaagattgccgcccgcgctgtcgccaaacagcacgatgctgtcgggatccggtgctgggattgtcgcagatatatcgcccccgccggtgggggctgtcggcgcagccgactgggggtggtcaacatcaacagaaccacccaccccagaaatcggcaattccccagcaaacagctgccgggctacctcatagcaatcctcaacagcagtagggaagcggtattcaggagccagccggtactcgaccgagatcacacggcgttgcagacgtacggccatatgcgcgcaagcctgcgtgtacaggttgatgccgcctgtggtccaaccgccaccgtggaaaaacaggatcgtgccacgcggcgtgactgagggaagttccgtgttggcattgccgggaataccgtcggtgttgccgctcgacgtgctttccttgatgggtattttgggtaggactttgggtaatacggcgggcagaatcgcggatattgccgaggccactggcgtgccattggcggaagattcctccagggcttcgggcaggggcgctccataggcgaccagcggcgtgaacactcgcaatggtacggcatatccatccgccataggcgcgaaggcgtcctcgacacggcatttcggattggcgggtgcctgcttggcgataagctcttccgccacgcgctgcaatttgtacgacttgcccgcgttgggcttgatgtagctggcggccttcatcgcggcgaacaatgcctcgttgatcggcatgacgacaggtcctttcagcggcggattcggtagtgcgaacaccccaaccttagcccatgaccggcatgaacaaaaaagggaaggaacccgagagttccttccctgtgtgccgtatcagacgcgatacgcgccgattatcaggcggcgaagtattccacgccggcctcgaagatcggctggtacttgttgccgggcacgttgacgtacaggccgttgccggaacgctccgagtgacccatcttgccaaacacgcggccgtccgggctggtgatgccctcgatggcgagcagcgagccgttcgggttcacatctaggtccatgccgggggtgccggtctcgtccacgtactgcgtggcgatctggccgttggccctgagctgggcgagtacctcgtcggaggccacgaagcggccctcgccgtgggagatggccacggtgtggatgtcgccgaccgaagtcttggacagccacggggagaggtcggaggccacgcgcgtgcggaccagtcggctctggtggcggccgatggtgttgaaggtcagcgtcgggcaggcgtcggtcatcggcacgatgtcgccgtacggcaccagacccagcttgacgagcgcctggaagccgttgcagatgccgagcatcaggccgtcgcggttcttcaacaggtcacgcacggcctcggtgacggccggcgcgcggaagaacgcggtgatgaacttggcggaaccgtccggctcgtcgccgccggagaagccgcccgggatcatcacgatctggctcttgttgatctcatcgaccaacgcctgcgtggattcggcgacggcggccggtgtcaggttgttgataatcagcgtggtcacgtcggcgccggcgcgctcgaaggcggcggcggaatcatactcgcagttgttgcccgggaacaccgggatcaccacatgcggcttggccacggaagagccgacgtacacggtcttcttcggcgcgtggaagtcgatggtctcgacggtcgcgcccttgtcctcgcccttggaacggtacgggaacacggattcgatgccggactcccaagcttcctgcacagcgtccaggtccagcgtctcgccggcggccttgaacacgtactcggaggtggtggtgccgatttcgccgatctcgaccaaattggagacggccggaagcttggcatcgtctgccagctcgacgatgaacgaaccatatgccggggtgaacaggtcgtccacggcgatgctgtcgttcagagtcacgccgatgcggttgccgagcgtcatcttgaacagggcttcggcggtggcgccatagcccggcgtggagacggccagggcatcgtggaagtcggtgagctcctcgatcacggagaacacctcaagcagcgcatccttgtccggggtcagaccgtcggccaggtagcgcggcgcgatgcgcacgatacggtgatcggcgtccttgaattcaggggaggtggcgcgcttcatgttgcccacggccacggcgaaggagatcagcgtcggcggcacgtcgagatcctcgaacgaaccggacatggagtccttgccgccgatggcgccggcgcccaggtccacctgggccatcagtgcgccgagcacggcggccgccggcttgccccagcgttccggctcgtcgcgcagcttctcgaagtactcctggaagctcaggtaggccttctcatgctcgaagccggccgcgaccagcttggccagcgactcgaccacggacaggtaggcgccggtgaactggttcttggacatgatgtacgggttgaagccccacgccatcgccgaggcggtggtggtctcgccgaacaccggcagcttggcgaccatggccatgttcggggtgagctgacgcttgccgccgaacggcatgagcacggtgcccgcgccgatggtggagtcgaagcgctccgaaaggcccttgttggaggccacgttgatgtcggtgaccagcttgttcatacgctcggccagcgtgccctcgccccacggggtctcgtaggactgctgtgcctcgacatgcacggtctggtgcttggaagcgccgttggaggccaggaactcacgggacagattcacgatcttgtcgccgttccaggtcatcaccatgcgcgggtcctcggtcacggtggcgatcaccgtggcttcgaggttctcttcgcgggcgtagatcaggaactcgtccacgtcctcggcggccacgtccacggccatgcgctcttgggattcggagatggccagctcggtgccgtccaggccctcgtatttcttgggcacggtgttgaggtccacgaacaggccgtcggccaactcgccgaccgccacggacacgccacccgcgccgaagtcgttgcagcgcttgatcagacggcaggcatcgccgcggcggaacagacgctgcagcttgcgctccaccggagcgttgcccttctgcacttcggcgccgtcgagttcgagcgattccacgttatgcgccttggacgaaccggtggcgccaccgatgccgtcacggccggtgcggccgcccagcaggatgatcttgtcgccgggggccggggtttcgcggcgcacatggtcggccggagtggcggccacgaccgcacccacctccatgcgtttggccacgtagccggggtggtagatctcgtcgacctgaccggtggccagaccgatctggttgccgtaggagctgtagccggcggcggcggtggtcacgagcttgcgctgggggagcttgccttccagcgtctcggagaccggcacggtcgggtccgcggcgccagtgacgcgcatcgcctgatacacgtaggaacggccggacagaggatcgcggatgcagccgccgatgcaggtggccgcgccaccaaacggttcgatttcggtggggtggttgtgggtctcgttcttgaacaggaacagccagtcctcgtcgtggccgttcacgtcaaccttgaccttgacggtgcaggcgttgatttcctcggactcgtcaaggccggtcaggacaccgttcttcttgagccacttggcgccgatagtgcccatgtccataaggcagacgggcttggcgtcgcggccgagctcgtggcgcatcgccaggtaacgctcgaaggcggccttgacggtggcgtcatcgatggttacttcgtccagctcggtgccgaacgtggtgtgacggcagtggtcggaccagtaggtgtcgatcaccttgatttcggtgatggtgggctcgcggccctcctcgctgaagtacttctgacagaattcgaggtcggccaggtccatggccagaccgcgctcgtcgatgaacttctggccggcttcggcgtccatctcgttgaaaccggcgatggtctcgaccttgccgggcaccggcacctgggtcttcagggtttccttggtctccaggctggcctcgcgggcctcgaccgggttgatcacataacgcttgatggtgtccacgtcggcgtcggtcagttcgccttccagcgcgtacagcttggcggagcggaccgtcgggcgctcgccctgggagatgagctggatgcattcggcggcggagtcggcgcgctggtcgaactggccgggcaggaactcggtggcgaagaccttggcgccggcgaagtcgggcaggtcgtaggccacattgtccacctgaggctcgctgaacacggtgggcacggtctggtcgaacagctcctgggagatgccttcgacgtcgtagcggttcacgatgcgcagggccttgaggccggtcagtccgaggatcgtgcgcagttcgcccgcaagctgctgggcttcgacatcaaagccgggcttcttttccacgtacacgcgaaaaaccatggaaatcctttcttgaaaatattgaaaaattgaagaagcgcggtaaaagaacttggctcccctctccgaggggagctgtcagcggagctgactgaggggagttgtcatggcggtgaacgtcttgacctcccctcagtcgcctatcggcgacagctcccctcggagaggggagccagctgtatgttctgctacctgcacctaaacgacttactcggcgacttcgatgccttcggacttggcgagttcggcgaggcgctcctcgatctcttcgtaggccgggatgatgctgccgagaccacggcggaacaggtccttgtcaaggtgctcgaccttgccggagtggtccttctggtcccacagacggcaggaatccggggtgatctcgtcggccaacagcagcgtgccgtcggtggcgcggcccatttcgatcttgaagtcgaccagcttgacgtcgatcttggcgaagatctcgatcagggcctcgttgatcttgcgggccagcggggcgatctcggcgagatcctcgcgagtgcatacgtcgagggccaccaggtcatcgtcgttgacgaacggatcgtgcagatcgtcgttcttcaggaagtactcaagcaccggctccttgagcggcaggccttcctccacgcccagacgggagcagaagtggccggcggccacgttgcgcagcacgatctccaacgggaacatgttcaccttgcgtaccagctggccggtgtcgttcactcgcttgatgagatggctgtcgatgccgcgcttcttgagcaggtcgaagatgatggtggtgatgaggttgttcaggcggcccttgccggtgaagtcttccttcttttcaccatcgccagcggtggcggtgttcttgtattcgacccacagaacctctggatcgtcggttgcgtacagttgcttggccttgccctcgtagagcttttccagcttctccatgactcacctttcaggagtggaatttctgggtgaactaacggtaaaagggtaccaatcgagggctacaacaacactcggcatgacgctacgatgcggccagcgcatcatatgtcgcctcatcgaacggccatacgctgttgggatggcggaggcggacggtattggtccgacaatcgactcattgccggtcgcatagtcgttcggcgtgacagtatctacgcaagcgcgcggacactcagatgttcgtcaatagacaaaacgtgagtgtacggccgcgcacgcacgataatgggagtgacgaaatggtgcaaggaggttcgtcatgatcgatcatattggtttgtttgtttccgacgccgcacagtacgcggatttctacgagaagctgctggccccgctgggttacgtcaagaaagtggcgtacccgaccgccgtgtgctttgccaatgacgaggatggcgacagcgtttggctggagtctccgaaggacggcaacccggtggtgccgtctcatgtggcgttccgcgccaaggatgaggacgccgtcaaggcgttccatgaggccggtctcgcctctggcggtaccgacaacggcgctccgggcccgcgcccgaactatggccccacgtattacgccgcgttcatccacgacccggacggcaataatattgaggccatgctgagctgatcaggccgtggactactccacggtaatcgtcaacgcatcggccacacggccggccttggcacgggcgtcggcttcggactcgccgacggccagtgccacggccatgcggcggtggccatgcacttcgggcttggcaaaaatgcgcaggtccgtgccgggttcggccagagcagcggccacatcggtgaactcggcctcaccgtcgccggccaccacaatcgcatggcttgccgccaccgagccggccggaatcgtgagcgccacatgctcgggggtgatcggcaggccgagaatcgcgcgggcgtgcagcgcgaactcgctcagacgctgggaggtcatcgtcaccataccggtatcgtgcggacggggggagacctcgttgaacagaatcgagccgtcggtgagcacgaacagctccacgccgaatacgccccaaccggtttcgccggtcgcctgagccttggccaccaagccttcaacggcggtacgtgcgatgtcgcgcgcccgctcggcctcaccatcgggcacggtagccggctgccaggactcgcggtaatcgccggactcctgacgttggccgatcggcgcgcacgtcacaatgccggcggacgaagaaacggtcagtaccgtcagctcacgctccagcggggcaagcgcctcaacgatcacgcgcgacacatcgccctcatcggcggcgcggcggccctcctgcgcttcggtccaagcggcatcgatggcgtcggcggaacgcaccaccgactggccgtgaccagacgagctcatcaccggcttgaccacgcacggatagccgacttccgaagctccggcgcgcagctcttccagcgagccggcaaaacgatacggtgtagtcggcaagcccaattcttcgtgggccagtacgcgcaggcgctcgcggtccatgcagatcgcggcgatttcggcgctcggcaccacctgggcgcccgcggccgcagcaccggccagcacatcggtggcgatggcctctacctcgggcacgatgatgtccggcttgatttcatcgaacaatgcctgcaattcggcggcattcgccatatccaacgcgcggtattcatgcgccacctgctgggccggagcgccggcatagcagtcagcagcacacacccatgcgcccagtcgcatgagttcaagtgtgacctccttgcccagctcgccagcgcccaaaaacagcacacgggtggggtgcttgcccagcggtgtgcccagcgggtggttggctgcgcgagttgcgggggggacggcggaagtctcagcggaggttgcgggagaggaggcggaagtcacggcagtattcacggcgttctcagtcatacccacattctgccatgacgcgatgatttcggtatgtcgcgtgagcggagtgcctcgcgcggcaaaattacgggcggaatatccggcttcatggggcggtaaattccccatggggcggtaatgagtccatggggcggtttgttggttttgtgaaaccgcggaattaagccgttttgccttaccgccccatgggaatttcaccgccccatggggtaaataccgccccatgggcaggttgccgccccatgaagattcagatgcccgtaacccgccataaatactgcgtatagacacgccattgcgtgtgtaacagagccgtcgtaccttagcaattaccggccgatgaagtatggggcggtcgggccaacattttgggatgcgacatatagcgaatagcggcgtgtcggttccggcgtttcaggctacaagccggcacgctggcaatagtcgaagtacttaacgattccgcctatgcggggctcgaattcggtgacgtacgctcgctgagcctgctggagactccgggcgcgctggacgtggcgctggaacttggctcgctgtccaaaatgtatatggtggccggctggcgcggtggcatggcgattccgccgcattcgtggattggctgctcaacacggccggcgtggcgctgatgccgggggtctgcttcggtcaggtgggcgaaggctgggtgcgcatcagtctgctcaagcacaccgccgagttgttccaggtcgtggcccgcgtcgatcgtgcgctgcgaagcgcgtgattcaatattgggcaaaatgcggcagcccataccatttccggcctatccaagcagcgcggccgacgctattgccgcgcggtggtttaggatgaggcaatgcgcgaaaacgggattgaagagagcattgatcgtccgctgactatcgctcttgtggtcgatacggtgggcaatcagggcaacggcacctccaattcggccttgcaatgggctgcggaattggagcggcaaggccatcatgtgaggcttgtcggtataggggcgcccgaatatccggcgcgcgtgaataaggtgccgctcgtctcgtgggtggccgccaagcagctcatgcaattcgccgaacccagcgacacgttgttccgcaccgccttccaaggcgtggatgtggtgcatatctatatgccgttcaaattcggccgtcgtgccgctaaagtcgcccaccaaatgggcattcccgtgactgccggattccacctgcagccggagaacgtgctgtattcggccggcccgctacgtcgcattcccggtatttccagcttcctgtactggctgttcaagcactggctgtacaagcacattgaccacatccatgtgcccaccgaaatgaccgcgagcctgttgcgcgcgcacgggtataaagccaagttgcacgtgatttccaatggttattcaccggtgtattcgccgaagaagccggccgatccggatgcctcggctcccgtgccgttccgtgtcgtcgcttccggccgactggccagcgagaaagatcagattacgctgatcaaggcggtgtcgatgtcccggcacgccggcgatattcagctggtgatcgccggcacggggccgctcaagcagtatctcaagttccgcgccgggcgtttgctggcgcgcaaggccgatatcggattccacaagcacgccgatatgcccgatttgttgcgttcgggcgatttgttcgtgcattgttcgattgccgacatcgaatcggtgagcgtgatcgaggcgatggcgtgcggattggtaccggtgatcgccgcgtccgaactgtcggcggccggccagttcgcgctgatcgacgagtcgttgttccccgtgcgggacgcggccctgctggcccgacgcatcgattggtggatcgcacatcaggccgagcgcgccgaatggggcgagaaatacgccgaatacaccaaggcgcattattccgtggaagcctcggtccacaagttcgtggatatggaacgcaaggcgatgggggagtaggagccttctcgtttgcggagaggttttccctcagtccgcctgcggcggccagctccctcatcggcgggagctacgaaaaaacctccctctggtgagggaggtggcatcgcgaagcgatgacggagggagagattagcgaagggttttacaacacctcaataagctgatcgacctcttcaggcgtggtggcccagctggtgcagatgcgcatcacggtatgcgtgtcgtcggccttctcggtgaagccgagcttgacctcgcgctccagacggtcgatggtcggctgatccatcgtcacgaaaatctggttggtgggcgcttcgaaagtgagcatgtagcccttggcgcgcagggcctcgcgaatacgatcggccgcctcattggcgctgcgggcaatcttgaaatacaggttgtcggtgaataaggcgtcaaactgcgcgcccagcacgaagcccttggccagcaaggcgccgtgctgcttgatgcgggtcaggaagtgcttcggcgtgttgtgcttggtaaacaccacggcctcgccgaacagcgcacccaccttggtaccgccgatgtagaacacgtcggcgatggtcgccagatccgtgagcgtcatgtcggaaccagtggcggtcagcgcgtagccgagtcgcgcgccatccacgaacagcggcatatcgtacttatgcgccacatcggcgatggcctgcagttcggctttggagtagatcgtgccgtattcggtgctttgcgagacgtacacggatccagggaacaccatgtgctcgtagttgccgtccgcatagaaggtcttgcagaactcgtccagttcggttggatccattttgccgttgtgttggggaatcgtaagcaccttgtggccggagaactcgatggcgccggcctcgtgcacgttcggatggccggaggcgaccgcgaccacgcctgcatacgccggagtgatggtgtcgatgacgacctggttggtctgcgtgccgccgacgaggaaccacacatccgcgtccggctggccgcaggcctcgcggatcttggccttggcctgatcgctcagttcgtcggacccgtagcccgaatacagatggttgttggcttcagccacggcttcaagcactgcgggatgggcggcgcgggagtaatcgttctcaaaagacagcatgacggaccttttgtccttgtgttagatgaattggatatgcccgagtgtacaacgtggcggttcccggcaggagcggggaattcatggagaaaaacaaaacccttccgcgaacggaagggttttactggggtggccaacgcggctcgaacgcgcgaccttctgaaccacaatcagatgctctaccaactgagctatggccaccatagtgtcgtattcagcaagctgaattcgcacaacaggtgaatactatacacaactttgcggatgtgtgctcatcggtgtgtcgcgatggaatcaagtggttggtttcattcttggggccaggctgtgggctgtctcaaatggtgggatgtggacgagtgggtcttgtgtgacgattgatgaaaagtcagggcacacaacggcgtgatggtgcgactggggattgcagagatgattacgtgagcgttcacaatgtgagcattatgtttcatatcaaccgcgacccgcctagtttcatgcgatgttacctacaccgaacaagggaagagaaacaccatggaaaaggttaaagcctttgcagattggctgaccaagtggtttacggtcatcgtcatcgtctgggccgtcttcaactacttcgtgccggccgccagcctgtggggcaaggcgtacaccggctacatgctgggcatcgtgctgttcggcatggggctgaccctgacgctggacgatttcaagcgcatcctcacccagccgatgatggtcatcgtcggcacggtggcccacttcgtcatcatgccgctcgtcgccgtggccctgtgcgcgatcttccacctgtccggcccgctggccgtgggcgtgattctcgtcggctgctgcccgtccggcacctcctccaacgtgatgagctacctgtcccgtggtgatgtggccctcgatgtctccatcggcatcctctccaccctgtgcgccccgttcatgattccgctgctgatgcagctgctggcctcccagtatgtgagcgtgccggtcgaatccctgttccttaacgccgtcaaggtggtgctcttcccgattgccctcggtgtgatctgccacatggtcttcggcaagaagatcgagaaggtcacggtcgccctgccgatcgtctcccaggtggccatcctgctgatcatcggtgtggtcgtcgccgccaacggtccgaagctgttcgtggccagctctctgatggccatcccggtggtcatcctgcataatctgtgcggctactcgctgggcttcggcttctcgaagctgatgtacaggatctacccgaagggcttccgctacgcgcagcagaaggccatcacgttcgaggtcggcatgcaggactccgccctgggcgccacgctggccctgacctccttcgcgtccaacccgctcgccgccgtgccgtccacgttcttctccgtgtggcacaacatctccggctccatcctgtccagctggtggcgcaaccatgacgaccggcacgagattcattgggattctgacaacggcgagaagggctccgccaagagcaccgtttcagtggcccacccgttcgacgccgacaaggccgccaaggtcgctgcctgaaatcctgagatggtgagaaaggtcgggtaaggtacgactccagtcagtcggtcactcacctttcctacctcgcataacatagccgctcccgcttactcccgattaatgtatcgggcgtttcgcgagggcggttttgctataattagtaatgcagaaagcggcaaggtgatacggcaaagaggccgggtcgctagaggttcccatcggatatggaagagcacgaggatgtgctggaaacagataacacagaagcggcatgtggtgaaaagaaacataatgtaacctccttggcggtgcccccgtgtgacatagtctccgcgggggcacctgctgtgtggcgttcgcttttttgcgacgcattcccgggaatattgcgttgggagggcgtgtgtgcgtgtgttgtgcgacgcattcccgggaatgttgcgttgggaggaggggagaagtacagggcgcggattgtcccaagctagtgagtcgaggcccggcgcgtcgttgtccggcggaatcgtagtatagatattcgtgtgtgccagcagcacgccttatgtaacaggcgagcatgctgggatatccttcaaaccgctgatcgcacgtagtaatgcgccgacgggaggggcgaaggccatcgggccggtggactgggctatcttttccgattcgtcgggtgtcgccaacaggcagatgccaagcgagtgtgctgaaaagtgtgggcgcagtgcggcggtcacacaaaagcaagagaaaccactgaatcggagaattcaagttgcctactattgaacagctcgtccgtaagggacgtcaggcaaagccgaagaagtccaagactttggccctgaagggcagcccgctgcgtcgcggcgtgtgcacccgtgtctacaccaccaccccgaagaagccgaactcggctctgcgtaaggtcgctcgtgtgcgcctgtcctcgggcatcgaagtcaccgcctacattccgggcgagggccacaacctgcaggagcactccatcgtgctcgtgcgcggcggccgtgtgaaggatctcccgggtgtgcgttaccacatcgtgcgtggcgcgctcgatacccagggtgtcaaggaccgtaagcagggtcgttccctgtatggagcaaagaaggcgaagtaagagatatgtcacgtaagggaccttccaagaagcacgtcgtgctgcccgatccgatctacggttccaccgtggtggcgcagctcatcaacaagattctgcttgacggcaagaagtcgatcgccgaagacatcgtctactccgcgctcgatatggtcaaggagaagtccgaccaggaaccggtggccgtgctcaagcgcgccctggacaacatccgtccgtccctcgaggttcgctcccgccgtgtcggtggcgctacctaccaggtgccggtcgaggtcaagccgaaccgcgccaacaccctgtcgctgcgctggctgaccgatttctcccgcgcccgtcgtgagaagaccatggccgagcgtctcgccaacgagatcctggatgcctccaacggcctcggtgcttctgtcaagcgccgcgaggatactcataagatggcggaggctaacaaggccttcgcgcattaccgctggtaatcactcgccctgagtaaaactaaggaaaaagatggctgaagagatttcggacctccacgacgtccgcaatatcggcatcatggcccacatcgatgccggcaagaccaccactaccgagcgtattctgttctacaccggtaagaactacaagatcggcgagacccacgacggcgcctccaccatggacttcatggcgcaggagcaggaacgtggtatcaccatccagtccgctgctaccacctgcttctggagccgtcagtcccacgacaccaaggacaagttccagatcaacatcatcgatacccctggccacgtggacttcacggccgaggtggagcgctccctgcgtgtgctcgatggtgccgttgccgtgttcgacggcaaggaaggcgtggagccgcagtccgagaccgtgtggcgtcaggccgacaagtacggcgttccgcgtatctgcttcatcaacaagatggacaagctgggcgcgaacttctactactccgtcgacaccatcaaggagaagctgggtgccgctccgatcgtgatgcagctgccgatcggttccgagaacgacttcactggcgttgtcgatctggttgagatgcaggcctacgtgtggaacggcaccgaggagctcggcgccaagtacgacaccaccgagatcccggacgatctcaaggacaaggcccaggagtaccacgagaagctcgtggaagccgccgccgaagccgacgacgaactcatgaacaagttcttcgaggacggcgacctgtccaaggaagacatccgcgctggcgtgcgcaagctcaccatcgccaaggaagccttcccggtcttctgtggttccgccttcaaggacaagggcgttcagccgatgctggacggtgtcgtcgactacctgccgtcccccgaggatgtgccggccatcaagggctacaagcccggcgacgagtccgtcgagatcgaccgtcacccggtcaagtccgatccgttcgcggctctggtcttcaagatctccacccacccgttctacggcaagctcgtgttcgtgcgcgtctactccggctccgtcgtgccgggcgactccgtgctcgactccacccgcgagaagaaggaacgtatcggcaagatcttccagatgcacgccgataaggaaaacccgatggaccgcgccgacgccggtaacatctacaccttcgtgggcctgaagaacgtcaccaccggcgacaccctgtgctccatcaacgacccgatcaccctcgactccatgaccttcccggatccggtgatccaggtggccgtcgagccgaagaccaaggccgatcaggagaagatgggcatcgccctgtccaagctggccgaagaggatccgaccttccaggtcacgaccgacgaagagtccggccagaccctgatctccggcatgggcgagctccagctcgacatcatcgtcgaccgtatgcgtcgtgaattcaaggtcgagtgcaaccagggcaagccgcaggtcgcctaccgcgagaccatccgcaaggccgtcatggaccagggctacacccacaagaagcagaccggtggttccggccagttcgcaaaggtcctgatgaacttcgagccgctcgacaccaccgagggcaagaccttcgagttcgagaacaaggtcaccggcggccacatctccgccgaattcatcggccccatcgaggccggtgtcaaggaggccatggagtccggtgttctcgccggcttcccggtcgtgggcgtcaaggccaccgtcaccgacggccagatgcacccggtcgattcctccgaaatggccttcaagctcgcaggttccatgtgcttcaaggaagctgccccgaaggccaagccggtcattctcgaaccgatcatgaaggtcgaagtccgtacgccggaagagtacatgggcgaagtcatcggcgatctgaaccagcgccgtggcaacatccagtccatgaccgacggtgtcggcgtcaaggtcatcgacgccaaggtcccgctgtccgagatgttcggctacatcggcgacctgcgttccaagacccagggccgcgccatgttcaccatggagatggactcctacgacgaggtgccgaagagcgtctccgaggagatcatcaaggcccagcgcggcgagtgacacgcgccacatcatgaagtggccggtgtctccagtcagcggtaatatcgtataccgctgactgggttctggctcttcaaagtggcacataacccagaaacccagtagaataagcgagtccctgtgcgaaagggcgcaggaaactcacgagacgtccaggaggacaaaagtaatggcaaaggaaaagtacgagcgtactaagccgcacgttaacatcggtaccatcggccacgtcgaccacggtaagactaccctgactgccgccatctccaaggtgctgcacgaggagttcccggatgtcaacccggagtacgacttcaaccagatcgattccgctccggaagaggccgcccgcggtatcaccatcaacatcgcccacatcgagtaccagaccgagaagcgtcactacgctcacgtcgactgcccgggcca

SEQ ID NO: 419 - DNA, 18542 bp, Unknown
  R48_24m  MAG No. k141_11441
cacggtagatgaccgagtagtacttgatctccacgccctcgcgctcggcgaggtccgccacctgacggttcgggcgcacgttgaagccgatgataacggccttgtcgaccgtggccaggttgacatcattctgggtgattgcaccgacgccgcggtggatgacctggatgccgacctcgtcggatacctcgatcttcatcaaggaatcctcgagcgcctcgaccgaaccggacgaatcgcccttgatgacaatattgagcatgtcgatctcggactcggcgaacttcttcttgaagtcctcgagggagacgaccttgcgacgcttggccagctgggcggcacgctcggtggcctgacgcttctcggcgatctggcgagcggcacgatcatcggaggcgaccaggaagaggtcaccggcggtcggcacggaggtcaagcccagcacctgaacaggtgtggacggaccggccgcttccatcggctgaccgttctcgtcgagcatggcacgcacgcggccgtacgaagtgccggccacgatggcatcgcccacgtggagcgtaccctgctgaaccagcacggtggccacggcaccacgacccttgtcgagtcgggcttcgacggtggcaccacgggcgtccatgtcggggttggcgcggaggtccagctcagcgtcagccgtgagcagcacggcttcgagcagcttgtcgacgtgcaggttctgcttggcggagatgtcgacgaacatggtgtcgccaccatactcttcagggatcaggccgaactcggtgagctggccgcggaccttctccgggttggcaccgggcacatcgatcttgttgacggccacgacgatcggcaccttggcggcctgagcgtggttgatggcctcaacggtctggggcatcacaccatcgtcggcggcgaccacgaggatcgcgacgtcggtgagctcggcaccacgggcacgcatggcggtgaacgcctcgtggccaggggtatcgaggaaggtgatcttgcgcggttcgccttcaaggttcacggtgacttggtaggcaccgatgcgctgggtaatgccgccggcctcacgtgcgatgacgttggtcttgcggatggtatccagcagtcgtgtcttaccgtggtcgacgtggcccatgacggtgacgaccggcgggcgaggcttgagatcctcgtcatcctgcagttcttcctcgtcaaggttgatgtcgaactgctggagcagttccttgtcttcctcttctgcggagacgagctggatgttccagccgatctcttcgcccagaatctggaaggtctcctcatccaaggactgggtggcggtagccatctgacccagatggaagagcacggtgaccagcgcggcctgattgacgttgatcttctccgccagatcggccagggaagcgccctgacgcagacggatggtctgaccgttgccgttggggatgcgaacgccgccgatggtcggtgccttcagctcctcatactcatggcgctttgccaggcggttcttacgggccttcgaggacttaccgccctgacgtccgaatgcacctgcggcaccgccgcgaccgccgcgaccgccgccacgtgcgggaccgttgctcggtgcgccgccgccctggaagttattgccgccgccttggcccccacggaagccgccgcgtgcgccgccctgaccggcaccctgggagccgccgccctggcccggacggttgtggccccactggccgggacgaggaccgccctgaccaccttggcccggacgaccgccacggaagccgcggccctgcccctggccttggccgggacggcccggacgaccgccacgaccgctatcagcagtcggacgagccatcggatgcggacgcggaatatcacccggcgtcggggtgtgcataccctgcttgcgggagaacgggttgttgcccgggcgcgggccctgagcgtgcgggcgcggaatcgcgtttgaagcggcattgccgccattggcaccggcgccgccctgagcgtgcgggcgcggagccgaagcattgtcgcggttgttctgatgctgccccggctggccattgttcggacggccctggttgttacgacgatcgttgttacggcgatcgttcgggcgactctgacgaccgttctcgcggccttcgcgattatcgcgaccattctcacggttgtcgtgctgaccgtggcggccgggggtcggcatgccggggcgtgcgccgccctgcggacgcggtgtcggtgcgcccggagtcggagcctgctgatgtgccgaggcgggcgatgcctgacgtgcgggagcggccggagtcggtgcggaagatgaagtggaagccggggccgaaggtgcggccgggcggcgctgctgcacgggcttggcagcaggcttttgtacggaagatgcgggcttggaatcgcccttggcgttgtccttggcgaactctgccttcagacgccgggctaccggcggttcaatcgtagaagaagcggacttgacgaattctcccatgtccttaagcttctcaagcacggttttgctatcgacattcaaaaccttagccagttcgtatacgcgtggtttcgccactaattactcctattctgtgaccacgcgcgtgcatgggcgtggtcagttggtgatgacggcaagcctaccctgtctcatcgtgcgaccatgatcgtgttacctcgtctctggtgtgggcgatttcgcgcacactgcaccagcccacatacgccaatcaagcatactcatagcgctggatagcgtagacgcagcgagccgcgccattgctgacgcggctcgtatcaggaaataatgcgccctgaagatcattcgccttcgagcccggcggcctattcggcttccggagcagcagcctcggccgcagcctgggcggccttttcagcggcgaccttcttggcatgggcctcggcggattcgatgccgatcttccagccggtcagcttggctgccagtcgtgcgttctggccttccttgccgatggccagggatagctggtcgtcgtggatgaaggcgatggcggtcttgttcttctcgctgatcacctgtacgccggtggccacagccggggacagcgcggctgccacgaacttggccggatcgtcggagtagtcgacgatgtcgatcttctccgggccaaggttctccataacggcacgcacgcgagcgccgccggggccgatcagcgcacccttcgggttcacaccatcggtgttggccttgaccgcgatcttggtgcgggcgccggcctcacgagcgatggccatgatggacacggcaccggagaccagttccggcacttcacgctcgaacagcttgcggaccagctccgggtgggagcgggacaccacgatttccgggcccttgatgccacgggccacgttcaccacgtacacgcggatgcgttcgccgtggcggtaacgttcgccgggcacctgctcacggcgaggcagaatggcttcgacatcgcccatcgcgacatgcacgttggaggggtcggaagcatcctgttggatgatgccggtgatgagcttgcccttctgaccggagaacgcgccaaataccttctcatcttcggcgcggcggaacagctgggtgatgacctggcgtgcagtggcggcggcgagacggccgaagtcacgcggggtgtcgtcgtattcctcgcccagcttgggagcggggtgcgggtcgtcctcggtgggctcgaccgggatttcgtcggcggcccagacggtgaagttgccggaacgttcgtcaagctccacacgcgcgtgcctggcggcgtgcggggtcttgaggtaggcgaggcgcagggcctctgccagcgcatcatccagggttccggggtcgattccttgctcggcggcgagcttgtgtattcctgtcaggtccagttccatcgatccgtacctcctatgaagttatgtggcgcatggcctatgagtggtcacagttagctattagtgtaggtttccatgcagacacgcttctcttcaggacggtttacccggcgcttggcatccgcactatgcgcgagcgcgatgctgtgttcgctttcggcgtgttcgatgccgcgactggccggacgggccgaggcggaagctcaaatgagcccttgcgagaaagcgatgacgttggcggactacgccacccatccggctgaaggcacgccgttattagagcagtatgccaccggcctggccgctcccctgacttggattgacgttgccgggtattgttcgggtcgttttgccgagggaacgttacgtgacgcgcagaccaagcaatggctggcttttctggccgataaattcgggcagtccgcgcctgaggtgacgccggcgcgtcttgatggcgtcacgtccgccaacgttgaccgaccggtattggatgcgatggccgtggccgaggatcgcgccggattcgctatcgaggtcttggccgcacgaggacagaccgctggggctacgttggcgttgagcgatatgcataagaccgccgggcagcagctggtgtcgctggcgaacggcaattttgatgattccggcgcacagtccagttcttccggccagagcgacccccgccaaaaggtctatgccatcgaccaactactggccaaccccaccaccatcgccgacaaggcaagcggccagaccgtaccgaccgccgccgccatcgaaatggactgcgcccgcgcgcagatcaaggccgtgaccgaatcgaaatcttccaccgagagcgatacgctgctcatcctcgccgcactggccgccaagcacgcctacaccgcgttccaacttggctacccagcgactgacgccacattgttcgagtagacacacactcctcacgaagccgatgcgaacttgttggatgctagtgggcaagtcgcgttgaggcacgttccaccaatgtgaaatcggtggtgtacgtacgggccgggcctgagtatccttcgatgcggtcgataagcatgtcaacggcatgcttggcataatcgtcgatatgtggatcaatggtggtcagcgccggcgccgagtactcggcttccggcacgttatcgaagccgaccacttgtacatcgtcaggtacacgcaaaccatgtcgttgattgcggcagcgtgaacgacatgcaccaaaggctcgtcaaggcgcggcgcatgatccgcaggcgcatccgggagggccaaccgttcatgttcctcgacgaggggctcgcggcagccggcccagtgccgtccacgaacaacctcgtcgaatcatggaacgcgcgcctgcgcgacatgccgcgccgccaccgcggactgcggctggtcagacggctgaaggcgatctgctggtggtgccaccagcacacggaacggcccgaaagcgacgcgtggctcgcggccaacgcgatgaccgacgaacgactcgagcgcctctaccggcgggcatgggagagaagcccgcagagcatgcacgagacgttcggcattcccatgagacacggcaccggcatcgactggaacgagttccacaccagggtcgaatggcagtcgaacgactagaccgccggacatacattttggcctataaccccgaatacggacgttcgcatcaaaaacaaaaagggttccgggacaaaccccggaaccctaaaggcggataaggcgagattcgaactcgcggaggctttcacctcacacgctttcgaggcgtgctccttagaccgctcggacacttatccatgctgccaaaatggcaacttgttcattatgccacattctgccgacctggcaaatcggagtttcgctgagcaagtctcgagtgtatgccgcttgagacatgtcagatcacaatcccggaattcgcccgaagcgctggcattgcgtttacgcgccaagcactccgacaggaattacatacactccatcatcgcgttgatacgcgaactcgccgacccccaccaacaccgccaagaactccggttcacgggttcgcgcactcggatttctcagcagcttatctttcagtctgcatagatttgccgatgcctcagggactttatcctcactggacttaatttcgatgccgccccaccgtccatcggacaattcaataatggcatcacactccagaccggaatcgtcacgataataccgaaccggttctatcccaatatcgaggagagatctcgcatacaccaacagatcacggatgcatagattctcaaacagaaacccaaaagtctgccaatcgccgataagagcagcaggactcatgcccaacattgcggccgcaatggaaggatcggcaaaataccgacgcgccttggtctggagtcgctttggatcccgtgccggcgggacccagccctttatcggatcgatgacgaacatgttctcgaacatggccgtatacccggataccgttctctccgaaatgaaatcgtcaaggttttcttcagtaccgtacatatccttacgtaaggttttgaatgtcacagcttgactgatattgcgcgcaagcgaatccagcagacgacgagccacatcaggatccttgccttgcctgggcacactctcagtcagcgtgagtcgcatgtattcccgaatcagaatctgtgcgtcagatacaggcagagccaccgcctccggccatccacctcggcatacggcatccaacaacatttgtgtacttatctctgattttgcagcggcgaacttatgttcaaacagtccactgagacttaccgcacctgtcgagagtccggactcatataaagtcagaggattcatacggatacgtccgattcgtcccgcaccactatggttcggccgattctcattgagaggagtggatgaaccggtcagaatccactgacctttattcgcggaatcatcgtcgacgcgatgacggacttcatcccatatagctggagcgagttgccactcatccacgatatgaggcctatctcccagcagcatcaatgacggatccgccttagccgcagccaaattgttattgcgatccacataggtaatgctggctgcatgggcccgcgcagaccaagttttcccgcaccacttggtgccggtaatctccaccgcgccaaagatgcgcatatatcgttcgatctgtgcatccacgatacgagggcgataggctttcggcttgatgtcgctcgccagagaatcggccattccgcgcacctcccgttatttcacgtccgccatcgcaataatccgaatttctcaactaccaaaatccgaatgttgcaacgacgaaaatccgaactttctaactacaataatccgaatttctcaactaccaaaatccgaatgttgcaacgacgaaaatccgaatattggtggtggtagaagcggtgacgggaccactctgcattgagcggtctctctcagtctcgctacgctcgacagctcgaacgcaatttaaggacagctttccagctgccattttatttgctcactgtcattcgccttcgcctaaaaacgcctccggcgttttcttcacggctcagctcatcagagggggcttggaattttgtttacgccacctgttcgtggacggaggcattgacccattgggtctgctggacgttgtagccggagaagatgccgatgtcgagcatgcagtcgcggtaatcgcggccgtgggcgatggtgatgtagctgtcgtccaccaatcggttatgcgtgggatccagtccgacccatcggccatcctgatacacctcgacccaagcgtgggtcgcgccctctcccccaagcaaaccggcaatgtagcgcgcggtcaatcccacatgccggcacacggacagcattacatgggcataatcctggcatacgcccttgcgctgggccaaggcctgttcggcggtggtgcgaatcgtggtggaaccgggcgtatacacaaacgccttgtagacctcatccatcacttcggcggcctgctgcaccggagtggcgtcggcaggcaacgcagccaagcgttcgcggcatacgtcgatcatcgcctccacgttcgggccgggaatggtgagcgctgaattgaatcggtacagcggtttataggcttccttatggatatgcgcattgtccacgaaggcgatgccggtcaccgaatagctgaatatgtcgtgcggctcggggatgaatccggtcatcaccacggagccaaaggagtcgatggtggtttcgagttcggtttcgggctgaatcttcacttccacgtcaatcacctgttggcgagggccagtggcgggaatacagcgaagctggaacctgtgatcggtgaccggtgcgctgaaggacagcttcatctcatagtcgaacacgagttttttcacaacgtctcctgcacttacacacgagccggcaaccggcacattctcgggataacgacactacagccatggctgaggtatggtccgcgcgctcacagtccacgcatatattccggcaattcgccgatacgcatcggccggcactcgggcgcacggtttttcgccataccaccatagcatttgaacccgtcagggcgaacgtcgggttaggggcgcttggcatccatgttcatggagctcagtgagcccatgtctttgatggccagggcgctgacacggccggaataatcgtcaaggtacttcttcagcaggtcggcgacttcctgatacccgcgagacggcagctgaccgaccagccagctcagcccatcggcgaagcaactaggcaacggcatgccgtcgaggatcatcgagtaggaggcgagcttcctaagcggggcttccatctcctccatcgtcaggccgaagcgcgtgtacaggtcgatgcgctcaagatacttgccgatgaagatgaacgccttcagcgtggggtcgaccggcgaattctcgatgccgccccagaaggcgagcatgtcatcggtaatatcgcgctgcttgtagatgtcctcggcgtcggccgcgtatttggcggcatcggtgatattggtcatcgccaactccacgtactgcaacagacgcgagctcaattccgggcgcagaatcacggcgttgttgaatgcggaggttacggccgaccgcaccgaatcagggttggacccgtcgtacaggaagctgttcacgaacccgtcgaagtcctcgaaatcttcgggcaggtcgagtgcgtgagcgaacggacggaaggcgtccacatcggtgtccatcacacgatcgtagaacgggaagaactggttcagcgtggtgaaggcgcgctcggtgtaccgacccagccaatacaggttgtctgccttggaggcggtgaccagagacaacgagtggcggcgggactggctcagcaggttcgccacctgcacttcagcaccgtattcatgctccacgccggattcgggtgccaacacccacgtatccttgaatccgccaccctgcgacgagttgacgatcatctggccgggcaccgacgagtatcgagtcaagcccgaataccacacgtgcgtgtttttgccggtgaccacaaaggcacgcaaatcgcatttgcgcggcgacatctcaccggtcttcgggtccaccacatcgatatcgcggaactgaatcacctcttgggcgatgaatcgacgaggctcctccttgatccggttggcaagctcctcacgtgcggcagcatccagcgacgaaccgaacaccacgccgtaaccaccggcttcggccacatccttgatgaccagctcgcccatacgattcaggacttccttacggtcggcctcgaacatcggcatatacgtgggcgcgttgttgagaatcggttcctcgccgagatagtacttgatcatctgcggcacgaagtagtagatggccttgtcatcggccgcgccgttgcccggcgcgttgacgatggccacgttgcccgcgcggtaggcggacaggataccgggcacaccgatcaccgaatcaggattgaaggcaaacggatcgaggaattcgtcggacagacggcggtagaccacgcccacacggtggcgtttgccggcgtagtcgaggaagtagaccttgttgtccaccacttcgaggtcttcggggaaggccagtgcggcgccggttttctccgccagataggcgtgctcgaagaacgcggaattgtagcggccgggggtcagtaccacggcgatgccctcagtggacacaaagtccatggccttgcgcagtaggcgcgggtattcgcgattgtcgcggatgtgcacgtcgcggaacaggcgcggggagatgcggcgctcgatgtcgcgcacgaacagcgggtagctggcgcccgaggggatgcgcaggttgtcttccagcacccaccagcggccatcttcaccctggaccaggtcttcgccggcgatgtgcgcgaagatgccgccgggaggggtcacgccgttgacctgcgggaagtagccggccgaggtgtatacgtattcctccggcacgacgccgtcatggatgatggccttgtcggagtagatgtccttcagataggcgttcagggcgttgacgcgctgcttcaggcccttctccaattcgtcgtattcgtcggattcgataatgcgcggcacgggatcgtacgggaagagccggtcatggtattcgccgttcttgtagatgccgaagcgtacgccgttgcgggacagctcgcggttgatcgcctcgcgacggtttaccagttcatgggccagtctgcgtgctgcggattcgatcatcgtgcctgctccttgctgtggcggcttctgtggcctcaagcggttaggcgtttcgagcgcacgctgacgccgcaagccgtaaccgggtttgatggttacaacctaaggcggccccgtttcagcaaacgcgcgagaatgttacaggcaggtcacttcgccgaccgcactcgtctcgccgaccgcgcgcatctcgccgaccgcactcgttacaatgaatggctatgacacgactgcgcattgacttggcctacgacggcggcggattctatggctgggccaaacagcccaatctgcgtacggtgcaaggcaccattgaagatgcgctgcacaaggtgctgcgggtgccggccgatgatgcggccgaaccgttgcgtctgacggtggctgggcgcaccgacaccggtgtgcacgcctcccaccaagtggcgcatttggatgtatccgatgaggtactgaatcgctgcgtaggtcacatgaccattccggtcaccgaggcgctgactcgcagactcaaggctgtgctgccttcggacatcgtcattcatggcattgccgtggcaccggccggtttcgatgccaggttctccgcattggagcgcacttatgtgtatcgggtcgccgatcgttcgtccgagatcgacccgcgcctgcgtggatgcgtgcttaccgtggatgaatcgctggatctggagcttatgaaccgcgcagcctcattgaccatcggcctgcacgattttggttccttcgccactccgaatccgggaggcactacgatccgcgaagtcaagaccgcctattggcggcgggtgccgatcactcccctggtgccggatgcgatggcatcgcatgaagcatatcggactccgtcgctggagtccggactggcggtgttcacgattgtggcggacgcctttgcccgcaatatggtgcgctccttggtcggctcatgcatcaaagttggttcgggacgcaaatctctggaatggtttgccggcaaaatggccgagccagtgcgtgaaggctcaagcgggccgattgcgccgcagggcctgactttggagcatatcgcataccccgtcgatgatcagctggccgcaagagccgaggccattcgagccgtacgtacgttgtagtttctatgaaacaacgcaaaagggctggaacccaaacggattccagccctttcagctagcttggcgaaacgctattcagctcactcggccttctcggcgtcagcggcttcctcagcgggagcctcagcctcagcggcggcggtctcctcgaccggagcctcagcggcctcagcctcaacggccggagcctcttcttcggcaaccttggcggcggcttcagcttccttcacaacagccttcttggcaaccggctcggtgacgagctcgatcacagcggccggagcggcatcgccaacgcgcggggcgatcttgacgatacgggtgtagccaccttcacgctgctccatctgctcggcaatctgggtgaacagaatgtgcaccacggacttgttgcggatgacgcgcatcacgcgacgacgggagtgcagatcaccgcgcttggcgaaggtgatcaggcgctcggccagcggacgaaggcgcttggccttcggcagcgtggtggtgatgcggccgttctggaacaggctggtcgccatgtttgccagcatgaggcgctcgtgtgcggggctggaagccagacgcgggcccttcttaggtgtaggcattgggtttactccttatatgtccgttcttcaggcaagcaggtgggcatatgcccgaacatccgcttgcctagtgaacgaacgattggtcaaagaggcagatcactcgtcttccggcgagaagaacgtaccaccttcgagattattggtatcgaaggccatcggcgaggacttgaggctcaggcccagggtctgcagcttctccttgacctcatcgattgacttcataccgaaattgcggatgtcgagcaggtcctgctcggtgtgggagacaagctcaccgatggtgtggatgccctcgcgcttgaggcagttgtaagaacgctgcgtcaggttgaggtcctcgatcggaacggccatctcggggttggtctcctcggccaccggggccggaccgacctcgacgccttcagcctgggcgttgagctcacggcacaggccgaagagctccaccaaggtggaaccggcggaagccaccgcgtcacgcggggagatggcgggcttggtctccacgtccagaatgagcttgtcgaagtccgtgcgctgttccacacgggtggcctcgaccttgtagctcaccttgagtaccggggagtagatggaatcaaccggaatacggccgatctcatcgttgtcctgcttgttcatctgggcaggaacatagccacggccacgctcgacagtgaactcgatctcgagttcgccatcgtcggcgagggtagcgatgtgctgctccggattggcaatagtgacgccggcaggcggggtgatgtccccagccacggcttcgcccttgccgctcttgcgcagatacatgaccacaggctcgtcatattcgctggtgagcacgatgcccttgatgttcagcaggatctcggtgacgtcttcctggacgcccggcagagtggtgaactcatgcagggcaccggaaatacgcacggaggtcacggcagcacccgggatggagctcagcagcgtgcgacgcagcgagttgccgagcgtgtagccgaagccaggctcgagcggctcgatggtgaagcgggagcgctgcggattcagagattcctcggtaagagtcggacgctgtgcaataagcactgtggttatcctttcagcttgaactcggtggtgcactcaccggtcaggcggttttggatggatttggtattgctgagtgctcagacgcgacgacgcttcggaggacgaacgccgttgtgggcttgcggggtgacgtcggtgatggaaccaacctcgaggcccgcagactgcagggaacggatggcggtctcacgaccggaacccgggcccttgacgaacacgtcgaccttcttgacgccgtgttccatcgccttgcgggcggcggactcggcagccataccagcggcgtacggcgtggacttacgggagcccttgaagccgacatcaccaccggacgcccaggacaccacggcaccggacggatcggtgatcgaaatgatcgtgttgttgaaagtggacttgatgtgagcctggccgaccgggaccgacttgcggtcgcgacgacggggcttacgagcggcttgcttaggcgctgccattgaccctcgtttcctagtaacgaactttgttgttgacgttcgggcgatgggatgaaatcatcccgtggcccgaatcatgccaccgactacttggtggccttcttctttccggcgaccgtgcgcttcgggcccttgcgggtacgagcattggtcttggtgcgctgaccgcgcacaggaagtcccttacggtgacgctggccttggtagcagttgatctgaatcttgcgacgaatatctgcatcgacttcacgacgcaggtcaccctcgatcttgtagttggcttcgaggtagtcacgcagcgtaatcagctgctcgtcggtgagatccttgacgcggatgtccgggctgataccggtcgcggcaagcgtttccttggcacgagtgcgacccacaccgaaaatgtaggtgagggcgatctcgatgcgcttctcattggggatgtcgactccggcaagacgtgccattgcgattccttcttgttgccgtaggtcttgcacccgctcgcccggttacccggcacgggcctacgtacccgtggttcagtgtcgttcccttgcgggaagcactgtgagagagtgccttatttacttagtgccgctggagaatctgctctcagccctgacgctgcttgtggcgcgggttgacgcagatcaccatgacgcggccgtgacggcggatcacgcggcagttttcgcagatcctcttcacgctagggctgaccttcatggttatccttttcttgtgtacctttacttgtaacggtacgtaatgcgtccgcggttcaggtcgtaagggctcatttcgagcacgacacgatcctgcggcagaatacgaatgtagttcttacgcattttgccggaaatcgtggcgagcacgatgtgcttgttctcgagttcaacgcggaacatcgcgttaggcagtgcttccactacctgtccttcgacttcaatcacaccgtcttttgccatgtgcctctagtcctattccgttggatgattactatggcatatccgaagacacaccaactgtcaactatatacgcacatacccctgtacgaacactcggcgtgtcgcacaggggtatggaaacgttgatgtggtatttcggcatcactccggcttgttggccgggctgccgaacctactactcgaggtggctgatgatacggccgctgatctcgtcgatgtcgccgacgccgttgaccacgacgagcaggccacgggattcgtagatgtcgagcagcggagcggtttccttctcgtaggtctccaggcgcttggcgatggcctccggagtgtcgtcagcgcggccctgctcggcggcgcgcttcttcatacgctccagcagcacgtcacgggcggcttcgagggccaccacgtggtcgagcggagtgtcgaggtcggcgagcatctcgtcgagagcggtgacctgggcggcgttacgcgggtagccatcgaggatccagccgttattgcagtcttccttggccagacgatccttgacgatcttgttggtcagggagtcaggaaccagctcgcccttgtcggtgtagctcatcgcctcaagaccgagttcggtcttgttcttgatgttgtagcggaagatgtcgccggtggagatggtggggatgttgaagtgctcggcgagcagagcagcctgggtgcccttgcccacgccctgggggcccatgatgagcagacgcatggtggtctccttttgtgtcggttattaatacggttttggctcccttggttaggggagccattgagttatatgtggaagaaagattgctccgtcgtggaactcctcgcgcggccgcctgcccattgcgggcgaccgctgccaagcgggcgtcagccttctttgtggtccacgttttcgaacaggaagccggtgtactggaactgttcggtctgggccttggcctgacgcagggtgtcgaggcccacgcccgcgatgatcaggatcgtggtgccaccgaacggcagcttggcgttgagtccgagggccatgatcagcacggtcggaatcagggccacgaacagcaggtagacggcaccgacggtgttgagtcggttcatcacgtaggtcaggtagcggctggtggcgttgccggcgcggatgccggggatgaagccgccgtactgcttcatgttgtccgcggtctcgtccgggttgaacgtgatcgaggtgtagaagaagcagaagaacacgatcatcagcgcgtacagggcgatgtaccacacggatgtggtgttcgccaggttggcgttgatccacttgacccaggactggtcggacttgccgaactgggcgatcagggtcgggatggcgaggatcgaggaggcgaagatcggcgggatgacgccggacatgttgatcttcagcggcaggtaggtggaggagccgccgtacatcttacggccgatcatgcggcgcgtgtactgcaccgggacgcggcgctggcacagttcgacgaagtcgacgaagatgaggatgaccacgagcacgcccacgacgatgccgaacttggtccagtcgccgttcttgccgttggtgccgtagccgatctcccacaactgcggcaggaagccggagcagatggacatgaagatcaagatggacatgccctggccgatgcccttgtcggtcacgagctcggccatccacatgatcaggccggtgccgccggtcatgatgaggaccatgaccacgaggttccacacggagccgtccgggatgacctggtcgcagcggtagttgaacagggcaccggagcgggcggtgaccaggatggtggtggactgcagcacggccaggccgatggtcaggtaacgcgtgtactgggtgagcttggcctctccggactggccctccttatgcagggcctcgaagcgcgggatgaccacgcgcagcagctgcaccacgatggacgcggtgatgtacggcatgacgcccagcgcgaagatagacagctggagcatagcgccaccggagaagaggttcaccagtccgatgaagttctcctgggaggcgctgccgacagtggccatgcacttgttcaccacgttgtagtccacgccaggggtcggaatgaacgaaccgatgcggtagacgatgatgatgaacaggacgaagagaatcttcttcctcaactctttggtcttcagggcctggattagtgtcctcacctagatttcctcccaatagcgcgccaatcacgcgaaatacacaaactaacgaatgagcatagtctacagtgcctacttcggccacttcatgtctcgcgaatgttatctgaattatgctccgtcgtactgaacgggggaagcatactcaaaacgatcattgtgttgagactgcttctctgcgctcagaacaacaatttttgagaaaagggaacccccgtccacctattggcgggcgggggttgtacagcctattgcgctccccgtaggactaatcagtcctcggaaacggaaccgccggcggcctcgatcttggacttggcggaagccgaagccttaacacccttgagggtgaaagccacggtggtctcgccgtcgcccagaaccttcaccggagcgttgtcacgaacagcgcccttggcgatcaggtcggtcacagcaacctcgccaccctcggggaagagctccacgagacgagcgatgttgatgacctggaactcgaccttgaacgggttcttgaagccacgaagcttcggcaggcgcatgtacagcggcagctggccgccttcaaagcccggacgcacgtggttacgcttcgtctggcccttggcgccacgaccggaggtcttacccttggagccttcaccgcggcccacacgggtgcggtccttcttggcacccggggcgggcttcaggtcgtgcatctgcaggatttcgttatctgccataatcagtcaacctcctcaacggtgaccaggtgacgcacggcgttcaccagaccacggttggccggggtgtcctcgcggacaacggtcttaccgatcttgttgaggccgagggtcttgacggtggcgcgctgagccggggtacggttcacgatgccgtggtgcagggtaatcttcaggttcttagccatgagtatcactcaccatccttctcttcggcggccttagcggcagcagcctcttcgcgagccttgcgagcctcggcaatgccggcggcacgggcgcgcagcagagcatcgggagcaacctcgtcgagcgccaggccacgacgggcggcgatctcctcgggctcttcgagctgcttgagggcgtcgacggtagcgcgcaccacattaacggcggtggcggagcccatcgacttggtcaggacgtcggtgatgcctgcgcattccatgacggcgcgcacggagccaccggcgattacaccggtacccggggcggccggacgcagcaggacggtgccagcagcgtcg

SEQ ID NO: 420 - DNA, 19782 bp, Unknown
  R48_24m  MAG No. k141_11461
attgatcgggctgaacgtgccaagctggtaccaacgggcttccagatgttcgttacgatagccacacatatgaccgccaatatcgtgactccaccatccgtagccgatattcgacgcggtagcagtgaaatacggctggaattgcaaggattcccacgtaacaatggtgtctcccgagaagccaactgggtagcggtgcgaacccgggccggcataccgcgagaaggtgagcggccaacgattattacgttccgcgcaactcacgttacgtttggattgctcgatatgcatttcatgttcatcgcgagcgcccggctcagcgcacttttcgcattcgcagttttcccctgcgttgcgttcggaagaagtcgcgccgcgcccggaatccaggtagtgcaagtggttgagcacccacagcgggtcgagtcccggctgacgggtcacgccgccctgctgccagtcgagccaccagaagtcaacaccttcggcttccatgcgatgatgcatgtcgaagtaggcgcttacgaaatccgggttcgtcaggtcgaattccaccgcctcttcggttgcgggatcgatgccgacgcgcttggccaccgccgcatagtcgtcttcgaacgcgcgcacgccgtctcgcggatgcacgttcaacgtggctttcaggccgcgctcgtgcaagtcgcgtaagaacgcctcgtgatcggggaacagctgcttgttccacgaatagccggtccaaccggaaccgtatttcggatcgacatcgtccacgcggtgccagtccatgtcgatcacggatgtggtgaatggaatgccttcacgcttgaaccggtccatgagctgcaggtattcgtcttgcgtgtagcggtagtagcggctccaccagttgccgagtgcgaagcgcggcagcagaggcgttggtccggtcagcttgtagaagtcttgtaccgcttcggtgtagcggcggccgtagccgaagaagtacaagtcggtttccttgtgatcgcgcggtttcacccaagcccccagcggattcgacttgccatccacttcgtgtgcttccacgatcacgtttgcggcggaatcgtcgagtaccgcccatccgtctcgcgaaatcacaccatcgtccagaggaatttcgccgttcgcctcgtcgagcgtgcgcgcggtgcctttgagattatgcttcggctcgtcgccgtaatgccacgtattgaactgggcgtcggccacgcccttgacgaccacgcttaagccttctttgctgaacggcttgccatcgtacgtcacatacaatgcgggggtgtccacaatgagcagtccgtcgcgatgcgtcaccgtgaattgcgggtcggcgccaaaatcgcggttgactaccatttgcgtgagattgtcttcaaattcgccggagtctgaccattcgaagcggatcagcgattccgttagaatgccaatcctccaatgctctccctgcaggatcgacgcttctcgcatattcggccgtgccttgcgcacatacctcacaaacggcccatccgttgcgttcgcagcgtcgttcgccgcatcgttcatcacactcgcagtaccgttcgcggcactgttcacagcgtcattcaccgcgctctctgcatccgttccgatgtctgacataatagctccttacgtttctgccataatagcgcgccctgcaaaagacccacgtgcgacttttcttacgccgttcaatgtacttttcttcacacgcatgtacttttaatcgcctaaagcaccgatgcgaatcaaacacaccaatgttcgcaccgtcaacggcatacgccaagccaaatagcacggactcaatccaaaccactaacatcagtagtttggcggatactcgcacgcatagccgtcgccgtccgcatcaagtttggaacggtattccagatcgttcctggttatgccatgccccaatgcgtcccagacagctttgcaattcttgtaatatgtgccgccagcactgccgcctgaagccgaatttcctgaatatgttgacgattcctcagtgttcgttaggatggcctcgtgagacttcttggcaatattctgtggctgattttgggtggtctgtttctggctgcgagctgggccgttatagggctggtgctgtgcgtcaccatcatcggcattccattgggagtgcaggcgttcaaaatggcgggtttaacgctgaccccgttcggcaaaaccgtagtgtatggcggcggtgcgggatcggtgctggccaatattgtatggtttgtgttggctggcatatggatggcgattggctacatacttgccggtctgctgaactgcgtcaccatcattggtattccgttcggcattcaatcgttcaagatggccaaattagtgctatggccgttcgactcgcaaatccgcaacttgtaaattacttcaaatcacttcatccagcatagacggccatcgactgccgtcttgcatataagtatcgaggagctgcggtccgaacaggaactgcggacgaccaccgccccacaccgagctttcattgatgtactgccggtacatgaggtgcgcgaaatagtcggtcaacggtttgatatgcagatggatggatagccattgcaccacgcccacgccgaaggagaaccagtaagaagcgatgagaatccgcaatggcgtacgccatggaatgcgtttgatgccgaacgcaatggcgatcgcacccaaagtggcgagcacgcccagcaatccggtaatgctcatgaatgcaacgttgaggtggatgccgaatttcagccatcccgggatagacaggattatgcaggccaccggcaggaggaacattggcaggtatcggttggctgcgatgcgcagttgacgtcaattgcataggcagtacacggcgaatagcgccggactgatcggcgaccagaacggcgcgtacaggccgagcgtggtgccgttcaccggaagaaaagcgatggccagcagcagccaaatgacgttgcgttcctgcgttgtcagaaattgcaggaacggccggtattgcggtcggccatgatggttgcccacgtcgatggtgtcgttgtgtacgcatgcttggttcatgtggttccccctccccgtccaccttactcgttcatcatgatatatggattccacccgttgttcatttgtaagcgcaacgccttcgtcaggcttgtaggtctggcggttcgtcggcgaatggctcggcgggcgtgcggtagccgagtactcgcatgggccggtcgaccttgtgctgcacgggccggcgatgtagtgcctgcccctgctgggcacctttatttaatcgcatacatgccaggcaacattatgcttgctcacgcccagagtcagactcatcttcattgacatcttccataatgatttgattgaaacacactttcaacgcgtgttcaaggttaaggcagaggtagcttagcgacgttcgcagatggcagtcgatggtggataaatccacgagatatgcgaaatccagcccatggtactgcccgttatctcgctcgaaattgttctcgaaggctttaagtttgaaaaaagtgcggcccgttaggaactcttgcgcatctgcttccgtgtataaatcaaatatgacgccatgcgtttttaaagattcaatttgctgacctacgttgtatttcggacgccgaacaatacctcgcaataacctatcgtcttctttccttggataatcccgatatcgcaaaactcatacagacccaatcaccgtatggtttgggaggcaattccaccgccataatcaaattctacggtcactcactcgctcaggctgactatgcgtatttccaagcaatctttgacggtgttgacctgtatgagagccagaccaggctgacattcttctatcgaccttggcagaaagacgatggagaaagaatttcggatgcagaagccaggactgatatgaaccgtaaagtcaccaagctgctttcagcctatggttccactctggataacaaggaccatggcaagaatctcatgcataaactgcttatcgagggacgactcagcatcaaaatgatttagtccatcttcattgaatccgcgtttagacatcggtagatggtggaccgtcccacgtgcatcatcgcggcaatctggtccaccgtcaccatgcctctccctataggaacgcggacatgtaggtcgggatgcagtcgacgacgccgtccccgtccaggtccttggtgtagacgagataccgactgccgacgcgtgaggagtactttccacagaacgcgtccagcgaggcatgcgtcctgtaattcgacgacttgacctcgacgggactgaccttcttgccgtcgggcacgatgaagtcgatctcgtagttgcgggtcgtccccggcttgggccaggtgcggtagaacaggcgccttccgtaggcggtgagctcctgggcgacgacgttctcgtagaccatgccgaggttcacgggcagcttgtccgacaggctgattttgtgcatgtcctcctcgtacaggtcgacgatcacgcgtttcacgtcatctaccgcaagcaggtcgttcgtccgcagcagcgcgtccacggcctggggcatgccgcccacgagcatgtaaagccggaagtcgcgcatgagcttgcggttgagtctctcccccaatggcctgcgcgaggcgaaggcctgccgcagcaggggaaccgtggcgtcgccgccgcgcgcccacaggaactcctcgaaatccatcggacgcatctgcgcgcgttcctcctcgctggggatgaggatgtccctggtgttcctgcgtatcgagacgagcgaaccggtctcgatgtagtcgtagcggccgtccctgacgagctgtttgatggcctgcctcgcccttggacacatctggacctcgtcgaatatgatcagcgactccctgtcgaacagcctggccgaatacctcagctggagctggaggaacaggtagtcgaggtcggacacgtcgtcgaacagttcgcggacatcacgggacgcctcggcgaaatatacgagtatgtagctgcggtactcgcgcctggcgaactcctccacgacggtcgacttgcccacgcgccgcgcgccctcgaccagcatggccgtcctgccctgggaccgtgatttccaatcaagcaggacgtcgtacatcttccgtctgaacatggcggaccacaccccattccggctttcgcatttatgcacttttcaaaaccagatttgaccgcatttctacacttttcaaaagtgtgttttactacatttctgcacttttatgaaaattgccagatggaaccagagagaggagacatacaggcctacgatgccggactcgccaagccctaggctccgggttcccaatacgccgtcggatgccttcattcggccatatgcgccaacgtaaaatcaagtctgccaattacggcgtaacctacagagaaatcgtattgcgagaccggtcgacagtcacacgcgcatctttactaggtgatcggcgatgaccggcaggaacgcagccaaattgataccggagtacatgggcaacaaatccacacgtttgatcataggatatcggcgagattccaaagaagggttaatgttccgcggcggacaccagaatctaaaacacagaattcaaggtgctgtataagtgcacgacacgccagaaattgccttttttcaaattcttgactaaattttgtcctttgatgctccaagtgtggtaatattcaatatgaaaagagctttgaaatattgaatattccaaagctctggagactagaaaaaactaaataagagaactatctagctagtatctggttaacttcgcatcaccaagatgatgaggatgattggccagaccatgctggggttttcggcaatagtttcgactagggtcgtcatgctgtatctcctttcttgaaaaaagtgcacctttaaggatagcgtggcgacgtttattttctatgaaccggcgtgtcgtatgctcatgccgcggaaaccctttgccaatcgccatcatcggatttgtcggccaagattcagacacctgtagacggtggaccgtcccacgtgcatcatcgcggcgatctgatccaccgtcatcatcctggaccagtacagcctccgcacctccctgacctgtttctcgtcgagcttggcgggccgtccgcccttccgtcctcttgccctggcggcttcgagtccggcgcgggtgcgttcgcggatcaggtcgctttcgaactgcgccagagacccgaagatgttgaacacgagcgtaccgcccggtgtgctcgtgtctatcgattcggtcagggagcggaactgcactggattggcaacggtgtgttggacggtttcttagaggacgagtccttgttcggtgaattccttcggactccggtatccgagggtggagtggagccgctggttgttgaaccaccacacgtagtcgttgaggtcatgcctcagctgctcgatcgtggtgtagtggttccggtacacgagctccttcttcagcagcctgttcatcgattcgactacggcgttgtcgtaggggttgcccttgcgtgacaacgatcttttgatgtcgaacacgtcgaacggctcgtcaatcctcgtgttgtcgaactcgctgccccggtcggtgtggaacacctggacgtccgtcagcgggaagtcgagggtggcgaacgcggccagcaccaggcccgcgtcccgggtccgcccggcggaatggccggcgatgcccctgttcgccaggtcgaccagcaggcacacgtatgcccagcctccgccgacgcggacataggtaagatcgccagccggacgcgcgtgcggagcgtagctgtcggacccgcgggtccggcaggttcgcgggcctggcctcgttggcccgcgtcttgtgcggtttgaaccgtctgcgcgcgtacgcgctcgtcatgccctgttcgcgcatgatgttgccgatgcgcctcccggacgcggtgacgcccctcctttccagagcggccttgattttcctggcgccgtagcgttcgcggctgtcgcgccagaccgcgcgcacgtcgccggtgatcggatccacccgcccggcttcgggatgcccgatcatccagtagtaggcggagcggggaacgcccagcatcccgcatcgcgccgatatcgggtagcgggcggcattggccccagcgccgcggggtcgatcgcgcgatgtcgtgcccggccctgatctcccgggatggcttgccgctctcgcacgactgcacgatctgccgtttgaacgcctcgtcgtagtggcggggatgtttcgggtcggccatcgtcggcctccaatcccatgtcattcgtccctcatcggactgtctaatacattgtagccaatccactcgtgctctacggcgacgtgggatgcggcaagacgcacatggcgatcgccacgggcatgctggtgtgcgagaggagcatgccggtgaggttcttcaccgcgtcgtcgctggtaatgcgtttgcggcgggcgagggacgagaaccggctcgacgcggaactgcgcgcgataggccgcgccaggctgctggtcatcgacgagctgggctatctgccgatcgacatcgacggggccaggctcctgtttcaggtcgtcgcggattcctacgagaagcggagcgtggtgttcaccacgaacctggagttcggacggtggggcgaggtgttcggagacggcgacatggccgccgcggtcatcgaccgcatcgtgcaccacggaaggatcgtcaggttccgtggcgagtcgtaccgcaacagccactccctgatgagataaatggaaagaggggaaccggccgggccgccggtgacggtgtccattttgaacgccgatggtgttcagattaactggtaacgacacgcagatttatttgacgaaagacaattttcgccgcgttgcacttcccgtgcaagttccacagggccttgcggctactagatattcgacatggcgggatccgttaccggaggtaacatccgtcccggtcaatctgttacggacaagaatcgttgccggagccggattcatcgtcccttatatacctccgtaacgggtgtaacggtctacgaaaaatgagttggaactgtagtggataaacatgtgtcgttacacctgttacatctgtatacagctttggaagaagcaacgctccataaatgatgaagagaaaccagtccagccttagaggagcgttaaggctcccggtccaaagattggtattgtcagtcctgtgaaatagctattgtttggctacgtcaacaggagtgagctatgaatgatttctttacatcccgcatcgggcttgaaaataatagtcaactgaaacctcgtattgtgctgaaatatgaattcaggatccatttaattggcccagatctcagtgtggccagtgcacgcagagaaccgctcttgactaagaagagccagcgatttgttgatgttctcgttctttcttgtacgcgagaacaacagttcaaaagactcttccgaatggacagagacgtgaaaatgagagtgcgttctcgggtaacgaagctcgaagatggctctctcattgagaccattgctgggtcgatatttgcttatggctggcagggtattcaagtgatggctgcgcttgatggagctgggcattttcttaaattcttgcaatccgagtatcggaatctcgagaaagattatcaaagtaggcatatgccaccaagacattccagcttagagtggaaaagcaataatctttttgcttacctgcggagcaagggtgaaatggaggtggatgtgaaggtatgggatcctcgtaggtccaaggataagctggatggttcgctgcgataaattgaaatcagtcactgatcctgacagccctgctatatgggtgacaggagatcttggcacaaggctgtggctatccaaatggttgatttacaggcaatgcggctaagctacagtgtcatactctgctgaacctacactatcgtcccgcttatctttggtgatggcgttgattcgtgcttggtccacggcgtcggcgacttcgttgagtcgttcgggccagagtccggcgtacacgtcgagcgtgatgcttgcggtggcgtggccgagttgtttctgcagggtcttgacatccgcgccgcaggcgatggcgatggacgcataggtgtggcggaggctgtggatgttcacgccttcgccttccatgccggcgttgcgcacgctgggataccagatgcgggttcgccagctgtggtcgtggatgtatcctccgcgcttggcccggaacaggaactcgttcttgctttgcccggcggcctgttcctccagttggggaatgagcgatggcggtagggcgatggtccgtgcctcgccgcttttgggtgtgccgagttgcatcttgccttcgccgtcgtcggaccatgtgcggcgtatgcgggccttgcggttcctgaagtcgagattctggatctgcagggcgagggcttcgttgatgcgcacgcccgtgtaggcgaggaagcgcaccaacagtccgtcaacgtcgcgtcccttggcggcagcttcgtcggcgagcagttcgacctccggcacggtgaggaacaccatgtcttcgtccttggacacgatccggggcgtggtgaccagtttggccgggttttcgcggatccacttgttggtgatggcatactcgaacaccgccgccatgacgaccttgacgatgttacggatgctgcggggactcagcggccgtggcttcctcttgccgggcagctcggccttgtatccgcccttggagagtttgttcacccatgattggagttcgttgggcgtgatttcgcgcagcgtcttgccgccccatgtggggttgatgtacacgcgcagcttgcgctggtagcggccgagggtggcgggcttgacgtcgagcttggtttcgatccactggctggctacatcccggaagagccgctggtcggcgttgggatccacgtagcggccgcgccggatgtcgtcttcgagggctgcctggaattcctcggcatcatagagtttgtcgaacgccttggtcttgctttgcttggtgccgtcgggattgatgacgaaccagcggcagcgccagcgcttgccgatgccatagcggggcgtgcgccattttccagggactttcgccttcattgggtcgcgtgcgttggcgagactacgtttgaccgtggcggtaggagggttgccgtcgtcgccgtccttgagccataggtcgtcgatgttcactcgtgccatgacggtcgctcctttctatcgctggatcattctgtatggttcggccatgccttcgaggattgctcggtagtccctgacgagacctacggtgactccgagctcgtctgcgatcctgtaggggcaagcatcgtaggtttcctcggcggtcgcatattcattggggtctatgagacggagggcggtttcacgccgggtcttctgctcttcgacatcgtggctcagcagttgggcgatgccgtcgcgccagtgctcggcgtggattatctcgtgttgcagggccacccgcttctggttgtcggtcagatgctcgtcgagggtgatcctgcgcgtgttgtgttggtagcttcctagtctgtcgtcgttgatggtggtttcgactacctgcagacccatagtttgggcgatgcagagtaagtcgtgataactgttcaaccggttcccttctcactgcatgctggttgtcagtcgatcggagtgttcatttcctgttgcttgttgtagtcggtgtacgcggcggtgtcgtagtcgtcctgcatcgtgtgtccggtgaccttggcgagctgcgtcgccgcgctgaggaacgggctcgatgcgggaacatcggccggagccgtgactggagcggtggtttcgggcttgcgttcggtggcgtacaggatggtgcgatggctgatcgaccacggctacgtgaacgaacccgacagcgaagcttccactcccaagccggagcacatggcgcggatcccgtcattgagcgaactgatgcgacagcccatcacggtcggatccatagcgaacgggaaacccgacatgacgccgataccggccggaagccggaacaacgaccttcacgcgtgggcctacggaagactgctgaaccaccccgacaatgccgaggccattcgccgtgatctgttcgagcgcggacagaccagcggactgaaggaatctgagttggagacgatctggcagtccatccgccgccagctgggaggcgaccgatgatgccgagacggaaaccaccgtggctcaaactcctgtgcccgtcgggcgcgaaccccgcgcacctgacagccagacgctgcggcacatgccgtgaatgggtggcggtggacaccggcgggccgatcgaagaggtctacgaccccggcgtgctggacgcaacggatctggccacggccatcatcctgggccgcaggttcacgcgcatccagcccatcgccggcaccacgctgatcgaactgcgcaccccatgcggcacgcggggcatcaaacctgacggcatgtacctcgcagcccacgagtgcttccgcacgccgatcagcgtgaagccattcaaaccacccaaacgcacggcagcgtccaaatggaacggaccgcaactcagcaaaggggagataagcgctttcgagacagcctagaggaataaaccatgaccatcacacaccaaccacaaccaccaagcatccacacgcatcggctcgccaaactcgtgccggcggtactggccacgctgcgcacaccggccctcacggtcgggttcggcaccgccgccggatacatgcgcgtctgccaatgcggatacgccacacgcgaccccaaccggttcgccaaccatctggaacacaagatcggagaaaccatcatgagcaacccactggcattccttgacgaccccacacccaccatcaggcacaggctcgtggacaccgcgaagcacgggcggatctacgtctgctcgtgcggccgcaactacccgtcgctcaccgccatgcaggaacacatccgcgccatgaacgaaagacacgacgatgacaaccacgagtgaaccgcatctggtcatcaccgaatctaccggccacggactgcgctggtggtgctcgtgcggatatgacaccgacagcctgcaagacctaagacaacacttgaacggagggaacgacgatgacagggccatgcgtgaacaatgacggagccagcactgttgctggaaggctgctgtgcaaggagtgcgagcgacggctcatggaagccctcgccatgataggtgaggatgccatgccgctgctgttggtcgccaccaaacgggccagcgtcagcatacagggcaacaggcattccacgccggcgcaggcaccgtcgccgttgcgtgacggcatgtgggaactgtactgcgagacggaacagctactgcgacaactgggtttgcgtttcgactacgcgaaggccgtggacccgcgcgccactgtgaaggcgctggcgaacgccgcgatcatggatccagttcccttgctgtcgagcggggacgtgctcgcctggtatcaggacatcaccaatcttgcccgacggatccacacggcggtcaaccccgccaagccgcgtatagcgttcggcgcttgccccagttgtggaagcgtggtgtggggcgatcccgacgaacggtacggcgaatgcgctggatgcggcaacaaggtgaaccgtcgtgccgtcgccgaccgtctgcttgccaaactggtcgtcagcgaagtacgaggtacagccaagcaactgagtgctgaatgcgcgaaagcggggatccgtctgccggccaacactatccgctcatgggtgaaaagagggcaattgcattatggcaatgatgggaaactcggcttaagtgaactagtgccgttgcttgataggcgacgggcataggcatgcggtgagtaatgttgcttgcgcagtatcactcaccgcatttacttattcgcctttatgtgacggggcttccagcattgctcggtagggttctagactcaatgccgttcgtaaggcatcgctgcgtaggggcacaaatttgccatcactggtcatcttccctaaaagcgcagaccaagcgtcgaatttctcctgcttctcaagaagcggaatgttccgttccaaggccttgttgataagatctgtcacgttctgcgttgtcagcttttccatggtctgacgcaactccagtttcgtcttttcatcgaaagcggattcttgaatgttggccgaggaaagttcacgaatatcctttgcgagatccattgccttgtacatgatgataagcaaacgattttgtgcctcctcgctgtccatgtgcaactggcatgcttcaatcgcgtcatcgactcccttggagaatgcgtttgtcgtttcaggagcggaagtcagtaatgcaatcggctgaggcgtttcgacatcattcttttttgaacgacgagtcactttgttccaaagtttacccatcgtaggtttaactgaatcctcccaccaatgaacgacggttttatcccaccagcttctgaatgtctcattgttcgctagatagtatgcggttccgactattgcggcaatcgcaattgcggcggcagccatagccgctgcaggtgtgtctccgtcatcgttgccgatttctgcgccgtctccgtcgtcggtattgtcgaagacgggttcccaacgtgcttgtcctttcaaatggttttcatcatcgaagaaggctcccagatagacgctgggatcgtcttgaggattggccaaatgcatcccgtcaggcattatcaggcggtacagcggctcgtcttccatatcgactccttaaatccttacgcttcgacgtcgaaagcgcatgaatcacttgtttaacaagtataaggtggaaagatttgcgtcggtagactcagtaaaacccagtaaaactttttcagcctccgaaacggcctttcaagcaaaagaaaaagccttaattcccaagcgggagtagggctttcgtggtcgggccggcgggatttgaacccgcgacatcttgctcccaaagcaagcgcgctaccaaactgcgctacggcccggtaattatgtcacttggcataacttttttagtctacacatacctcaagacggtctgtgcctccagatgactcatttttgacactcagataggccgagaaaatcggaggtctgcggtcattgttactgagtgttactggcggtcatttttcagttttagttgaagtcctaaaacccaagcgggagtaaggcttatcgggtgtcgcaagcgcaacgctttgggaacatcctgctcccaaagcaggcgcgctaccaaactgcgctatagcccgatgcgccattaaggcacaatgaatcattgtaaacgacgctggatacattgcgtgtcgagcatatgaattcaaaaaaggttctggattctcttgatagcttatgagtgacatctttattcattgatgctctacaacgactaggtttggatctgcatcgatatctggcgcatccgctggactaacaaggaccgtgcaaacgatgtggcccccgacttcctgcgaggaagtcgggggccacatcgtttgcacggtggactatcggatcaattctgatcagatcagctcgaggtcgacatcgaggctgatcggcttgtccgccgggatatggtactgggggtgcaccggcgacatccaggaatcatcgccgccaacgcccatctgtgcggcaaggacgcgcaggaacatgtgcttcggcttcggcagctcgtcctggtgctgagcctcctcaagcatgaagctggagtacggcaacaggcttaccgcgaacggcgcggcaccatcggcgcggctgacgcgcatgccgtggccgtgatcgtcggtaatctcggcccaacgcacatcctcatggttgcccgtctcctgcggcatgaggtacggcgcatgatcggcgaaggcgttggtgctccacacgccgagcttggcgtgcttgcggtccaggtacgtctcctccgggccggtgccgaagaacctcaggttcgtgtactgcacaggcagcgtccattcgatgccgaacgccgggatggtgggcaggtcaccctgctctccagggtattcgacgtgcaggttcacgcggccatcggtgtgggccgtgtaggagacggtcaccttggtgcgctgcgcggtggcgagctcatacgtgtacgtgcccttgagcgtgctgtcgtcgatctgctcgagcacgttgtccacgcagcgggcgtagcggccggcgcccagccactggacgcgctcgaagccatgaccggcaccgcgatcgttgtcggtcagcggacggaaggtggtgattgcgggacggcgcagcacgaactcgttgccggcgaaggtgtaggagaccatgccgccctgggtgcgcgacagcaggacctcgcgtccggcgcctcgcacgccagcgttccaacggcccacggtgatggtcccatcggccggcttcgcgtcgggcgtcgcggtggcgtccgcgggcaccaccgcctgtccgaaggcgagctcgtagccgctctcggcccaatcggtcgccttggcgagacgctgcgaaacctgcagcaccagttcgcgggcgtcggcgcggtacgccgccaccggccatgcgacatcgaacgtgcgggtctcaccggccggcacgtcgaaacgccgggtggactgccagaccggcttgccgtcggcgagaacgctcaggacgaacacgtagtcgccggtggcggtgaacaggttgtcgttcttgacggacaccgagtccttcgtcacgtcgatgtggacgttcgagtacagctgcttgacttcctgggccttgggggacggcttgcggtcggcgaacagcaggccgtcgccggagaactcgtagtcggacggacggtcgccgaagtctccgccgtagcgcaggctcctggtgccgtcgggctgggtggcgtagatggcctggtcgatgaagtcccagatgaagccgccctgatacttcgggtagcgttcgagcgccgtgtattcgtccatgttgcccacggagttgcccatggcgtgcatgtattcgcaggagaggtacggcttcttcgggtcgtccttcaggtacttctcgatctcgtcggcatgcgagtacatacgggtctcgatgtcggtgacgtcatcgtagtcacggttgtgggtcacgccctcgtagtgcaccggacggttcgggtcgatgtcgtgcacgtgcttgtacatggcgcggaacacgtcgcccacgtaggattcgttgcccagcgaccagatcagcacgctcgggtggttgtagtcacggcgcatcatgctgttgacgcggtcgacgcaggcgccttcccattcgcgcttgctgcccggcacgatggtgtcctcggtgaggacgtctccgggcagggaccagctgccgtgggcttcgaggttggcttcgtcgatcaggtagatgccgtactcgtcgcacagttcgtaccagcgttcctggttcgggtagtgcgaggtgcggatggagttgatgttgtggcgcttgcagaagaccacgtcatcgatcatgtcctgctcggtgatggcgcggccgcgttcggcgtcgaactcgtggcggtcggcgcccttgaacacgatgcgcttgccgttgatggtcaggatgccgtcctcgatgcggaagcggcggaaaccgaccttctgggacgtgcattcgatgacgtctcccgcttggtcgatgacgtcgacgtcaagttcgtacagcgtcgggctttcggcgctccagggttcgatgccctgcagcggctcgctggagatcgcggtctgcgcctccgcgtcgcccgtcgtctgccacaccgtgttgccgtcggcgtccttcagggtcgcgcggaccgtggccgcgtcggccgcgttgagcacggtcagcgcggcgtcgagggaagcggtgccggcctcgggatcccaatcggcttcgatttgcgtgttctcgatgtgcacgtgcgggcgggcggcgagttcgacggagcggaacaggccgtgcagacgccagaagtcctgatcctcaagccaggaggcgctggagtattcgtagcaggcgacggccacgacgttctccccgtcgtgcagcagttcggtgatgtcgaactcattgggcgtgaagccgtcctcgccatagccgacgaacgcgccgttgacccacacgtagatcgccgtggccatgccgtggaacacgatcgacaccgatccgccggcctgcttggcgtttgctacgggggcggagacggtgaacttcctgcggtagagcgcgacgtgattgttctccgggatgttcggttccaacgggttctcgtggccgtcccacggatactggacgttcacgtacttgtggttcatcagaccggccgtctgcaggtggcccggaacctggatacgctcgaacgaggagtcgtcgaacgactcggccgtcgcgggttcctcttcgaggttgatgtcggcggcctgaacgacctcgacccgccactcgccgtcaaggctctgcttgagatcggaccattgtccgctctgggggtcgcgggcgtaccacttgtggctggaatgggccggagtccggttcacctcgaacaccgtcgggtcggtcagccaagcctgcgatgcgcgatcgacatgtgtgacgtctgtcatgctctcctgctttctgtcattacctcgttgtgaatgatattatggaggaggtcggggcctcctttaccgaaaaggataaacagtttttatataaaacgcaaatcctgtttaccgcttccaaatcactggcactgcttgccgtcgacgctacgccgcgtccatgcaatgtctcggttcagcccatgttatcccatccttgcgacacgctgtttatctccttgtttactaatgctttttacttttggtgataaaacttgtatgcttactttacaaaatcaatgagtgattccatgctctgggttcttaaggagaagattaatgagcaacgaaaatgccgcggacggtgacgtccgcaggaagagtgggttaggccagcgcatcgcctacgcgttcggcaacctcggtcaggccgccttctacaacgcgatgagcacgtacttcatcgtgtatgtcaccagctgcctgttctcgggcgttgacaaggcgcttgcggccaagctgatcggcgtcatcaccagcctcgtggtgatcatccgcatcgccgagatcttcgtcgatccgctgctgggcaacctcgtggacaacaccaccaccaagtggggccgtttccgcccgtggcagttcttcggcggactggtctcctccgtgctgcttgccgtggttttcagcggcatgtttggcctggtgaacgttaactccacattgttcatcgtcgtgttcgtcatcacgttcatcgtgcttgacgtgttctactccctgcgcgacatctcctactggggcatgatcccggcgttgtcctccgactcccacgagcgttccacctacactgccctcggctccttcaccggctccatcggcggcaacgccatcaccatcctcgtgattccggtcgtcacctatttcagctgggtgttcaccggcgagaacgccgagcaccagtcgggttggaccgctttcggcatcatcgtcgcggtgctcggcatcatgaccgcctggaccgtcgccttcggcaccagggaaaaccaaagcgcccttcgcgccaacgccgaagacaacggtggtccgttgcaggcgttcaaggccgtgttccagaacgaccagctgctgtgggtcgccctgtcctacctgctgtacgccatcgcgaacgtgaccaccaccggtgtgcttctcttcctgttcaagttcgtccttgacaatcaggccgctttctccgcgaccggtgtcatcgccatgatcgcgggcctggtcatgtccccgctgtacccgattctgaacaggtacattccgcgccgctacctgtacatcggcggcatggtctccatgatcgtggcttatgtgatgctcgccctgttctccagcaacatcgtcctggtcttcatcgcgctggtgctcttctacgttcccggcacgctcatcatgatgacggtcatcctctccctgaccgactccatcgagtacggccagctgaagaacggcaagcgcaacgaggccgttacgctttccatccgcccgatgctcgataagatcggcggcgctctgtcgaacggcatcgtcggcttcatcgcccttgcggccggcatgacgggtgacgcaaccgccgccgatatgaccccgacgaatatccacgtcttcaagatctgcgcgttctatgccccgctcatccagatcgtgctcagcctgctggtgttcgtctccaaggtcaagatcaccgagaagatgcacgcgcagatcgttgacgagctcgaagccaagctcgcttccggcgagatcgtcgacgatgaggcgcaggtcgtggaggccgccgaagccgccgcagccgtcggcgatgaggcgcaggcagttattaagaactgatctcccgttcccatccctcccataaggcccgtccgcctgaaccgcaagatgcggtccgtggcggacgggcctgttcgttcctgcggtcg

SEQ ID NO: 421 - DNA, 20016 bp, Unknown
  R48_24m  MAG No. k141_12215
caacaggcaaagttatccacaaaatgccgaaaaatacgtcctccgaccacaacccttgaaaaagaccatgtggtaatcgcaagtatgcaagtctgttgaatcacggcaacaacgacgtgcatatcgaaaggacgatgcaatgaatgcgatgaagcgacgtatgcttgcgattcaggccgcggtattggcggtctgcgccatcatcgtggcgatgacatgcccggcagcgctggccgccgaacagctgctacgtgcgaacggcaagcattacaactattttcttgatggaaaaccgtatgtgatcggggtgaacgcggaatcgagatcgggcaaattctattattgccggcaaatcgaacgcatgaccgactataaggtgactgaaaccaccaccgtggaaaatacggaagcggcacggcgcctcgcatggctgctgtccgaatatcaatatgacggggagccggtgcttacgtatgcggcgatcggcgtgctggtgcaccgcaactatgatgaccaaaaggtgtgggccaggcatgagcaatacctcttctcggtgatggacgagctggaaagcaaagtcaacgagctttgggaggaggccgcgaacaagctgccggtttcttcgggggtgacgcgtgatgatcggcagggattgcggtccggaagcctgttcgtgcagttgctggatgcgagtggccagccggtcgagggcatattcacggcgacgatcgaaggaccggccgtgttcgacgaagatgatgagcccacggcagtcggctgggccgaaccggagggaaccaccgtgtattggcatgcaacgggcgccggcgaggtcaatatcaaggtcggataccagtccgtgggattggatgaggctgtcaccgcgcagaaaatgatgatgctgaacgatgtggtggaacgtgaggatagcctgttgacgttcaatgtcgataacctttatgctcctgagcaggaaatgccgcagacaggaagttcgatggggctggtattgggtttggcagctgccgtgatgtgctgtggggcgttcatgctatatgccgttcgtcgacgatgataggtggcgatgatgctgcttcatggaggcgagtttgcgaaacttggctgaatatgctgaaggaagccagcgaaaagaacgtggcgaaattcgaaacctgtgaacagtccgaccagctgccatgtccaaattttgcccggattctattaagcgatcggcttggccaagatccggtaagaaaacaaaaaagtcaggaaccactatggttcctgactttcattggtagcggggcatggatttgaaccgtggacctctgggaaccttgcagaaccccagaggtccacggttcaaatccatgcagcccgattatccgactttatgctagcggcgtgattccgtggtgcgatgatgtgccatgagtcaaaaacaagagctgccccctgctcagtggcgggatgacatgaaccattggcttgacgcgctccgcgccgccggtctcagcgaggagacggtgaggtgccggcgcaacaagctgtcgcacacggcgcgatgcatcggcctgtcaccgatgacggtgaccgccgaagacctcatcaactggacatcggcccaggcgtggaagacagaaacgcgccgcggctaccgcaagacctatgtgtcgttcttccgctggctgcacgagagcggtcgcagggcggatgatcctagcgagctgctgccggtggtgcgccgtccgaaaccgaaaccgcgcccgtgccccgaccggtacatcatcgccgcactgcacaaggcgaccccgttggagcgtgtcatgctgcggctggcggccgaatgcgggttgcggcgtgccgagattgcccgcgtgaacagtcgggatgtgatggacgacctgttgggcaagtcgctggtcatcacgggcaagggtgacaagcagcgcatcgtgcccctgccggacgatctggccgaatatatcgaacgttgcggcggttggctgctgcccggccggtggaacggccacgttgaacagagctacgtgaaccgtcatatatcacggttgctgccggacgggtggggctgccacagcctgcgccaccggtatgccacgaagacctacgagcagacgcacgacctgttcctggtcgcgcgtctgctcggccactcgtcggtggagaccacgcaaatctatgtggccatgcccgacagcaggctacgcagcgcgttggatgccgtcaggctggccgtataattcggggtctgtggttcagcgcttcagatagtcggtggtaccggccgggcccagtgcgatgtagcggtgttgtccgctggtggctccgatgtagcggccccagtcgtagccgtccgcgcggccggtccagccgtcgaggttgacggtctggccggccttgtactgggccacgacgttgccgcgtgtggtgggctggtcacgcacgttgagcgcctgcacgttgatgcgccatgtgccggcgatgccggatggtgtcgcggccgtggcggccgtgggtcgcagatagcccagcagtccgttcttggtgatgcttccctggtgcgtggcgccggggttctgcgtcaggcacaagaggctgccgccctggtctgcgaggacgatggccacgtgcgtggacggggtggcgggggcgttgccccagaaggccacgtcgcccttgcgcggcgttgcgctggccgggagacggtcgaatttggcgcgtagtgcgggctgacggtcgtaggtggtcgtgtagacgcttcccgcccagccgttgctggtgttggtggctgactgtggcactccggccacgtcctgcgcgtaccggctccataggtcccagcactggccgccataggccccatcgacgtcaacggccctgccgttgtacgtctggatgaattggtcgattgtcattgtcatggttgttttcctttcagatgagcgtgagaacggacagcgcgatggccgtgccgaacgcggcggccacgatagtgaggaagaggagcgcgccgatggcgagcagccagtcggtggcggtggtcagcggcgatggtcgctgccatgcacgaacagcatgacgaccgttatgccgacgatccacagaattgcggtggcgaggatcatgacttgccgtcttcatcgttcgggtccttctggctacggaacagctgcaacagcgggctgttggcgatttcgggattgatctcgccgaggttttccatgatgctgctgatttcggtgacgctgatgtagacggcggcgggcacgatgagcggcaccgcgtacccgaggtcgaggtactgctggccgcgttcgacgacttctgcgaggagcatgaccaggatcaggcccgacttgtgccagagtccgagtcgcattttctctgagctgatgtcgtgctgcatggcggccttcatgagacccgtgaggtagtcgatggcaatgagtacgcccacgatggcgagggctgctatttcggtttgctgcatgttgctccttaattggaatatccccagatgggcatggtccagttgatccaagtcttgatcttgtcgccggctttgaacttgtagccgaggggtggttcgggtctgtcgtcgccgggtttgaagtatcttgcgttgacgctgacgttgaccattctgtcgtcgtcgacgtacaggtaggcgtcgaagagggtccatagcccgttgacgctgacggcgggcttggccgggatgacgtcattgtagacgatccggcaccagtcgggcatctggaacagcggcaggcgcatgctgaacgagttgaggtagctgctgtcgtcgaccacctgcgcctcgacactgccgtacacggtgacgcggtcggcccccacgtcgaggccgatgcggcgcacggtgacgttggccgcgtacgagacctggtagacgggctggttgtcggcgacggtcggggtcgagtacgtgccctggacgatctgggccataatgcccgcgatgacggcgtggcccgcgtcgttgggatgcagcaggtcgtcgttgcacaaatcggggcgcgtcatcagccaccgccagcagtccggcacgcacaccacgcccgtgccctgcagggcgcgcgccacagacctgtaatagacgagacgcgacacgacgggcacgccgccctgcgtggccccgaccttcagggggccctgcatgcccgtgccggtgacgatcctcgcgttggggtacgcggcgcgcaatgtcgcgacgcactggcgcgcccgctccgtggccgtggccgtatcaccggcgccgtcgttgacgccgccgaaaaggaacacatgcgacactagcatgtgatcgtacgacgagtccgcggcggcgcgggagcactggccgtcgaaccggttggcttgcgcgccgttgatccacccggtgccgcccacggcgtagttgtgctcgatccagtcgaacatgcggcacaggatcgtgctccaccgtttcgacccgctgctggtcagatagccctgggtgatgctgtcgccgatgaacaccgcgtgactgccgggcgcatagcgagcgtgggacaatgctgcgcgcgtggcactggaagcatcccccagcaggccggccacggcaccatcctgcatcgccaccgcgccgccgctgtacttctccgcgtcggccgccgccttctccgttcgcgcggtcgcgtccttcaccttcacgaggatcgtatcgggcaggtcatcgatgttgttgtcgatgctctgggccatgtccttgaactgcgccgaggcgttacgcacaaggtcggtgccatccgggtatcggatatggtgtttcggtgtctctttcatgctcctagctcctgttctgtggttatcaaatcgatctggccccattcggaccacgtcatttccggcagccgctcccacttgcaggtcaacggccgcaaatcaatccagcgcaacggtcgcatggtcgggtcgcgcggcaatggatgcaactcaagctcgttgctccacacggcctccccattacggtgccggtaggtgagcgtgccgcctacaggcagccaagcgccagccgtggccggcgtcccgtcacgcgccaccaacggtgtgtaacggttgtgcacgaaagtcaagggcaggccggcccacgggtggaattgcatggcgtgctccacgtcgtccaccttgcgtgattcgaccttcaacgaccgggggcgcaaccgggtgctgttggccaggatcacggccgcgcgctgcaaacggtcggaatccgacgccgcgtagacgccggccgtccaatggccgccgctgtcgtcgcggatcaccgcgtccgactccacggaaacgctcttctgcgactcggtgagattatccggcacgaggccgcgagccgagaacgtcagctccgaatcctcgaaaccgaacgcagacttctccgcatcccatgtgaccttacggcccttgagcgtgacctgagtgatcggatcgggcaacgccaacgtggtgtcgtccaccatgaccagctccgcgcgcacgctgccggtcacatgcccctgccacgaggtcgccagcgtgccatcaggcagcatggccacatacgcgggcgagcctagcaaccccaccgtcatcacgcccggcgtattccgtccctgttcgtacgcctcgtagaccagcggccaatccggcgacgacgacgcgagattgcgcacgagcgtgatcagatcggggtgcgaatcatccccatacggggccagcgcaggcggcagatgccggcgaagccacgccaaagacatatcgtcgaacggcacacccaacgcggccagacgcccttgcagcacgtccaagcgttccgccggggacgccggccagtgatagccggccagggccccggactgttccggcccctgcgcggcctggcggcgcgtgagtacgctcatgcccaacgcatacaacgacaccagccaatcattcttcgtcttgcgctgcgtgacctcgccgcccacagtgatccggccatagaatacggattccaggccactgtccggcgccggtggaatcgccggcggcttcaagtcggcaagctcggcccacgacaccgactccgccacctgttgccactggccggagacgtcgaacctttgccacgacaccgcgtccgtcttctgcaaccacaccttggcaccggccagatacagcacatcaccggccaggtcgccggttcggtcgcgtatcgtgaacctgagcaccggcgcgtccggctggtcgcgtatcgagtccacgccccagtcgatggacaatgattcaagcgccgcctggtcgttctcgtgcggggtcagacactcccagccgttgccgcgatccaagtacagcaatgcgagacggccgctcatgagcgcacgtccttaaccgttctgatgcattcgagtatttccttgccgatctcgtatttgtcgcccacgccggtctgcacggtgatgttgtatgtgttgccgaccggctgcgtcgtggctgctgccggtgtctcgaatgcaagacggcccatgccggtgttgattcgtttgactgtcttgcgcacgtcggtgtcgaagccggtgttcatgcccttggccagtccctgcatgatgaggcgaccgttcttcacgagcagtaccttgtcgtagctggcggggcccttgtgctgcgctatccagtcggcgatgccgccgacgaagccggtaacgttgttccatgcgcttttcaggccgttgagcaggccgttgatgatggacgcgccggcattccacagcaggctgccgacgttgccgatggctcccaggatgcggccgggcagtcccgcgaaccagctgaccacgttgttccacgtgtttgtcgcgcctttggccgcgttgctgaagaacgcgcctatgcggcctgggagtgcctggaagaagccgatgatgttgttgacgcaggtgccgagccagctggtgaagttcgaccatatgcgccggccggtctcggtctgggtgaagaagtagaccagcgcggccaccagcgcggctatggcggtgatgacgagcatgatcgggttcgcattcattaccagattgaacgctgtttgcactccggtcgcggtcttggttgcggtctgccatacggctatggcggtctgccaagcctggtaggcggccaccgcgccaccgacgcccacgacgagggcgcccagccactgggagttctgctgcaaccatgtgccggccgcctgcaacgcattcgcggtgaaatcgagaatgtcgccgaacgtctgtgaggccgtggcccccgcattcagattattggtcaggccgagcgaatcggcggcgaactggaccaccggccccagtaccgtccccacgccctgagccagactgtcgaatccggccttgacgtcgccggcgcgtgatttcaccgcgtcgaacacgccgacggccgtgtctctgagcgtgaagaggaaatcgaccacgggggagtcctcgctgacgttgaacgcctgcgcgaactcgctggtgaaatccccgtcccggacgaacgagatgatgcccttgatcgctttgacggctctgtcggagaatgcggtgaccttttcggccgccgtgcccatcgccgacgtgatggtgggcttgatgagatcgaacgcatccgtgaggccgcccgtcacggcggcttcgaggttgcccatcgcgccttccatggtctgcgtggatttggcggcttccttggccacgtcgctcatgcccaattgcatcagcgcctggttgaactcgtcggcggtgatctggccgtcggccatcgcgtcacggaagtttcccgtataggctccgttgcgcagcatggcctcctggagtttgccggacgcgccggggatcgcgtcggccagctggttccagttctccgtggtcagcttgcccgcgccggccgtctgggtgagcgtcatggccacgcttttgaacgtttccgcgttgccgcccgccacggcgttgaggttgccggccgcctgggtcaggccggtgtagtcgccgatgccgttcgaggcgagctgcgcggtggtgttctggatggtggagaggtcgtagacggtttcgtcggcgtattggcgtgccgccttagatgccttgtctatggctgaggtgtcgaggccggcgaagttcatcgtgttcctgaacttgtcggtcgaatcgctcatggccatcacgtccgaggtgaagcccttgagcgtgtcccagagcgcggaaacgcccttgagggcgacgccgcccatgaagctgccgaacgcggccgccttgcccgtcaccttggagagcgccttcacggcgtcgtccgagttgccggtgatgcgcaccgacatgatcgcgcttctagccatggttcacctcctccatgcgttccatttcctccataagcagttcgatgcccgttccccagtcgagttcgctggccttctgccgccattcccacgggctgccgccgaatctggcggacaggatcagtgagagacggcccagtgaaccgtctggccaggcgtctattcggtagggttttccggggttttcacctcgatctcgcccacggagtcgagccactgctcataggggatttgtgtgtttccggcatatcgctgcgcgagatacgccatgtagtaggacatccgcagcttgctgccttctccgggagcccatcccgccttctgcgcgtgttcctccacgctggtgatgacgcgggggggtcagtggcgcctcttccgtgcgtccgtccgtataggtgactttcgcggtgggttgtttgctcatgtcatgctccttgcacttggttcaatgtctttttgatgaattgctcgtagagtttggtccattgcggttcggtggcggccacggcgtcgttgacgaacgagcgtggtttgatgtgccttttgggccatccgtagttgatgacgcccgcatacggcaccgacttgcggccggctcggaccacgccggccttttgcgtggcccctgctcggatgctgccggccagccgtccgctcttgccgtgcggggcgcggcttcgtgcggccggggcggccagttcagcggcctggctgttgatctgtttgagttccttcatgtccgcgccggccttgcgcatcgtggcaacgaaacgtttctggccgaccacgtacagggctttgtcggccatcaggcgctttcggtggtgggcctgtattccgaggccttcacatcggtggcggcgaactcgaaatccttcttgttgcgggtcttcacatcgccgccgaacgcgatgggtgcgatgaccacgctcatgtccagctggagcgctcccttggtgttcgggatgaatttggcgtgtttcgtttcaccggcatggttcaggcaatacacctgggccccgctcatggaatagtcctcgccgatgctgcccgacagtttccatgaggtggtcagctcgcctccttccacgtgcccgtcgaggaagctgtcggggtcctcgctggaattgtcgggcacgagttccgcgttcgtgcagtccacgtcgagcttgtaggtgtcggtgtcggagccgatcacgaggcttccggggcctagggtgcggattttgtctgccatggttgtttcctttctaaaggtctgatgggttgatggtcagctggtatgcggcgaggtcgcccacgttggtgatggtgaaggtgaccggccgcgcctggatgacgcacaaatcggattcggcgatgaggtcgagcgcgtcgctgatgggttcgaggcttctcgcctgggtggccatggtgccggcgatgagatccacgcgccatgtgatttccgggtcgttaccccatatcggatagtcgatgtcgggccattcgatgagcaccgccaccttgccggactgaggtctggcctgctgcgaatcgtcggtgactatgacggccatgtccccgagtatttcccggaatttcgacgcgagccgtgcgcgctgccggacgatcaggttgttcatgcgatcaccattccgccggtgggcacgtcggcagcgttgagcttctgccagacgctgcgcagtgggtcgcttgagattctgaacggttccagggtgccgtccgtcacgttcatcacgccgagtcgcgcgtccctcatgttgtacaggtccgcggcgcatgcggtcacgcagtcggcgagtacggtttccggcacggtgtggctgcctatcgcgccggtcacgtatgcctgggcggatgtgatggcgcgctgtatgcgttcgtcgtcgccggccggcactccgatttcgtcgcgcacggccgcctcataggtcttccactcgggttcggccatgatgctcacttgacggatgtggtcgagaacttcacggggatgaggcccagcggatgggatgcggccacggcgagatagccgtacaccgaatagttctcggtgagtttggtcgggtcgccgtcgctcaactgggtggggccgcccgactcccatacggtcacggcctcggggtcgatgaagcacgcggtgccggccggcgccttgggaagcatctgcacgggcacgcgcaggaacttgcccgcgatgccggtaaggtcgaagtctcccagcgtgtcggtgccgtcgccgctcaggtcgaagaagcggctgccggtgtccttgagtttgatgagtgcggccatcacgtccttggaaacgccgaggcgggtgaggctcacgttgcggtcgtcggcgagttccgcggcatccatgatgagggtcgcccactggtcgatggtcatggcgtccaacgccgccggcgcgtcgatcttgttcgcatccgtcgaggcgtcgcgctgggcggcgatggtggcgtacaggtagttgcgcacggcggtttcggtggccttggcgtaggcgttgcgcagggcggagagcgcggtgttgagcatcggcgtggtgctgcgttcgatagtctggcggctcagcgtggtatagccgccgtaggtgtcgattccgacgctcttggtgccgaacgtgaccttgccgaactgtagggtgtcaccttccttggcctgcttgccggtgaccgtggtgtcggatgccaccacgttgtattccatggtcatgcccttggccggcagcgtgtcgtgcgtcagcaggttagtgaccttgcggcgcatctggatgagccgcaggtcgtcggcgatccaggtggcggtgtttccggtgtcgccggtgacgatgaggtcgcggcattcgtgcatgagctgcacggcggtttcctccccgcggtagagcgcctggagatagtcgccggcggtgcggtattcggagccaatcggcttcggtttctccgtggcgccaacgtgggccaatgcggccttgaggcttcgctgctcgtccttgatgccgtcgagagtttcctccagttccttgtccattcgggtttcctcgctttcggtagatggttggtttccggtttcggacatgttttcgtggggttcggcgctgcgctggccggtgattttcgcggcctcgtacgccggccagctgaccacgctcgtttccagcagacgcacgcgcctgcggtgggtgacgccggccttgtccacctcgttctccaccgggatgaatccgaccgacaacgagtcgagcgccccgtcgcgcagcagggtcacgacgtcgcggccctgctgcgtgtcgctgattctggcggtgatgtgcagcccgtcctcgcggctttcggcactggtgatgcggccgatgagctcgccgtgctggtagcagagcttcgcggtgtccgcttcatcgaaacggcaatccgggtcgaaggtctcggctccctcccaggtgtcgatgatctggttgaacggcacggcgatgccctccaatgtgcgcccgtcgccttcctctgcctggcgcaggcatacgcctttcaatccgatttcatgacggttcactggttcacctcttccggttgcggcgcgttgacgagcgggggcaatgcctcgcgtgcgcgcacctcgttgacttccatccaccctgattcgagggcggtcttgtaggcgttgaaacggtcgctcatgtcggcgcggcggcttgaatcccagtcgaacgaggcggtgcgtccgcgcgggagcagacggttgaacagttcctcgatctcgcccgcataggcggccagcgtgtagtcggcgaactcgatccagctttgctcgatgttgctgtaggtgaggttcgagccgtcaactgcggccagcatgatgctggccggtatgccgagcagtcgggctatctgcgtggtgtcgaacttctgagtctccagaaactgtaggtcggcgggcttcatgtccaacggcacgtattccaggtcgtttccgatgaccttgatgtcgccggccgtgccgctggcccgccaatcctgcttcgcttgcgccgcgatggtctcggtcaccttcgccttcgtgcgcaggtagcctttgaggttgctggaatcggtgtagaacttcgtcttgtagtcgcgggccatctgggcgctttcgacttcctcgcgggccgcgccgatggggccgaggccgcgcagtcggcccggaacgttgaggaacttgcaatgcacgatctggtcggccgtgtagtcgtggcccagatacgaatagcggagcttcggcgccgccggatcacggccgtcgtccgaaacggtgaccaatgagggcggcagtacctcgcaggtcacgacctccccggcgtagcgcacaagccgtacgaaggcgttgccgtccagaaccatgctggccaccatgtcggcgaggaagtcacggcgggaacggttcacgtccggctggaggatcagcgagctcacggtgtccagcttcagaccgccgcgcatctcatggatcggcagaccggttatcgcggtctgcaacacctggacaccgcgaaacacggtggacaggctcaacgggtctcgctcgatctcgcggctgggcggcctgatgccctcgggcatgtcacccgcatcgctgcgggtcaggacatggccggcgagcttcactcgcccccagagactcaatcgttcgttcatgccgccgattatggaagcggaaccaccgaaccgtccaccaccgtgccgccaagtaccgccaagtaccgccaagtaccgccaagtaccgccaaacggggtcagtagatttgcaaggggccgtcttcctccggccggtgggcggctccccatgcggccagcatgcaggattccagcggtgacgtgaggccggtcgagccgcgtcgtgagatacgccaagcgtcgcccgaccatttgcgggccgagttcgccgtgctttcgtccaggtcggcatccgtggcgtggaacacgattctgttggtgaggccgctcacgaagctttgcccgatggtcaggtagtcggttgcgtccatgtccacgaagtccagtgcttcgtcgccggtattgtcggtgagccggtgcagccggtccgacaggtcggatgcggtgcccttgctgtcgatcaccaccggcgcgtggtatttgccgcacaggcggcttatctcctcgggggcgtagccggtgccgtccaggatttcgagcagttgcgcggttatggtgccgtcgtcgttgcagatgccggcggatatgctcgtgtgggtgccgtcaacgtcaacggcgactgcgaacacgacaggccggccgtcaagttgcgagggctcgagtggggcaacggccgtggtcgcccaggtgtcggcgtctatgatgcgttcggccaggcccacgtcacgccggttgccgaacgctcgggcccagccggatgggttgttgctccactgttcgcggaagtcctggagcttgtcgcggttccagagcaggccggcggccggatgatagcgcattatcaggtccagattctcggggtcggcgtcgggcggcagtccgaaatcgaaccagcaggtacggcgtgactggctgccggccctgcattcgtccaggcgtttgttgaagaacgtgctttctgcggtgccctcggtgctggtgatccacagttggggctgtacaccggtggcctgcaaacgggtcacggtcgtgggaaggaagccgtcgagtatggcgttgccggtttcctcgctgagactgaacgcctcatcgagggtgatcttgtcgccctgtacgccgtggccggcgactcgggtaaccgatttcggcatgatgacggaaccgttgacgaacgtctggctgaggttgcccatgccgcggtagggtttcaaggcgatcgcccccagtgggcattccggcgcgtgcagtttttccaggtatttgcggaagtggtcgccggcgtccttgccggtctgcgcgaggtagtagatgtaacggcccggcccccattgggcgttgcgggtgtctgtggcgtccacgagcgttgactttccgcactggcgcggcgtcgagagtatcaccgtgtcataaaagtatgttccggtttccgggtcgatttcgccggccacgtccgccacatactgctgccaaggaagtagcggggttccgagcatggccgcaaaccggcccaccttgccgccgtccgtgccccgctcggggttccgcgcggtgcctcccctcatgggaatcacgccttggcctcctgcaacagcatggccagctcgtcgtcaagcttgacccgttccgggtagatgacctgcaagcgatcaagattgctggcgaagctgtcgaagagcgtgctcgcgttcttgcccttcagcagatacgagtcgatgttgtgggagatggcgatgagcagagcagcgagcgtgtccgctatcggggtcacctgcttgtccctgaagaactccgtgagattctgacgggttttcttttccatgaatccctgaaaattgcctatctcatcgaatccttcgaatgcttcctgcaatgccattcattcacctcttttcgttgcaattccgccgttttccaaaaaatttttttctgatacgagagaagaaaaaagtgggcgcggggtcttggtcggccacgtccgtttaaaaaacgcggctaccatgccggcctcgccgcgatcttcgccgcgtccgctctcaacccgagctgcacgagcctcgcgcgcctccgtgactgcctgctgtcgatcagagcctgcgacagatgcagcgcataccactggcgcacacgacgccgtgcctcctcgccggccgcgcgctcccactccacctcgaagccagggtcaagcacatggatgtcatagtcgagcgcaacccattcatcgagcatgcgagggtggcggcgactgttgggcatcgtgcgcgtcagccacacgtccacgggttccgggctcgtcgcgaactggcggtaggcaccgctccacgccatcgcgacggcacgacgctcgcccaggctggggtcggtcagacccatcgcacgggcaagaccggtgaagctcaccacgggatcacccggcgccttgtgcgcgtcgatgtaatccatggcctcgcggtcacaactgccgggaggcacgatcaccatgtgcagtctggcaccgtaaccgtacagcacacggtcctgccttgatgcgttgcaatgcttgcaggcacgccggatgttaggcaccgtgtccataccgccatgcgaatacggcacgatatggtcgtcctcggcaccgacatgggtacagcccggcagctccagccaacaatcattgccccacgtctcgatgacctcacggcgcaccagcgggtctatcacctgcctacgcatcacgaccgtccttcctggacgccacccaacgatccaaatcggccacctcgtacaaacacgggctgttgatggcatcaccggccttgaaccactccgggccggtgccatccgaccgcatgcgctccatctggcgttgcgaccggtgcaggtatttggccgcctgcgcggtagtaagcttcgctctcggattcatccgaccccctagaacagattcagcctcgactgcacgccaccggccggcaccgcttcgccggccctgcgccggaacacgcttcgctggccctgcgcccacaaatcgaactggcgcgcgtccaaagtccagtccttgccgacacggcgcacgcccatcgccggataatccgcacccaacgcggccagagccgtgcccgtacgcagatgcagtatccgaagcacacggctcgaatccggcaagccggtgtgctgctcatcggcaagcgcaaggattgcgaggcggaacgtgtcaagcagcaacgccgcgtcatgcggacttgtccacatgctcaatgcctcggcgaggctcggcttcgtgcgggcggccatcattccaccatccaagcccacgagcccgtccatttcgccaaagcctgcaaggcctcgcgcgcatcccagcaacgcatcccgtacttcctgaccttggacaccgggcattcggccagaatcatcatcctgtacgtctggttgtcatcgattcgtccgttgcgtcggaccagtccggcccagcgtgccacctgctctatcgtcacctcgaagctctccgtggtcttcctcgcccggatgaactcgttcagcttcggaagcagtctgattcccgcgtccttcaacgtgatgttctcgaacgtcgctctgctcataatccgtaatccccttatcgttttcatgtcccttttgggagtgaggctggagaggtcaagacccgaagattctcggccgagacgcgcaacacgtaatctcggccgagaatcctcaagtgggtctcgctttcggtcggtcggccgtcgattgcaagagcgggccgaagcccgccgggaatggtccccaaatccagccccacacaatcgcgtggtgatgctgcccgattccgcctttaccagcggctggatagggtcggtggcaacctcttcgtctcacaagtaccgcagttgcaatgcggccggcttcccgccaccacagcgggcataggtagggctaggcgtagccatacgcgccatcacagccattacattctcaatgacccgaatcagcgtcgggcacgcgaaaaaatacgaacgaatacacgcgaatacatcgccgaataccgaataatcaccgctactccggcccgtccggcagaatatccagacacgagatcagcgcccgcacctcctcccgagtgaacgcatacaacttcgccatgcaatcaccacgctccgtgtacggcgtgaccaccagcatcacgccatcacgggtacgcaccgactgaaaccggtaacccatcgacttcggcgcacccctactcatggccaaacctcccaccgatacgctccggcacatccgccaacaccatgcccgcacacagacagatcacgcccacgcaagcccacaagcccacgacggccagaatcaaacccacgaacaccgcacagaacacgagaacacccttataaagcccgtgcatgcttcgcctccctgataaccctggcgaactcacggttgatacgcaccatgtcacccatactcaaaccgcccaacgcgaagtaatccccatcgacactgaaccgaataccgaactcgtagggactgccaccatcaccggtcagcttgaactccgcactgaaacggttcctgctggactcgggatcaaacaccgacattggttgcctccttcagtgcttcatcgatcttgtcgcgccactgacgcaaatcatcgacgctgataatcgcatccaaatgagcgtgaggcccatagaaacccaacaggcgaacacggaaccgcccatcaggctcacggaagacacgaatacgactatccatggcaaacctccatcgtttgaatggttgaaaggggttccttcccccgccgtaggcttgaaaagaaagaaccaagccacatgacgaacgaacgaaggaaggaagaatcatgattgaagaagcgctgaatatagccaatggtttggcatccatagcggcgctgatatccttcagcgtggccgtctgcacatggaagcggaaccgcgaccgtctcatggacgggatgctcaacgtcggaagaatagcggagagatcgccacgcaccgcaatacgattccagaacgtcggaggaaccggtgtgctcatccaatcgatatggtttagatgcgagtcttattccgccgggaacgtcaacgacccaaacatgcctcgaaacgtccttatgcccggagagttcttcaacgaatacgtgaccggcgacgccgaggacgtggtggtcatctacgcgacgcataacgacgtcaccgtgcgtcacatcgacagattccagctggacggcaccagcgcgttgcctagccgaatacggcaatataccaagcccacccgcaaaatgcgaaaagcgatgaagtaccgctgtggcgaattgttccaaaacaccccggactgcgctccacagcgcagaacaattcccgcgacgatgcagcccaaggacgggggcccgctcgatcatgcaatcaactggctcgacaccaacggataccacgcaatacgcgggggaataggctgaccagctcatgacacacccccggagacaaggaccaccactgggagagatgcaatcaacaaccccgcaaagcccacaagcacgccaaaggcgacacccagccaatcgtcctcaagaaaactgatgacagagacgtatccgcccataccaaggagaaacacgcctgcacaaaaaacaaacagcaacacggcacccgcaagaatcgtcattgcgccacctccaacggtttcgcataatcggaacgaccaagaaggaaatcgacgctcacatcgaagaaatcagcaatgcggctgaggtcacgaagagtgaactgtgccttgccggtgaacttctgtgttactgctgatctcgtcacgcccagctcctcggcaagcgcagaccggctaaaatgtgcgttgcgaagaaccatgtccactcgcttagccgttgttccaatacatttgttagccacgctaaacactataacccatgttttagtcacactaaacagaaagtaggtgcagaattgctaaattctgcttaacaacatggtagagtgttaagtatgagtacacaaactttagagccggaaacccaagtgattccgttggaaaaggtaattagcactaacatgcgtgtagcgcttgcgatgcgcgataagaaccagaccgatttgtctcgcgctctgggcgtgtcgcgtggcttgatctcgcagaaaatgaatggcgcaacgtcgtggacgattccagatatggaaaaagccgggcaattccttggaattgcaccggccaaattccttgagcctaatggcttattggtagcggggcatggatttgaaccatggacctctgggttatgagcccagcgagctaccgagctgctccaccccgcgtcggcttgtcttcaagacagctctattaactttacgattacttccaaatatgtcaaatcggcgtgtcgtgctcgttcggccgtgcgaaatagcgtcgcaaatagcgcgttatccatttttcctatacccgtttcgaccgatcgccggtgcaggggagtgcgccatatccgaccccgcaccataatagaagcatgcctatcaagattcccagcggccttccggccagagacattctcgactccgaacgcattttcgcgctagaaaagcccgaagcggagcgtcagcgtgtgcgcccgctcaagctggtgatcttgaatctcatgccgaagaaggttgaaacggaaactcagctgctgcgcctgatctcgaagagtccgctgcaggtggagatcgatttcatgaagacctccacgcatgagggtacgcatgtgagcgccgaccatttagtaaagttttatgaaaccctcgacgcgttccaagacaattattacgacggcttcgtggtgacgggtgctcccgtcgaacatcttgatttcgagcaggtcgattattgggatgagttcaagaagattctcgactgggcttccacgcacgtgttctccaccatgtatttgtgctggggcgcgatgggtgcgctcaatta

SEQ ID NO: 422 - DNA, 4040 bp, Unknown
  R48_24m  MAG No. k141_13464
ctgtggaacacgaccggcgcgctgatcggattcgcgctggccatgctttcgctgcgcctgattccggcgcgggtcgccgatatgacgccgaccaccacacctggcttcatgaggcggctgatcacgttcatcatcgacatgacgctgatcgggttcgccgtgatgccgacgcatctgttcgtcatgatcgtccgctcaaacctgccctcgggctccaacggctcatggcagtcgatggaaccgttcgactggaccggctcgatcctcttcctggcggcgctcatcctcttcgagggcgtggtgccatggttgcgcggcggctgcacgttcggcggcagcttcacgcacatgacgatagagacccggccgcgcgaagggtggcttcgcgtggcgttctatgtggcgcgcatggcgacgctgatcgccgtggtgtggtggcatagtggcggattcaatctgctggtgttcatcggcctcggcatcttctggctggtcaagcgtcagatgccgtacgacctgatataaaccggcgctccgctgcttggcgttacaggaaaacctccgaccactggtcgggattcggaatgctgcgcagcgggccggccaacgatacggccaatcccgctacggaacagaccacggctacggccatcaccgccgtgaaaccgagatctggctgttgcaacagccagccgaccatcgccgggcatgctgcgcccagtatgccgaccgtggtttcaaatacggcagaagcccgcccctgcatgttgtcgggtgtcttgccgtagagaaagcccagcagaccagcgttcaacgcggggaacggcaggccggccagaatctggcagatcagaatggccgcgtagctgtgcaggaatagcagtggcatctggctgaccacgaacaacgccagcgcgcccgcaatcagtttccctgtgggaaccatatcgactagcttgttggccaacagcgagccgaccaaagtactcacgcccattgccgtgccgagcagtccgatcatgaccgcgttggcgccacgggcggccaacatgatctgcgcgccggtgatactggctacgcaggcgatgttcacaattgcaccgagtatgatcgcggataggaagacgcgcttggtcagggcccatcgccagccttcgaccaagtgcgtgggaaatggcacaacagaagtgccgtgggcccaaacggcgaccacggcttagcgcgacgagtcaacgcgcattagctgtctgcgaacgacaccaacaccttgtacataacaatgccctttgcaaaaaccaaactccaattgttgtaccagttcgagcacgggaccaggcacgtcactgggctcaacataatcggccatcaatggtttctcggcttcgaggggctgatttcgtccggtggggacatctacttggctttcgaggggctgctcaaacgccaaaccgcgagtataaacggctttgtggcaacgacatgacgccatttcggagccttgcctactcgggcatcagccccttgaaacgcaagtagacctccggcgaacgccaaatcagcccctcgaaatcgagttaggcgttgttttcgcgtttgcgctgccgttcgagtgcgtaataagccgcgtagcagcaggcgacgaacgggatcatgcaatacagggtcgaacgctgcgtatcatcgagcaccacgagcaccagcgcgccgatgcacatcacgatggccagccacggcagcaccgggaaaccgggcgcacgatagccgagctcatcggcgctgtgcccatcccgcgcccattcgcgccggaaacggatatggcacacgcatacggagaaccacaccaccagcgtcgccaaacctgacacggcgaccaacaccagatacacggtcgaggcggcgatcacggaagacagcaacgccagcagtgagcccgccatgctgaacagcacggcccacaccggcacaccacggaaattcgtcctagcaaaacgttcgggaatcagccgctccttggccagcgaccacaccatgcgcgaacacacgtacaggccggagttcgcggcggaaagcacggccgtcaacaccacgaagttcatgatgtcgccggcgaacggcataccgattgactggaacaccagcacgaacgggctcgtatccacgccggcctgatgccaggggatcaaggccgccatcaccagaatcgagccgatgaagaaaatcgccaggcgcagcaccgtggtgtgcacggccttgggaatcgcacgcgagggatccttggtttcgccggccgccacgcccaccacttcggtgccggagaacgcgaacaccacggtcagcagagtcgagaaaatcggcgcgataccgcttgggaaccagccgtcggccacgaagttgcccagcaacggcgcggaatcatgaccggcaatcggtatggcgccgaagatcgccagcaggccgatcacaatgaacgcgatgatggcgaacaccttgatcgacgcgaaccagaattccgcctcgccgtacagccgcacggacatgatgttgagcgcgaacaccaccacaatgaacacggccgaccacacccaggacggcgaatgcgggaaccatcgctgcatcaacagccctgcggccgtgaattcggaggcgagcgccaccgcccagttcagccaatacaggatggcgatggtgaacgcggtgccggggccgatgaaccgcttcgcatacatgtggaagctgccggcgtacggcatggccacggacagctcgcccaacgacaccatcacgcagtatacgagcagagagccggccgcgtaagcgaggatcgcgcccaacggtcccgcctgatgaatcgcgtagccggagctgacgaacagaccggtgccgatcacgccgcccagggagatcatcgtcaggtgacgcgactccatcttccgttcaaggccggtatcgtccttgggtgtgccggctgccgccatgctcgggtctcctttggtcgggtgaacagttgtgtctcgtgtcggttgtgcgggcggcgctcgatgccgcctaccatatgatagcggtaacacgaacagcgagtggaacacgaggagtttggaatgatggaactgtatatcggatcgcatctgtcgacggccggcggatggaatgcgctgctggaacgttcccatgaggagggcggtaccgcgttcgcgttcttcccgcgttccccgtacggcaagcgttcgaaggcgctcgacccggccggcgcggcggcgttcggtgcgcgtctgaaggctgagggctatgggccgttggtcgtccatgcgccgtacgtctacaatctagccggcaaggatgaggccaagcgcacattcgcgatcgaggcgttggccgaggacatcgagctgctgaccgccatccgcgaggccggccaggaggtgtatatcaatattcatcccggcgcgcatgtgggccaaggctccgagaccggctgccggctgatcagcgagggactgaatcaggtgttcgagcgtacgaccggcgtcatggtgcttctggagaccatggccggcaaaggcacggaatgcgggcgcaacttcgaggagctcgccacgatcatggatggcgtggagaacaaggcgaacgtcggcgtcacgttcgacacctgccatgtgttggatgccggctacgatttggtgcacgactacgacggcgtgatgcgccagttggatgaggcgatcggcttggccaaggtcaaggcgattcatgtgaacggttcgcagttcggcctcggctcgcacaaggaccgtcacgccaatatcggcgagggccagctcggcatcccgttcttcacgcgactggtcaacgacccaaccatggccaagctcccgatgattctcgaaaccaaggagcagacgcccgccacgcatcgcgacgagatcgagttgttgcgcggattggtgcaaaagtagtcgtagtcgaccaatgtcgagcagaagagacctgtttttgactgatggccatacgaggttagttatcagcggggtgttgattgatcc

SEQ ID NO: 423 - DNA, 5990 bp, Unknown
  R48_24m  MAG No. k141_13733
gcgccgaccagctcggccacacatggcccctcaccgtcgaccacggcaccgtcagctgcacgcacaacagcaaaggcgatcccgtcatgcgcttcaccgcgcccgacggcacccaatacgccctcaaccagaccagcgacaacaaggacctgcccgacatcaatcagctcctcgccgacggcaaatccaccggcaccctcaccagcttcgccttcaccgtctgcgacgtgaaataatcatgcgcccgctgccggcggccgtgtcgatgtcgaccaccgtgcgcataccgcgagaatcctgtgacgctgacggttcatcatcgtcttgcagtcaggaccggcgcggttccgccgccgttttctccgtaacaatcgcgtatagcaccagtgcgaccagcacgacgagccgggtccaatcggaattacggatgagcagcccgacgagaatcaggacgtcgtagaacagcgtgcgcgcccaccgccacgggtattccttacggacgcgcatcgtctccgccaatccccagatcagggcgcagacggcgatgataccgttgaaccacagcactatgggcctgccctgcggatcggtgtccggcatagcgagattgctgaagaacatcaccagagcacccgtatatacggcctcgggcgcgaccgacaatcttccgccttcaacgcgaggatctgacatgattacctccttattgggggatccgtcaacgctaacgaatcatgcgaaaaaccattatatttgaatggtatgagcggggctcaagcattcacaacatgctgtcaagcaatcgtatgacaagaatcatccgtttacggcatcgccgccggatgaccacaccagcagggcacccgcgagggagacgacgatgacgccgatcacggccaccgcggtgatggtctgtcgcaatatcagcgcggcgataatcacgctcatggcggggtcgatggagaacagcgtgccgaccacgcgcgccgacgtgatacgcccggacaacgtgtccatcgtgtagggaatcgcaactcccagcaccgccgaggctgcgatgacgccccactgggcggccgacacatgcggcgcgcgagtgatggataccggcgaagtggccagcgccgcaaccgtgaccgacagggcgagcccgtcgagcccggtgcctgccttgccgacccggtcggcgaagagcgtgtacaggccgaagcacacggccgagcccagcgcgaacaggtagccggccggattgaagtagccgcccggcgtaaacgagatcaagcccacacccaccagcgcgaccaccgcgcacaggccctcgcgccagtgatgcgaaccggccagggcgaccacgcagggtccgaggaattccagggtgacggccacgcccatcggaatgcggtcgatggccgagtacaggcagacgttcatcgccgccatcgcaagcccgtagattacgatgcccagccattcgcctttcgaccggccagccagtttcgggcgggtgagtgcgagaatgacgatcgcggcgaccagcatgcgcatcgaactgaccggaattggtcccaacgcgccgaacaacgacgccgacagggacgacgacgtctggatacccaacgaccccaccatcaccatgccggccgccgccatcacacggccacgcgccgaacgcggcgcccgaagcttgcccaatacccctcccctgtcacggccattcccacacgacctctgcgccaccaatgatagtgttcggcgaagactcgcgacgtgcagagtcgactctgtatggcgggatcagcggaaagcggcaggctcactcccgcaacggaatacggtgagaaagctggctgccggacgattacgatccgaaacagtgcacccgtatacggcttcggtcagacacgtttcaccgccttgaacagcagacatgcgcttatcgcggcgatggcgacgccgaccggaatcacgtaaccggcgaatttcaccccgttcaacacccatgtggttggtatgacggcgtacagcatcggcgcgtcctcgaacatgccggaactcaccgtaagtccggcgacgatgaagaaggcaacgacgttccaggcgacgagaggactggcatagagtcgcagaacgaagcatgccagggaaaggacgacggcggtgaacgcaagcatcagaatggtacgcgacgaaagcggctcgttgacgacgagcccgacggcaagcccgtacagcaaagtcaggcagacgttgatcacgacgccgagcgacagcgacttcacgctgaagcgaagcaggagccggtcgtggatgctgaaggaacggtacgaggagggcaccctcgcatgggagaagacgagaccggccgcggttacgggaagcgccatcaccatcgccgactgcaccaccgcacccgtgttcccgtaacgcaaaaagaacaacggaaacagcagcacggccacgaaggcgagcgtcgaccagcggatcaccgccacacgctcaatacgcaatagggacttcatttcctctccactccttcgcgacggaaccggctcaacagcacataggcaaccaaaagcaccacgatcgggacgacgaccatcacggggccgacggacgctcgactcgtcgcttccgccggcgacatcacggtgccgttcaggttcagcccgacggtccgtagggcgttcgcgacgtagggcgtcgcatagtcgggaaggtcgcccggcaggagaatccatgcatagcaaaggatggccgagacgattccggcggttctgggatcggcggcgatctcgacgatcgagtagatcagggaggtcgcaaggctctgcagcacgacgaagcacaggacagctgccagatgcgggtgcattccggtacccgtcaggaccatgatggcgtcgaagcacagtacgccaatcaggttcacggaggtcaggatcagggcccggaacacggccctgagcgagcatggcgtccacgcggaatacacgtggcgcggcaggccaccgtagtgcgccttcgcgaccctggcatcgcatgcgaagagcagcgaaagacagatcaacggctgggtggcggtgaaatagacgcaataccctccggttatcggggttccgttcgccgcgcttgagatccacgcacccagcagaagggacgagacggccccaaacaccgcggcgaggaaataccacgtgttccagtagtaggcgaccaacgcgcgaacaggggaaacggcgttcaagaccctacctcccctgatacagatccgcgaggttcaccccggtcagatccgtgacctgcacggcccggccgtgacgaatcatgatgcactcgtccgggacgccctggatctcatgaagcagatgcgtggagatgacgacgcagttccccttgtcccggtaggcgcgaagcgtttcggacaaggaggctatgccatcggggtccagaccgttctgcggctcgtcgaggaacaggaacctcggatgcggcacaagggcgaggcacagctccagacgctctttcatgcccgtcgagtagtccttcgccttccgcccatacaccgcgcgattgatgcccacaccgtccaacgccgcctccgggtccacatccagaccccagaacgcggagaccacctcgacgttctctctaccactcaggtaaggaaagaaactgggatggtctatcgccgcggacatctcattgatattcgtccctgtgtacgtgacctctccgctcacgggctttatccgtccgagtagcgtcttcatcaacgtggttttgcccgcgccgtttgccccaagcagacagataatcctacccgtgctcaaccgcaggttaatgttgctgacgattggggaacccttgtacccgatcgagagattcgtagccgatataactggcataatcacccttcacgaaaggcgggcctgaaggcaaaggcaggatgccttgcccagacccgcgcgttgcaatgtcgccgctatttcacccttcagcggccgcaaacgcaacaacatgtcaggccaatcgcatgacgatagctccatgctccctcgattcgccgaaactatccatcggccaaaggaatgaacctgcgcatcatccgcaaggacgatgcatccgactcccatcgcacacttgccgcccccggtctctctcttcccccccccccaaaaaaaatggcgaagggcgggttccagtgatcgtcgcaacgcctggctgactgatgggagggccaggtggacaggtgggtgttcgagggcgtggagtacgcgacgcgtggcgagatgtgcgcggcgcggcggcgccgctacgccgagctgctggaggcgggcatgaacttcacgcaggccgcgcgggcggtgggcgtgtccaaacgcaccggcaaggtgtggcgcaacggaaggacacgatcgaacggcaggaacgagaagccatcggtggactggtatcgttccaccgtggacattccccaaaagatcagttcgaggtatctgagccaggacgagcgcatcagcatcgccgactggcggaaggccggcatgagcgtgcgcgggatcgcgcgcacgctcaatcgtctcgcgtcgaccgccagccgcgagctggtgcgcaacacgaatcccgcgaccggcatgtacgagccgtaccggccccagcagatgagcgcggacggcccagacgacccaagcccgcgaagatccatacggtgcccggcctgctcgcatacattcgtgcaggattgcgggcgcattggagtcccgagcagatcgcggggcgcctgcgcgccgatttcccggataatgatgctatgcatgtgtgcgcggagacgatctaccaggccatctacgtccaggccaaaggcgaactgaaaaaggacgtcatcaaggccctgaggagcgggcgcgcccaacgccggccgcacgggcaggcgggttcgcgcaggcccgtttccgcgagctcatgatcatgatcagcgagcggcccgccgaagtcgaggaccgggcgatacccggtcattgggaaggcgacctgatctgcagcgcggccaacaaaagcgcgatcggcacgctcgtggaacgctcgacacggttcacgatcctcctgcacctgcccgacgggcacgacgccaaacacgtccggcaggccgtcatccggaaaatgcaatacctgcccaagctcctgaggaactcgctgacctgggaccagggaagcgagctcaccctgcacaaacgcatctcgaccacgctggacatgcaggtgtatttccgcgacccgcattcaccctggcagcgcggcaccaacgagaacaccaacgggctcctgcgccaatacgtccccaagggcaccgacctgagcgcataccccgaggactacctcgacgcggtcgccgaggaactcaacgaccggccccgcaaaacactcggctacaggaaaccatccgagaaaatactcgaactcatcaacacagcatgatacgatcgcaccaatccaagaccgccatcaagagcggcaaaacacacaggtgttgcaaccaccactaaaatccgccaagcccaccttgccgaatggggtgtcgaacatggaatccgtcttggggggggcgtgcggtagtcgcattcgtaacaacaatccgcttgaatgagctgctgagcaaatagcaggtctacatgcctgctttgaaccagccgatggcgatttgagtgcgattgcgtaggcccaaagttgcgaggatacgggtcacggcacgtttgacggaggcaggttcgacggtgagttgattggcgatttcctcgttgatgagcccttcggagatgagtgcgcagatttcacgctggcgaggggtgagtgggggctgcggacgttttcttggagataatcacgcagccattccttggctctgacggtattgtaccggactcatccaaccgagtgattgcttgatgcgctcatggttgtaccagtggatgtaatcgtcgatcaggacgagc

SEQ ID NO: 424 - DNA, 7542 bp, Unknown
  R48_24m  MAG No. k141_13963
agagtgttacccccgtcggacaaaccaccccccgaatcgcttcgctcttcgacccccgccggcgggggtcgaagagcgaagcgattcggggggtggtttgtccgacgggggtaacactctcgacggggagagtttgatcggcatcaacgggggtaacgcgctcagtggggtcaggacgtgagctggcttggaaccaagggtgctcctcgctggtgtggccggggaccaagtcgagcagcacgtgcatgccgagcgtgtgggcgcgctcgaacagggcggtcaggtcatcgttggtgccgtagcgcggtgcgaccttcgtgtagtcgcgcacgtcatagccggcgtccttgaagggggagtcgaagcagggattgatccatagcgcgttgcagccaaggtcgcgaatatagctgagatggttggtcagtccgtgaagatcaccgatgccgtcgccgttcgagtcggcgaagctttgggggtacacctcgtaaaaacgggcggaactcagccaggatggacggggggatgcttcggcgtgtcgtacgcggcttgacatggaaactcctttgtttatgcgggttcaaggctatgcctatcgattgcaataataccagcaaaaaagaaactgcatacgtatgcaaaatgagtgttatactaaaaaccaacgatgttcagcaatgttgcaaacgtcaaacatttcaaggtctaaccacgataatgcgagcgtatgcatcattcgttttcctatagaactgaaaacgtgtgcatcggaatcatcggattaggacaccgaatcaggaaaggacagatcaatgaagatcgattggaagaaggctatcggcctcactgctgccgcagctatgctgctgcccctcgccgcatgtggtggctccaacaatgccggcgacgcaaagtccggaggcaccgaagacgtgaccctgagcgtgtgggccccgcaggaggaccaggacggcggcaacgactcctggctgagccaggtcgaagccaacttcgagaaggagcaccccgagtacaagatcacttggaagaacgacgtgctctccgagggcgacgccgccacccaggtccagaccgacccgaccgccgccgcggacgtctacatgttcgcctccgatcagctcggcgctttgatgaaggcccagggcatcggcgagctcggctccgacgccgagaagcaggtcaaggagcagaacggcgacctggaagtcgcctccgtgaccggctccgacggcaagatgtacggcgtgccctacaccgacaacacctggttcatgtactacgacaagtccaccttctccgaggatgacatcaagagcctcgacactatggtctccaaggccgcggtcgccttcccgctcaacgattcctggtacatcggtggcttctacgatggcctgaccctcttcggcgaggacggcaccgacccggatgccggcatggtgttcccgaaggacgccggcgacatcaccaagtacctggtcgaccttgccgccaacccgaacttccacaacagcgccgacaactccggcctgtccgagatgcaggccggcaccgtcaaggccttcttctccggctcctggtccgctgccgacatcaaggaagccctcggcgacaacatgggcgtcgcccagctgccgaccttcaccgtgaacggtacaccgaagcagatgaagtccttcgccgccaccaaggccgccgcctacaacccgaacgccaagaacccgaaggccgccgcccagttcgccgcttacctcggctccaccgagtcccagaagctgcactacacggtgcgcaacatcatcccgaccgacaagaccctcaccgatctgaccgccgacgatccggtggccatcggacagaccgataccatggccaacaccgccatcctgcagtccggtctggccggcatggctgactggtgggatccggccaaggccttcggcgacgccatcctcaacaaggaagtcaccgcagacaacgctcaggccaagaccgacgcctgggtcgagcaggtcggttcctacgccaagtgatcgcttgacggctcgcagcacttggccggcgcggaccactcctccgcgccagtcaacccaacctataaccgaataaccaacaatcaaatatgaggggtccgtaaggtacgccagctgcgggcggatgatgtgaagccgttgcatccgcccgcagcccctcacctaccaacggtttcaaccttctttgtttttcctccttcattgccggcagagctcgggcagcgtgcatgcggtgtccgggctttgaacgggtttaagcgaagacaaacaaacaacaagccgggcgttgcggcccggagcaacggtttccatcatttacagtgagaggcggtagggtgcgatgacagcagcagcactttccccgcgcgagatgaagcgccgccgcaaaatgggtgcggattatgtggcgccctcgccatactcggtaggcaacgcgcttaccaagggcgatgtgttcaccaaactatccgcagtcgtattcggactgggcaacatcgttcgcaaacaatacgtcaagggcgtggcactgctggcccttgaaatcgcattcttcgtatttctgttcaccaacggcatcacgtgcctgtccaagctccccagcctgggcgaccagaagcagggcaaggtactcgtcgacggcttctgggagtacacccagggcgacaattccgtggtcattctgctgtacggcgtctgcactgtggtgctctgcctgctcttcgtctatctgtggacggtctcgctcaagtccgcatacaaggccgagtgcctgactcgagaacagggcaaggccccgagcctgggcgacgatctgcatgagctgaccaatgccaaggtgcaccgactgctcatgttcctgccaacgctcggcattctggtcttcaccgtcctgccgttgatcttcatgatctcgatggcattcaccagctacgaccgcaaccatctggtgctgttcgactgggtgggcttcgacaacttcgccaaggtgttctccaacagcggcggcaccgtcaacgcccgcctgttcctgcaggtgaccatctggacgctggtctgggcgtttttcgccaccttcctgaacttctttatcggcatgttcttcgcgatggtcatcaaccgcaaaaccacgcgtttcaagggcttctggcgtgcatgcttctccatgtccatcgccgtgccgcagttcgtctccctgctggtcatgcgcaccatgcttcagcccaccggcgccatcaaccgcctgctcatggagtggggttggattgatcaggctctgccgttcttcacggatgccacttgggcccgcgtcacggtcatcgtgatcaacctgtgggttggtattccgtacaccatcatgcaggtcaccggtattttgcagaacatcccggccgaccagtacgaggcggccaagatcgacggcgcgaactggtggcagatcttcaccaagatcaccatgccgtacatcatcttcgtgctcaccccgtacctgatcaccacgttcaccggcaacgtgaacaacttcaacgtgatctacctgctgtccggcggcaacccggtgccggtcggcgattccgcaggcaagaccgaccttctgatcacctggctgtacaagctgaccgtcgataagaacgattacaacctcggtgccgtgattggcatcatgacgttcatcgtcctcgcggtggtgtcgctgatcacctaccgcaattccggttcctacaagaacgaggaggcattccgatgagcaggcattccgagcagaccatacagacgacgactgcccgtatgaagcgacctgaatcgcacggtctgatgcatgacaccaagaagcgtcgtattcttggcgacgtcctctcctatctcttcctgggagtcatggccatcatctggctgattccgattgtctgggtgtttgcggagagcttcaacaagaacaccgccccctacaccaagacgttcttccccaccgagttctcgctcgacaactacatcacgctgttcaccgaccgctcggtgctgaacttcccgaagatgttcatgaacacgttcatcgtggcgtgcttcgtgtgccttatctcggtggtgttcgtgctgtcagtggcctactgcatgagccgcatgcgtttccgcacccgcaagaccttcatgaacgtggtgctggtgcttggcatgttccccggcatcatggccgtttccgccatctacttcatcttgaaggccgtgggcctcaccagcgaaggcatgaccaccatcgccctgattctggtctactccgccggtaccggcgcgggcttctacgtgatgaagggatacatggatacgattccgacctcgcttgacgaggccgcgctgctggacggctgcacccgtctacaggtgttcaccaagatcatcatcccaatctgtaagcccatgatcgtctaccaggccatcatcggcttcctgaccccgtggctcgacttcgtgatggccaaggtgatttgccgcacgcagtccaattacacagtggcgctgggcctgtggctcatgctgcagaaggaatacatccagaactggtacgcgcgcttcgccgcagcagccgtggtgatttccatcccgatcgccatcctattcatcgtcatgcagcgcttctaccaggaatcgatgtctggttcggttaagggctgacgcgttaagcagacagcccagtgggctgtctgtagcgtcagcctgagcgaggcgatagccgggcgaatgtcggattgagcctcgccgcaggcgagtccgtaattgcaggactgagccgttacgtagtggggtttaacttggctcccctctgaagaggggagctggcgccgtaggcgactgagggggagcaccagcttacgccaatactcccctcagcgaggggagccagaaagcgagaaaggaccgcaatggagaggccgatttccgtggtggcggtggcggactggacgcccgccgagctagccatgccatgccccgattatcccgtctaccaggatggcgatctcggcgcgttccccgacgccaagggcaccacgttccgtatctgggcgcccacggccaacggcatcaccttgcgcctgttcgactccggcgcaccctatgacaccgtcgagcccttccagtcccgtgaaatgacccccggcacagccggcacctggcagattcactgcgacggcatcggccacggcacgtactacgactatctcgtccgtttcccggacggcaccgtcaatcgcacggcggatccttgggcccgcgcggccggtgtgaacgggcgccgcagcatggtcgtggacctggcgcaaaccaatccggacggctgggagcaggaccgccgcccgcacatccccagccgtgacctggtgatctgggaaacccatatcggcgatttcagcaacgacgagcacagcggcatccccgaagaacatcgcggcacctatctggcgttcacccatccggacaccagcgtggacggcgagggcgaattccccacctgcgtggcctatcttaagcggctcggcatcaccgccgtacagctcatgccgttctacgactatggttccatcgacgaatcgattccgcgaaccgaccccaagcgcggcttcaactggggctatgatccgctgaattacaatgtgcccgaaggttcatacagcaccgacccgtatgacggcgccgtgcgcatccgcgaatgcaagcagatgatccaatcgctgcacgcggccggcatcaaagtgatcatggacgtggtctacaaccacatgttctccaccgacaactggttcgagcgcatgatccccggttacgcgctgcgccgccgcgccgacggcacgttcgccgacggttcggcctgcacgaacgatgtggccaccgaacatccgatgatgcgcaaatacattgtggattcggtggtctactgggctcgcgaataccatgtcgacggcttccgattcgacctgatgggcctgattgacgtggagacgatgaacgtcatccgcaccgcgctggaccagctgcccgacggcgccacaatcctcatgcacggcgagccttggaccgcccgggaaaccgcgctcgaacccggcacgattctggccgacaagcgcggcatgccttacttgggcccgcggataggcgcgttctgcgattccacgcgagacaccgtgcgcggccacgtgttctaccagtgggttcccggatacctgaccggtgccgccgccgattacgccgaggacatccgccatgccgaggatgcctggcgcggcacgttgcgcgaaaccgccagcgtggggcaggtggtccagtacgtttccgcccacgacgatctgaccctgtgggacaagctgtgtgcttcgatgcgccgagtgcccacggatgtcgactacgacgcccaggacgagtccagcacggatctgatacgcgccaaccgtttggccgccggcatcgtgttctccgcggccggtgtgccgttcatgctttcgggcgaggagttcgcgcgtaccaagcacggtgtctccgattcgtattgcagcccgtccgccctgaaccagttggattggcggcgggcgcagcgcatgggctcgttggtgaatcattatgccgcgctgattcgtctgcgccgtagcaatccggcctactttggcggggcccgcatgatcgtgccgcgtaccgatgagatcgtggtgttccgtgtgggcgacgattgcgtggccatcaacccgaccggcgagccgcggactcagctggccaccgatctggagatgcccggcccgtacggcgaagtgtcgaaaatcgctcccgacgaatgggcctgcatctattgctccggtgacgagatgccaggcgaagtcgagaaccggcgattgcccctgccgtcccacaccttcactatctggcggcgcaatcgtgggtgaatatgaagcttgctcccgccggtgggggctgtcgaacagcatactgaacgtgatcaatgaacgaggggtcatcgctggtcatgctgccgatagcccacgccggcggggcttgccatatgacgtgattttcttcgacctctacggcactttggtggacattcgcaccgatgaggagtcggccgcggcatggggcgcgctgcgcgccgctctggcggaatacggggtgccgtatccggacaatgcttctctgagggcccggttcgaaacgttggccgagccgattcgcgcggcggcctttgccgctcatggcgcacacgccgaacctgatctgctgccggtgttcgccggattgatgggttgttgggatgcggcattggccgatcttgccagccgggccgacgccgtattggcgaggttcagagagcgcgatgacgtgatatgccgcgattcccaagccgccgcgcagacttcgcttgaggggaacgctgccgttcgggaaagccggatggatatggcccgggcgttggcttggacgtttcgacaggccagcaccagtatgctgcgcc

SEQ ID NO: 425 - DNA, 5971 bp, Unknown
  R48_24m  MAG No. k141_14073
acgcttcggaatcacgttgaggaggatggcggtgtccagcatctgatcgtagtagctgaagtcgttgctggggatgaggccgatgccggcggcctgctgcagcttccagtgcttggcgcgcagttcggcggcggtggccttaacggcggcgaggtcgttggcacccttccagtagccttcgatgatcttcttcagttcgcggttctgcccgatgcgggggaagccggagacggaagtcagagtggacatgaatcctccaatgtatgcgttcgtaacccgacttagggtagcaaaacatccggattccaccccttataaatggccgcagagtgtcgttatagatggaatttatatccgctttagtcgaagtctttcacattgataaccgcgagcagttcgccgctgtgcacctgccattcgtcgaacggtttgttcgatcccatgatcacgatggatgcgggcgaaagtcccaagttgagcaggtcgagtcgttcgccgtcggagtcggcggaggcgagccattgggcgctgatcgacacagtcggctcgtggcccactatcatgaacacgcggttcttggccttgacgtgggcgagctcgtcgaacaccgcctgcactcccccgtcatacaggctgatgcggtagtcgacgatcggcttgtcgccaaaggtcttgagcatgcggtccagtgtctggcgcgtgcgggtggcggacgagcaggagatctggtcgggcaccagtcccagcgactcgatgcccttgcccacggccttcgcctgtttcagacctttgtcggtgagctcgcgctccgagtcacccttgtcgccgaacggctcggccttggcatgcctcatgatgatgaggatatggtcgtattttttcgctgctttggcgactttgctcagcttgatgcccatccgtggctcccttcacgaaccgtctgcccggtgtggcggtgtggtgttgcttccagtatagaggtgtgtgagcgttcacaaactcatcgtcgggcggttattcatgcgtgttgccgagttctcccacctgacggtcgaggtcgcgcaacaccttacgtagtttgtggtcggagatgtcgcgcagttccagttcctcgatctgcgcctcacgctgttcgtcggtgagcgagtcgatgtcggtctgcgtgtccttggtcacgcgatcgcgctttctgagcgcctcgaatccggaggccatggcgcgcgagataacaaggaaaccggtatggccgatcatctggtggtcggggcgtacggcgaggccttgggccttccatgtgcgttcgaacgattcctggatctgcggctcggtccagcaaccggccgcgcgcagggcttcggccagtcgactcatctgcgtggtggtagttacgtaactgaccaacacgccgccgggggcaatcacgcggtatgcctgctcgagtctgttccacgggtcgagcatgtcgagcatgatacggtcgaaccagtgttcgggcagttcggcggccacggagtcgaagtcgccggttttgagatcccaccagctgggggcttcaccgtaatacagcgtggcgttggcctgagccactttggcgaattcggggcgcagctcgatcgtggtcagatggccgcgctcgcccacggcgtccagcagattcacgctcatcgcgcccgagccggcaccggactcaagcacgcgcatgccggaacggatgtcgccgagctggacagcctgggcgatgtccttcggatacatgatctgcgcgccgcgcggcatcgacagcacgtaatcggccagtcgcgggcgcatcaccgcatattcccagccgccgatggcgcgcgacgacttccacggcttgttcttgtctttctcgggataaacctggttgacctgcgcctcacgcttggcgtgcacggtgaggatcacggtgccttcggtcttgccgatcacatcgtcatgcagaatcaggccatgctcggtctgcgtggagccgccagccacaagctgatcggtgatcttcttgcccttgcggtcggtgaactgcaccttctcgcctgcggtgagaggcccgcgcctcggctccataacttgctccttgcgtgctcggtgggtcaatcgctacaagtctaatgcatgtaagctcgttggtgaggtgatgacgatgcgaatgcagatgacaagccagatcgatgccggcggcaatgaccccattttcctgatgttccacggttacggcaacgacgaaagcgagatggtgcggattctcgacgccgtatatgcgccgacgcgagccgatgcggccccgtccgcaattgccgccgtacccagctatatctcgttccgtgccacctacgcgaggccctatatgggcggcaattactggtatcccgacggctgcggcgtggacgagcgccaacgcgaatgcgcggcggtcggggatgcggtggcttcactgctggatgcctcggcattcgcccatcgcaggaagatattgatcggtttctcccaaggcggttatctgtcgtatcgtctggtcaaggcgcatccgacgttgttcgatgccgcgatcctgctcagtccttcgttcatgggcgaggaacaggcggcgcttgactcccctacccgattcttcctggcgtatggcgcgcaggaccgcacgattccgatgcccgaccagcaaacggcccatcaggtccttgaacgggccgggcatctgacctatcgcgagtattccggcatggcccatgccatctgtgatgaggaaatcgccgatatccgggatttcctacgtgccatatgatgccggaatagcttcaatatggaatatctccgttcaaagaggtaccggtccaagtagaagcggctcaacaatggcggaatggcgttggccacgcccattcatcgcgcgatggttctgcgatcagctcaattcccctgccggctgatgccgcccttatgaccggtggccttgaatggcgtggcgcgtgccgtcaccttcggccccggcagattcgtactggtattggatcgaccgcggagcccggcagccggctgggactcggagcgtcgaccagtacccgtgatgttggtatgccgtttgccgtcgtgcgcccgtttctcaccagcaccttcaacctcgtcaatatcaatgcctttggcgcgcaaagcacgtgcccaccgctcatccatcgaactcctcacacatcccattcgggtttccacgtgtactgcatgtcgtaggcgctgggcgaacggcggcaggtggttcagggtgatcggaccgaatgcggcggcgtcaaaagacatcgtttgcccccttcgatggtgttggccaacaggttccaagggtcaggcacagcgcctttctcaacccgttcgccgccacgatgaccggcagcttgcgttcacgggttcccctgcaatgcgcctcattatggcaacacgaaccgacaggtgccggctgcgcctaggatgggaaatcattgctgcacgccgaaaagggaaggcgactgtcatgaggtatttcacgaccgacacgcatttcgggcatccgctggtcacggtgttgcgagggttcacgacgttcgatccgacgcgctcgcgctatgaggaggtgcgacgcgcatgatcgcaagaccgccgaggattgggccaaggaggagacgttcggcgcgggtctgacgtttcgtcaggtcgccgatacggatgcgcatgacaaggcgattgtggatcatatcaacactttggtcggcccggatgatgagctgtggattctgggtgatatcggtttccgcacatcgctgacccatctgaagaactgcctgtgagcgctcaattgcaagcatctgcatggtgtgatcggcaaccatgatgactggtggcgggaagaccgccccgcacttaacctgttcgaaagtttggagccgcacgatacggttgagattgagggactcggtacggtcaatctttcgcattacccgtatcgggaggatctggcatacagttggcccgatgatgtggcgaagttcagcggcaaggcgttgccgtttgacggtcgcaggctgctgtatggacatacacatcagctttcgccagatggtgcacgcccggaggcactgaatgttggcattgacacagcattgaccgccgttgagatgtatgcacgctgaacacgcgcctcaacggccttggtctcgtcatctctcgctcacaccaacggattgccggcaagacgggtcaattcggcgttcagctcggggaaatgctcgttgccgacgaacggaccgtattccgtgccggattggaatgggcaccatgcctgaatggtcatatgcttcagtcgtgaataaggcaggatgccaccggtgcgatcggctgcgggatcgctcgccatattgaattggatttcagcgtcgagcatctgtgtatgcattccgccgtgtcgaaatagtcgatgccggaatcatgggccacggccacggtacgtgccgcatcggcggcatccaacgcgtccatgcgcatcacgcccagcgccactcgtgacgcaatcatgccggattgtccgatttcctgagtcttcatagtgtctcatttctgttatcgcgaatcggcgaacgggcactgtccgcctcgttgccgggcagcaatctccattgccgcggcttatgtcaccttatcgcttgaagtgcacttgaaggcaactcgcaggcaggcagcgcgcgctgccgggcgcgtcttcgcgtcttcatgtcttcgctgtgaccgagacatcgttgtgccgtaatcatgcccatttcttgtatgatgacctctatagcaacagagctagggggattccatgaatactaccgattcagccaaagtcaccgatgccaacgccggcgcaaacaatgtcatccatatcccgcacaatcccacgcttgccggattggccacgctgacccgcaacgtggcgtacaagaccggggccgatgatctggtaatggatatcatcgccccgcaatccaccggcgatgacgataaccgccgctaccccaccgtggtattcgtgcaaggcagcgcctggaccacgccgcatcgcgactacgagatcccgcagctctcggctttggcccgcgaaggctttgtggtggctacggtgaatcatcgcgacgcctcgagcgatccccacgacgtgttccccgcatatctcgaggacgtaaaagcagccatccgctatctcagggcaaacgcacgtcaatggcacgtggaccccgaccgtctcggtatctggggcacgtcgtccggcggcaacacgtcgttgctggtggggttgacctccgacgatccgcggtatgaggacggcaccaatgccgatgagagcgatgcggtgaagtacgtggtcagctgcttcccgcccaccgacatgcttgaagctgtcgacgcattcgacgatgagaccaatccattccggctgtactatttcggcccgttcgcggccgtggtgggcgcgacccatgagaccggcatcaatgccgaggtccgtcagcgcgcggctgacatgagcccctacctgcaggtgcgggatgaccagcagtatccaccgatgctcctgttgcacggtaccgccgacaccgtggtcccctaccatcaatccgtcaagatgcgcgaccggctggtcgagcacggcgtggacgcgcagctggtgctagtcgacggcgccgaacatgagtacgatttctggagccaacaggtcttcgacgtgatcttcgatttcattcgtgagcggagctgaacgtaagggcacacgggcgcgtccttgttataggttgccgagttctcttttagccaattttgttggagcccctatctgcgcgaacataccatgacagttctagactgtgttctaggactgtcaatcggcaatgtgtatgaagcgtgatgtgatgggtcagacggcgattgatggagttgagggacttaatagggccgg

SEQ ID NO: 426 - DNA, 2530 bp, Unknown
  R48_24m  MAG No. k141_14540
gccgagcacataaccggcttcgccattggacttgagcaattccatggtcttatcagcatcttcggcgttgactgccagcaccatgccaatacccatattgaagatgttgaacatttccatatgatcgatttcgccggccttttcgagcacgtcgaaaatcggcagcaccggccaagagccgagattgatgtgtgcagccaagccgtccggaatcatacgcggaatgttttcgatgaagccgccgccggtgatatgggcgacgcccttgaccacgccggccttgaacagcggggacagagccttcacatagatcttcgtcggggtaaggagcacatcgccgagcttttcgccatcgagttcgtcaagcacggtgtcgaccgtgtagccggccttctcgaacagggccttgcgcaccagagagaagccattggaatgcacgccggtggacggcagaccaatgagcacatcaccttcagcgatggtggagccgtccacgattgcggacttctcggcaacaccgaccgcgaaaccagccagatcatactcgtcttcgtcatacatgcccggcatttcagcggtttcgccaccgatcagaccggaaccagcctgtacacagccgtcggcaacgccagccacaacctgctcgagcagtgctggatcgttcttgccgcaggcgatgtaatccaggaagaacaacggttccgcaccctgagcggcaatatcgttgacgcacatggccacgcagtcaatgccgatggtgttgtgcttgttggccatcttggcgacgaccagcgtggtgccgacgccatcggtgccggaaatcagcaccggctccttgtatccgagggaagccagatcgaacaggccgccgaagccgccgataccgccgactacgcccggacggttggtgcgcgccacatgggacttgatgcgcttgacgacttcgtaaccggcttcgacgcttacgccggcttcctcatatgcttttggcatatcaaacctttctcgggttcagtgttcttcttgggatgaagtagtggtgtattcgttgccctcgtacttgctcttatacaaggcgaattcaggcagacgcacgcgatcttccggagtgagtgacttcaaaaaatcactttcataatcgtcgagtgcagtcgggtagtcgccattgaagtaggctacgcacagaccgccgtacggggcgtccgctcctagaccaatggaatcgaccaagccgtcaagcgaaaggaaggccagggaatcggcgccgatgaaatcgcgaatttcttcaacggacttctttgcggcgatcagttccttggtggtggaaatatcaatgccatagaagcatggatacttcagcggcggcgagctgatacgcatgtgcacttcggctgcgccggcttccttgagcagctgcacgatgcgcttggacgtggtgccgcgcacgatggaatcgtcgatgacaatcacgcgcttgcctttgaccacgccgcgcacggcggacagcttcatgcgcacgccctgctcgcgcagttcctgcgtcggctgaatgaaggttcgggccacatactggttcttgatcaggcccatttcgttcggcagtcctgccgcttccgcatagcccgaagccgcggaaagagaagagttcggcacgccaatgaccatatcggcctcgaccggcgattcctgagccaggcgggcacccatacgcttacgtgcggaatgcacgttcacgccgtaaatatcggaatccgggcgtgcgaagtagatgaattccatcgagcagatggccagttgggtctggttcgtgtactgcacgatcttgtatccgtgatcatccacgaccacgatttcgcccgggcggatgttgcgaaccagttcggcgccgacaatgtcgagcgcgcaggtttcggaagcgagcacatatgcgccgttcttcattttgccaagggagagcggacggaagccgttcggatcgagcgcgccaatcatggcgttctcggtcatgatcagataggcaaagccgccgtgcacggtattaagcgattccttaagcttgtccatgaaggtgcgctttgtggaacggcggatgaggtgcataagcacttcggtgtcggaattggagtggaagatcgcaccttcgtcctccagcttgcggcgcagggacgggcagttggtgaggttgccgttgtggcacagggccatatctccgtcatggaaacggaagatgaacggctgaatgttgtcggtgccgccagagccggcagtggcgtagcgcacatggccaatcgccctgtctcccttcaagcgttcgatttctcgctcgtcgctgaacacctgggtcaacagacccgttccgcgatgaccgatgagatgaccattatcgttagagacaatgccggcaccctcctgaccgcgatgctgcaacgcgtgcaagccgaagtaggtgagtcgggcggcgtccgggtggccccaaacgccgaaaataccgcattcctcgtggatgtcttcgagttcagctgacaagcca

SEQ ID NO: 427 - DNA, 19217 bp, Unknown
  R48_24m  MAG No. k141_14577
atccgaatggtatcccgatatcgacgatatccgctctaaaatcacggataagaccaaagcaattgtcatcatcaatccaaataatccgaccggagcgctttatccgaaggaactgttgcagcagattgtcgacattgcccgggaacatcagctcattattttctccgatgagatttatgatcgcctagtcatggatgggttggagcatatttctattgcatcgctggctccggatctgttctgtgtgacgttctccggtctgtcgaagtcgcatatgattgccggataccgcattggatggatgatactttccggcaacaagcgtattgcaaaggattacatcgagggtctgaacatgctggcgaacatgcgtatgtgttcgaatgttcctgctcagtcggtggtgcagaccgctttgggtgggcatcagagtgtcaaagactacatcaagccaggtggccgcgtgtacgagcagcgcgaactggtctatcggatgctcaatgaaattcccggcgttaccgcagttaagccgaaggcggcgttctatatcttcccgaagctagacgtcaaaaagttcaatattcactctgacgagcagttcgcattggatctgctgcatgacaagcatattctaatcagtcatggcggtgcgttcaactggcagaatccagatcatttcagggtggtatatctgccgcgtatcacgatgttgaaggaaaccataggtgagatcgctgatttcttgagtacatatcatcaggcatgatgaccttggttgtttgaaggacattcatggggtgaagcgcgcgcagtatcgcgacgctccaccccaaaatatttatagtcgcattgaccataaatggggttacgatggctctggccttagggtcgagcaatcgttccgtcgtgaattcgcaacgatcataccctctctgggggtaccgatttgctcctgtcgccatcattgtgattcggcaggagccttttgttttcaacgggttgcacctgccggcgatgtggcgtgccaggagcatcgaggtcagcgctgccaccaacgatgcacctttgccctcgttcgtgttcgtgtcgtcgttgttgacgatgtcgtacagcgtgtcgtcgagcagttcggccggcggcatgcccagggtgacggccgcggccgcgatggcgttgagatcccatgcggcgtcgaggttcattctggccgatatggtggccttggtcacgccggtcgcctcgcacagggcctgctgttcgagttcttccttggccaggtgcaggcgcacgttccacgcggcgacttcccgcaggcgttctcccaattcgattgcctgtgtccttgccgtggtgttgccggtcatgtccgttcctttcgtttgcgtgcccttgggggtttgtgcgcaccatgctatgggcggcgcgcttggttgtgcaatacgaccgcctccccggttcggtctggtcgaactgggccaggaaaaacatgggaaacgaaagcgctccgcaccgtgttggcgcttggtgcggagctgatcgacaaccttgggcgggattccgagcgattcaagtgacaagagtcccgggattcgccctccattgaaagagagttatcgcaatgaccaatcctaccatcgcttccgccccgcgtgcggcgggagccatgaaaaccatcccgtcgctgcgtgtgcggatcgcccgcgcgcacctgctggcggtgctgctgcatcccgcgcgctcgtcgcgccgtcgtcgccggagcgcctgagatgggccgggctgtggcggcggtggccgtcgtcgcaatcgtcgtgtgtctgctggcggtgtgggcgttgtgccgcgcggccgcgttgggcgaccgcatcggcgaacggctccatgatgccaggggtcgcgaggaggatgcgcgatgagcgggccggcggagcagtgggcgtggcagttgcaggacgagcggctgagcctgtcggagaagttcgtgttggtgtatctggcgcgaagggcgtattacgacgacgggtgcggcgcgtggccgtcggtcaacaccatcgcggcacattgccattgcacgcgccgttccgtgctgcgcgcgttgaaacgcttgcaggagctgggctacttgcgcgagggtgaccaggagctggccgcgcgcaatccccgcagccacgagcccatccccagggggcatcgttccaaggtgtgggacgtggtgatgaagggcgcgcagaccgagccggaggatatcaccgatcccggcgagaccgacgcaggcaaggacgttccagcgaaacccagtacagccgaaccatcgcggagcaaggagtgcgcgcggggtgacatggcgtcacctgacgcagtgtcacctgacacaatgtcaccccaaggcgatccagccggtgaggtgacatcctgtccgaagagaggtgacatggtgtcacccaatagacaagtgataaccaatgctccccttgtccccctacggggacattcccctcgccggggaacaacccgaggaggagcgaagcgagcgtgatgcaccggattggcgtctggcgctgcctcccaagggcgtacgcgatccgctgtggacgccaggggcggaggatgcggacgagcgggtacgttcccgggccctgcaggaggttcgcgtgctaacgctgatccatgaccgtgtggcagccatcgacccgaagtccgccaggccagcgtcgatgcgcgaccggcgcaaggtccacgaactgctgacggaacgctctctggcggaggtcgagacgatccttgactgggcgtatggcaacccgcgctggatctcatggctggtggacggcacgatggtcgaacgctacttcgcacaggtcagcctcgacatgcgcgccaagcaggcacgagggccacagcgttccggtagtcataccaccgctgccgagctcacgccggtccatgatcccgaccggccggtggcggtcagctcggggctggcctggcgggtgccggtctacggcggcggcatcctgtcggtcgcgttatgccaagcgcacctcgacggcgaagccggacaggccgagtgcccggtgtgcgcctatgaccggcgcaaccaagccacccacgccatcggtctggaccaggccgagcacgccgaggaatcccacgaggaggccaagtcatgaccggcatgacggaagccatgccccgttcgccggaggcgtggaagagcatgggatgctgcgtggatttcccgcagccgtgggccgacctgatgtggggtctggagttcgaggacacgcatcccttggcccgcgtgttccggcaggcgggcgcatcggtatgcgaacatgactgcccggtgagggccgaatgcctagcctacgccggtgccgccggcttggaatggggcttgtacggcggccgctcgtgcaccgaccgccgtcagatcgcccgcctggcggaggccgacggcgtgccctgccgcgaccgcacggtgccctgggcacgccgctggggcctgttcgccgactggatccaagcccatcccgaggtcttcgacacggcccgggacaaggccagcatggaacgcgggcaacgccgatggcgcgccgcaggccgcgcccagcccggagacgggccacatgaccgtcaaaccatcatgcaagcagacaatcaaacaatccgacaaccaagcaatcaaacaatcaaccatgccgacgatccggcgaatggtcccgaatccaaggaggaagcatcatgcgagtagcgttggcgaacgcaaagggcggggtggccaaaaccaccagctgcatctatctggccgccgtgctggcccggcgcggcatcgaggtggcagtctacgacgcggacccgcagtccagcgccagcctatgggcggccgccgccgaacaggcgggagacccgctaccattcgacgtgctgccggccaacatggccaccctcgcccacctgggcggcgccccggccacaaaggaatggtcgatcatcgacgcccctccgcaaggcccgctgctcgacaagacgctggccgtggccgatttcgtcatcctacccacctcggactcgccgatggacctccagcaggcatgggacacgctcgaccgcgcccgacatgccaccagggcggccctgctgccggtgcgcgtcgaggcgaacaccaacgcctgggcccagaccctagccacgttggagcaaaccgacaccgcgcgcttcgacaccttcatcgccaaacgacaaccgatcaagacctcgctcggcatgaaccccaaacaactgtacgaataccgggaactggccgacgaactgacgcgcatcgccaaggaggaactggcatgaaaggcaactaccagccactgccccgacctgtgcccttcgacaaagtcctcgaccaacaggccgaagacaaacaacccaccgggaagaacaacgccggcgaaccgctggtcatgctctccctgcgcctgcccgtccggctgaagaaccgcctcaaaatcgccgccgccgaacacggcacgccatgcaacagatcctgcgccacgccatcgaacacgaactcgaccgactcgccagcaacgactgaataagggacaccgtacatgccgagatgcgaggattgaggaattgatagttgctatggtaaaatccaactaaatttgatggaacacctgacatgccaaggtggttccgaagcaggaaggccttagagcattggtgatttgagcagtggcggattgcatgaggagagattccgcgtgttctgcgcattatcgcgcgtatctgccattgtaccaatcgcaatgcctgattcgatgaagttctcgttagcatagcgactttcggtgccgtcacgaggactgctttctgaatgcagcttggcaataaatggcacagtccgccacttttcgatagtcacagtttgattaatgcgccttatcgaaagaggcttccatgagtcagatattgacactaaccgatatttcctactgctatccgggcgcgccggaaccattgttcgaacatctgtccgcgacattcgcggccggctgggccgcagtgctgggagacaatggcattggcaagaccacactggccaaactcgcctgcggcatgctttcccccgattcggggacagtctcgccgaacccgtgcaagatggcagtcgcctactgtccgcaacgtactgatgaaacgcctacgaatctggatgatttcgcggcggattggacgggcgagaccatcgccatccgcgacgcgctgaacatcggcgacgattgggcataccgatacgagactctctctggaggcgaagccaagcggctgcaaatcgcttgtgcgctggccggcgatcccgacgtgctggtgttggacgagccaaccaatcatgtggacggcaggacgcgccaagccatcacgcaggcgatgcgtcggttcgatggcataggcatcgtgatctcccatgatgtcgaactgatcgacgcgacgtgttcgcgctgcgtgatgctggagcgccgacatgcgcgtgggcgtaacatcacggcggcgaacacctatcagggtggatatacccaggccgcgcagcagatgcgcgacaatcaacgtgccgatacggccgccatacagtccactcgaaaggaactgcaacgcatgcagcgcatcaagcgggagcgggcgcagcgtgcgcgcgaactggatatgcggaagaatcagggaatgcgcatcgatatcaaggacatcgacgctcgcaaagccctgaaaaatctgaaaccggctatcggcaccactgtcgcacagacaagcgcgcaattcgacgggcgtatcgccgccgccaccgacagacttgctcacctcagtgaagcggccaaacgctacgacggcaccatctggatgaacgtcatgccgagctcacgcagggaattgacgcgcatccccaacgaccacgccatcgcggaccaacccgatatgctgagcatcggcccgcgcgaccgcatcggcatcagcggtccaaatggcagcggtaaaaccgcattgatacgacgattgatcgaagcgctggagcgtgatgaagcgcagcggcattcggagagaatgccatatctctatattccccaaaattccagcgacatggataccgccaacgcaatgaaccgcttgcatgctttgacggacgagcaacgcgccattgtgctcagcgcctacgcccaacttaacgccgaccccgacagactgctcgccggcggcaatccctcgccaggcgaactacgcaaacttctgttgtgcctcggcatgattgaacagccacagctcatcatcatggatgagccgaccaaccacctcgacctgcactccaaacaggcacttgctaatacgctatcctcctatgcgggcgcattggtcgcagtcagccatgacgaatggtttctgaatgccgtcacatcgattcgatggcgatgcgcgtcatgacgctatctatgagtttacgttccttcgtaagacttggatatcggcaagacgcattccttttcgtatgaagctgtatcgatggcaatgaccgagcaagaggacaccagtatgacacgaccgattatgccgcgagcacatggcaaaaaacttcacatggaggcgaacatggctcatgttccttcggccatcgcaatcacggcgatgcgaccggaggaatatccgttgctcgtcgagttcctgtatcaggcgattcatgtatcgccgggaaccccggcaccggacaggagcgttgtcgagctgccggaattgcggcgatatatcgagggattcggacggcccgacgatgcctgcatggttgctcgcgccggactaccgaacggtccgcaaatcgtgggtgccgcatgggccagaatcttcccgaacaactccgcaggctacggtaccatcgacacggcaacgccggaagtctccgtatccttgcttcccgactggcggaaccgaggcatagggcaccgcctgatgacggcgttactggaccgactgcgaaccgatggtcacgccgcagccagcctctcggtccagcgcaccaacgccaacgccctccatctctacgagtcgcttggcttcaccatcattagcgaacacgacggtgaactggtcatgcgcgtggctctcgcggattgaggcagtgttccacacatcatccgcatggagccagtgcgtaagccacccactgtgatatgtgcggctgcaagtcccgcattcatacaagcaaacaatctgacatacagatgcagtctattccttattatgttttcggctttgctcttgataagagccagcaccaccatccatcctcgatgaatgtgggcaggctttcgcaatgtgccacatgacgcaacgtgtagtcggcgtgaaccgcaccaccgcgcaggtgttcacgcatgaagctcacgaatgatacgacctcgaaaagctttttgggaggctcgttcccaatcttgtcctcagtgtgcagcctgtcagtctgaagtcagctttcaactggcaaatgttcaaagagacgggctagcgcagtggatagatccgctccttcgaaagcaaaagtcgcagcagcacgtgtctgcttgtccgcgttgaaggcaagcgagacaccgacggctttgaacagcggtaggtcagaacgactgtcaccaatagcgatgcaattcgaagcttcaactcccaagcattcacattgctgcctcatgaatgttactttggtttgttcatcggcatatgccgctgttttaccaataaacacgccatccttgacagcaagttctggaccgcaccatgcttcaaatccaaatctctgtgcaaggctctcggaaacgactgtccaagcgcaggatgcgaggactggcttgattcccctcgacttgcattccgcaacggactgtgcgattccttgcacaagcgggagatcgttcaaccatccgtgaatttcacttacccgatggccagtgtatccacgagcatcaatatcgcataccgtgtcatttccgatctcaccgcgtgcgtatcgatcctctgcatctcgcatcctgtcgccggtacccaactggtccgcaataaatgcgccagagctaatgccgtatgtgagcgttccgtcgatatcaaaaaatgcaattcccgccattcatccctcttcatttactggttcagcccgaacctccagccggtaactaagccaatagcgtatcaaaaggcacacatatcagaaaagaaaggcagatagtcccattaaaccgtttcatgcgattgcagttgtccgccgctggctacggctggcagggggaagctgggaaaggcgtcccggcggaaggcccgccggtgcgttcttcttccagggacaaggaaggatgcgggcggccgtgaatggtcgcccgcattttccgtatccgtgtgaaacgggagggagcgcatcatggggcgcttccgactgaaaggacggatacgtatgtcaggtgggaagaagagcaggcgcacgatgctgatggctgccctgaccgcaggggcgttggccttgggatatctggcgccagccgcgttcgccgagggcggtggtggcggttccggcgggcaggttccatcgcagaccgccgacgcgcattggatctacaaggattcctggcccgccactctggagggcatgaagcaggcgatacgtgattcgggcaccaccctgtcttccgatttggaggatgggtcgaatcagttcgtggatatgaatgccatccttgccgacgcgatctcggagtgcaaggcctcatacaccggggagggtgacgcggaatgccggatggtcgctgtcggctacgcgcgcctcggcaacggcgtgttcagcggttcctatgtcagttcgaacgcgcgtcagcgttgggagtcccaatgggccgccgaagggcgcggcacctaccagtaccaaggccagtcgtacacgaccggcaccacgtggaccgatcggcttggcgtgcgttcggtggatagcctggtgcaggattccatcaacgccaatcccgatgcctcgttccgtgtggtcgtgctggccaagaaccagccgcccgtcgattatccgttgaccgtcaccacctcgcaccgccagcagaccgacatgcaggtcggctcgaccacgccggtcggcgacaccatccacgcgaacaacggcggctcgtcgatcaaggagaccctgcacggcaccgcgatcgtgcactacgatggcggcccctacacgccgacgggcagcgtgagcaagccgatcagcttcgccaacagcggcgacaccgtgatcgacaacctggcctcgccgggtgatttcggcatggattcctgggccgagggcacatattggatcgacatccaagtgcccaggcagggaagcatgcaggcggccgtggacaccacggaccgggatccggcggagacctggaaggtcagcgccgtgccgccggccgatccggtcaaaagcatcgaggaaggcgtcagcgccggccgaatgaccaaccgcaccaccatcacgtatgggaccggccggggcggttacgagctgagtttcagggacgtgatcgaacccaacggcgtcgattacacggtggacggcttcacgctcgtggacgccaccgacaacaatcgcgatgtctccaacgagttcgagatcggttgggaccgcgcatcgaacacggtcagcgcggtccgttcggccgacaagggcatgatgccgttcggccacgagtatgtgttcggcttcgatgtgaccgtcagcctgccatccgattaccagaacatcagcgaccatgcgtggggcaagtggaaccagctgcccgaggccgacgcgggagaacgcgagttcgacacctggcgtcccaatcccgacaaaagctggatcatgctcgacactaatggcaagtggcaggccgtgatcgaccccgaccgcaccaaccagaccggcggcgacggcaaggtgttcctcgacggagaccgcgtggcctccgtggtcaacggcaccgtgccggcgaacctgatccaggctccgcagacgctcaccttggtcgatgattggacagccgccgattacctgttcgacgccgatgaagcggcgaacgtccgagtgtacgaggcggacgcgggcaccgatcgtgccagcagcgtgagcgacatcgccaaccgtggccgtgacatcaccgaccagtgggacatcacgatcgatggcaccgtagtcaccgccacgaccaaggcctcctacctgaccgggttgaaggacttggagaaggccaggcagatcacgatgctcgtgcccggccgcgcgaactacgccaacggggccggggcgggccaggtgcgcgatgacttcggcatcgaagcggacgacgagatcacgttctgcaccgccggcaagaacggcgcggagctgaccaacgccggctcgcagaccatcaacacccacacggtcgagaccaacgagccgaaggtctgcggttacgtgccgcccgtggtcaaagatgtggtcggggaatcctcccaaggcggcggccaggacagcgtggacggcaagatcgtcttccccggccagcgtctcgaataccgtctggagacccagccgcatttgcccgacagtcttgcctacaccattgtcgaggtggcggtcaccgacacgtatgacgagcacttccagccggacaagcagaccctggaggtcaccgacctgaccaccggcaagttcatccccaagagccagtaccgcagcgagtggaacgacgcgaaccatgccgtgcgtctcgtgttcgccgacgactatgtgcgggcgaactggctggcgggcacgaatcccagaatcatcatcagattcgagggcgtcgtggccgaggacgctccggccgacaccgtggttgacaaccagtgggcgttgaccttgaacaactcggtcacaccaagcaacaaggtgtggaacgatccgcccgacttccagccgggcaaggaggacacccaggccgacccgtccatttcgatcgacggcaagaccgcgttgcttggagaccgcatctactatcggatcgacctcgatgccaagcagacgaaccatgcctacaaggtgtggcggctgggcatggtcgatgactgggacgacgaatacctcgaactcgacgagagccacatcaccgtgaccgacaaggccaacggcagggatgtgaccgaccggttcaacatccaggccatcgacggcgtggcatacgtgttcgccgaaaccgttgacaccgaggttccggcgacgggagagaccatcaagggcgacccccagccagccgatctcaagatctacgccgcacttggcgacaaggaccacgacccgttgaaggacccggccatcgaccagtcgcttctgggcacctcgtatgaggtcacgctgccgatgaccgtcatcaaggtcaccgacgattacgtggtcacgaacacggccacccagctggtcaacgacgtgcgcaaggacaccaaccaggtttccaaccccttgaagccgatcaacccggccaaggatgtcgtggtcaaggtggacgggcagaacgtggatggcaagagcatctatctcaacagcctgttcctctaccggctcgacagctccacgctgccgcccgaccgcgcctacccgcagatctccgactggtccatcagcgccccgctcgacacccggtacgacaagttcaccggccaatgggccgtctacgccgcctgcgacctcatcaaggacgacgagaccctggccgagcggggcgaacgcatcgccggctccgacttcgacgccagccgtttcggcggagaactcttcgagctcgccaccgacgagcgcggcgtggtcaccgtgcgtgccacggagctgatgcttggactcgtgtcggccgacaccgagcatgagcaggcgtggaccgcgttcatccaatgccagcgcatcgccgtgggcggtcccgtggccaaccagttcaccgagaccatcaacggggtcgaacggccctcgaacaccgtcaccacgcacacgcccgacatgacgccccggctcaccatcgagaaatgggacgagcaatccggctggcccgacggcgaccgtgacaccgttgacgaggcgctgaacatgaacgggagcgacactcgcatcgtgttcaccatcaccaacgcatcgcccaccgaccctgacaccggagacggcccttggttcaaggcgagcgagctgagcctcaccgaccagctcgtcgccggcgacggccagatcggcgagttcgagtatcccgatgactggcagacgctgatcctcaagcccggagacagcgcggaggtcaaggccaccctcagtggcgtgagcgagcatcacaccgaccgcgccatcgtcaccggtgtgccgctcgtccaatgcgtcgtctccgaccccgaccccttcgacggcaaagacgaggagaaactgcccgaggacgcggtggagatcgacgggcgaaccctgtgcgcggacaccaccgtgaccagcaacaccgacgactggaacggctaccagcccaaggacaatctggcgaccaccggcaccaacatcgccggcctcatcgccgtcatcctcgtcctcgcgctcctcggcaccggtgcaaccgccgcgatccgcctcacccgcgccaacggccgccacaccgggcacgagaacgacgcgaatgatgatggcgctggccgtgatggcagtcccaatggagatggccccgagccggacttcgcccaactcgtcaccactatcaattccaaggagccgcccatgaactaataacaaccacccatctgctgcttagagccaactttcgtattccagttggcagttagacggtgataccatgcaactgtcccggcaaaacggggcagtgcatactaggcccgcaggcgtagtcctgcgggcctatttcgtctgttccccatcggctttagccaacgttcccccatgacagcggactatgattcgctgctttaagcactggcaagtgaaactcgatgccaggtttctctccccacggcactctagctaaatcggttatgttgcctggccattcaggcaccttattactagaactgagatcaaacaaagtgaaagcgaatggcggtatcctgatacatgccattttgcagcacgtgtaatccgcaaatatgggaaccatccatccggtgaacagcttttgttcacgcaggttatcgactataaacatatggagtctgtatcgctgggggaaaacagtgctctccctatccaagagatagtccttacagtcatgcatatcaccagctgatacacagaagttcgacatcacctgcttcacaaatgcaagaggcatgagcctatctgtcttgaaatgaatggatttatccccttcctgaaagtcagagacaaggatttgctgtccagttgcacgatagaactcactgaatggcttgacgtagttttgaccaagataactattgcatgagctgcaaatcgtcttgaatccttgtcctctttgcaattgccgatacttcaggccttccatgtcatcctgcccggtcaagctgctcttcacggcgtcaacgcctgaatagagcttcaccgtgtgatcattacccacagattgaggagggatgtgttcaaagctcagcggcccttctttaccgcagattcggcaaatgtcatctgccatttcacgtcatctccaaacgttattgccacaggccgaggaatgctgcggcaatgaaatcgagaagcgcagcaccgaccagaatcaatgcatataggttgaaataactgcgcatcaatttaagttttgcaacatgaagtttctcgtttgttgattcaaagtattccatcgatcccgacacgactttttctatcgcaggaaagaccgcgccaatgatggcgagcgacgaagtcacgagtgtagcctttgcgccgtcttgcagaatggtgaatgagagaatccccgcaccaatagctaatccgatggcgatgattgcgtaccatgctgctgctttccgaagggagactcgatcggcttcgtctagttcttcccagtttgaagcagcgccgagagattgcttaatccaaagatcattctgctgctggtcgttattttgcattctttcccctttcccgggcatcttttggcgaatactatagcgtcttgatttacctatttctgtaagtatgctgaacgaatgctgtgtgaatttgtccgccgctgattccacgggactgcacgaggatggccgtatgcgtaggcatggcggtgggccgtgccgttcctgtgcggaggagtgcggctgtggatttgatgaaccaggtgctggagttgttcgtgaagttcgcgacgattggcggtggcttgtggctggtgtggggcgcggtgacattcggtggtggtttgaaggatcataacgggccgcagacgcagtcgggcctgtggcagatcgtgggcggcggcatgattatcgcggcggcgcagaccttcagcgccgtggcgttgggctgagccggtttgaggcatcggggatcccggcatggaggatttcatcgttgcgatgctcaacatgatcgggggcggtggcgccggttcgatagccactggcatgctgtcgcaggggccggagacgtggaatccggcgctttaccagttggccgtgaacgtgcatgacgtggcggtcaagccgttgacctcggtggttctggcggtggtgtttaccttggagttggcgcgtaattccacgcgcatcgagtccgaccgcgagttgggcgtgaagatcgtggcgagccgttcctgcaagtccggccaagcctcgtagtcggcgatggtctcccaatcctcgatggacagctgggccgcgcccacatgtgagcgcacatcatcgtcgatggccgcgaccttgagacggcggcgcaccagcgacaccgaacgaccggtcttgcgcgcggcctcctcgacactcgaccccaagtccaacaatccttggtagccatcggcttcctcgacgacggtcaggtcggttcgctggctgttctcgaccagcatcagctcgcgctgttcccgttcgtccagctcggccacgaccgccggaacccgttccaatcccgccagtttcgcggccgccagccgccgatggccgatgaccagcgtgaaccgtccctccggcgcgggcacgaccagcaggttctgtcggatgccttgggcgcggatggaatcggccagctcgcccacatcgcccacgtcgcggcggggattcgccggattcgggtcgataagcgccgtttcgagcatgaccactccgccggcggctggcgcaaggccggtggtttcattgatggcggcgatggtgtttgcggtttccatgatgggtttcctttcgaaaaagagttgtctgagtgattgaagtgggaagcggcgggccgcgcccggcggcccgccggaatcatgtcgttgttcagagcgcccaatcaggcagcattccgtgctcgcaggccgtgaccacgagggcggccagcgagcattcctcgtccgccagcagggccttgagcccccattccgccacgcggccgacatggccggccgaccacgacaggtaggcgcacaccgtcagcaactgggcccgcctgctctggggcacgcgctcgacgaacccggcgaggatgtccaccgcgaggtcgaggcgtgacgtgtcgggcttctggccggcgtggaaccaaccctccaacacgcgctccagcagcgccgtcgatttcagcgaatatcgttcctcgaccatgacgcgcagttgcttcatggaaacctccgggctgattgcggtcacgataagcgtgtcgcgagaacgaaagtcggcgtccagcgtcacggccaacgccaattgctcgcgggccgtgaagccctcgcctttgccagccagcagcctgcgccacttcctcagcaggggcgtgaaccattcggccgccgcctcacgcggccccatatcgatgcgcgcctgccggtattcctcggccagtcgctccgccagccgctcgtcggccggacgcacttgggcaatggtgccagtcatatccatcggtcctttccgtggtgtccgaacccccaagtccgcttccacgcggcccatgcccgcgagccatgcgagcggccaagagcaatgtcatacgctgcaagcgcatggcccagggccgcgatccgcccgacgatggaggagagtatgtcgcgtagccccgtctgaagcattctctccgcaatcggcgggcgtcacccgacgaccacagccaaacgtcaatgtcgctatggttgttgcatggcacgcagatatggaaaagtcccggcgattgtcgccggggccaagtgtttaggaacttttcgacagaccgcagccgcgttgctgtatcagtcccgcatcaatcagccgaaaaccgaatgacagatgaattggttcatccgatcatagggatcgcataacggctgagcaccattgctgcaatgtcgagtaatcctcttctcgggcttcgctagggtcgatgctgtgcgcgagcagcatgcgctccgatgggtcgtccagagcggcaagcagttcacacttggtcgggacgaacacgccggcacggactgcgtggacgatctgcaaggagaagaagaaccccttgagcatggcgcgtaaagcgtccagacgggcatccgcagacagctcccgcgtcgtcagatacgtgtgattggtcatgtgataaaggttcgccacgctcaccctcgcgcccagccggacatcggccggaccataggcgggaagcaaagcgcacaggttgccatgccagacctgggtgccatgctcgaactgcgcgagctcataggcgggccatgcggccagttcgtcgcgcccgcaggtgaagccgacggccttgtctccctccggcaccgtgcgcatcgcctcgtggaagtggtcaagatcggtcagatccacatggtcgagcaccaccagcaagtcgatgtcgctgtccggccggacctcgccacgcagataactaccctgcaatcccatgcacagcaagcgttcgccgaacgcctctcgcaatgccgccatcgccagcggcttccattcacctagatcaatcatcgtcaaactctcgcaatcatcagccaatgttaaaaaggcaaagaaagttcagtctagcaaagaacagttccccgattaggcgtgccgtcatcgcgggatgccttgtcggggtactgtccgtctttcagctggccaggttgagctcgtcgatgacttgcttgaagtccgcgatcatccgggtcagttcgcgcaccctttgctcggtgacgttgacgatgtcttccaaactgtccgtctgcgttccctccgcataggcttcctgaaggaactcgtcggccagtaggttgacgatttggcgttggtgctccgcgacgacgcgctgataatgcttgatggcgaccttttcgctggcatggccaagctggttcatcacctcgcgcaacgtgccgcccttgagcatcaggagggtggcgtggctggcgcgcaggtcatgcaacatcagatcggagcgtcccgccttcttacgcgccctggcaaactgcgcctccagcgtggtctggctcatgaccttgacccttctgggcacgaacaccggtgaagtggggtcatccaaatcgcagaacgtatgcaggtgctcgcgaatcatatcgaccaaggcgtccgggatgggaaggtcccggacgctgcgcttggtcttggtcttggcgaaccttgcctctcctcgatccagatgtccccggttgaccgacctgcgcacacgcagaatcttgttatccaagtcaatgtcaccgacttgcaggccgcagagttccccgcatcgcagcccgccggcaagcgtggagagaaacaccgtcagccgcgtgtaatccggcatgttctcggccagcacgcgcagttgcttgggagtgaccggcggtatgtcctcccttacggaatccggttccggcggtatcggaaagatgaacggattgtccttaagcaatggcggggacccatccatgctcatggttgtggccgagcggaacacggccttgagccgcatgcaggcccgtcggaacgaccactgcccctcgggatgcgggccgtcataccagtttttgatatgtctgggcttgatttccgtcaggcgcagtccttcgaacgcgggcatgaaatgggcgatgtccaggtacaggttgcgtctggttccgccggctatccgttcgccgttgggcagcgtgtattcgacggcccattgctcgacatactccttgaacatcatctggttggctcgttcccgcctcatgcggtcacggggatgaacccacgtttggatgcctttggtatgtagatcgaccagatgatgctcgttctccaaccacacatgagcctcgtgctcctgatgtggcttgaattgcttctgcaccttcttgccatgatccacggggttcggataacgaacctgccatgcgctgaggctaccggaatcgtcgtatcggggaatgacggtaccccattggctacgcggcttggacatgactttccccactggaatgttggtttttggcatgattgctctcccttgaacaaaaagtgcacccaaatatgcacttaagggagattgaagaaaacctgcatatgcagctcaacacaaggcggcaagtctgcgcgatttcggtacgcggctagagcgtccttggttacttcggctacgataaagccaagcctaggaaccttgaaataccgcccaagctagggtgtttgcgacggtgcaaccctatgctagggtggcatccagaattgaagttgaatcatgcaccacttccggagaggaggtagggagcatgagcggtgatgttgttgcccccttggagggtgcgacgcgcaggcgattcaagtgattcggcaggctaccggttttacgcctcgtgtggaataaacatgaaagacatgtagaacaataaaagaagttccccctgccagagttctggcagggggaacttctttagcttaaatcgctctaacgtctaagcaagaagctcagccgttgacacggtcgatgccggcctggacgtcggtgaggacggaatcccaggacttgatgaaggaagcgacgccgtcggcttccagcttgtcggtgacagccttgaagtcgatgcccagctcag

SEQ ID NO: 428 - DNA, 2523 bp, Unknown
  R48_24m  MAG No. k141_14599
gccgtggccgtcaagaagggcgattccaagaccgccgaagccgtgcagaaggccatccagaagctgatggatgatggcacgtacaagaagatcctcgacacgtggggcgtctcttccggtgccgtcgacaaggccgagatcaatccgtccgtcgaatagtttcggttactatgaagactcccgttgctctgcggcgggagtctatttgtatatgtatgcactgtggtgtataaatatgcttaaccgttgatcgttgccgcataagcggcgtaagagagaagaagaaacgattatgcagtccaccaaactgaagtccatgatggccatggcgctgagctcggccatgctgttcgccaccgccgcttgcggcacctccgacaaggccgatgccggtatggactccgccaagggttccgatgccgccacaatcaccagctacgatgtcagctccgtgaagaaggacgacgccatcgccgccctgctgcccgaatccgtgaccaaggacggcaagctcaccatcggcaccaatccttcctacgccccggccgaattcctcgacgctgacggcaagacccagatcggctatgacatggacctcgcccgtgcgctgggcaacatcttcggtttggacaccgaaatcgtctcctccaacttcgacaccatcatcccggccatcggcaccaagtatgacctcggcatcgccgcgttcaccatcaccaaggaacgtatgcagtccgtggacttcgtctcctacttcaccgccggcatgggctacgcggtggccaaaggcaaccccaagaacgtgaacccggatgacctgtgcggcctgaacgtcgccgtcgagaccggcaccgtcgaggaggacgccatcaacgagaccgccaagcagtgcaaggcggacggcaagaaggacatcaccatccagtcctccaagcagcagaccgacgccaccaccgccgtggtgaccggcaaggccgacgtgttcttcgccgattccccggtggtcggctacgccatcgcccagaccgagggccagctggaacagctcggcaaggacttcgactccgtgccgaacgccatcgccatcaagaagggcgattcccagaccaccgatgccgtgcagaaggccatgcagaagctcatggacgacggcacctacggcaagattctccagcactggggtgtggaatccggcgctctggacaaggccgagatcaacccgtccgtcggctgagcgtacacagcggtcaatcagcatcaagcaatccagatggggcgtactgtatgtaacacaggcgccccatccgtgcactaaggttcaacgctagttgcaactatcgcagcccaggctgcccaaagacacccaaggaaccaaactatggcgaagaaaaaagtcgacggcgaaggattgaacatccccaaccgcatcaaggcgctgccggtcaagcgtcccggcccgattgtggccgccgtgatcgtggtgctgctcgccgcgatgcttattcagggcatgatcaccaatccgcgattggattggcccacggtctggaagtacctattcaacgagaacgtacttgaaggtatccagtacacgctcaccctgaccgtgatttccatggtcgtggccatcatcctgtcggtgattctcgccattatgcgcaagtccatcaatccggtgctgcgcggcgtcagctggttcttcatctggttcttccgcggtacgcctgtgtacacgcagctcatcttctggggtctgttcgccgtgctgattccaaaaatcagccttggcattccctttacctcagtgaaattctggagcatcgactccaacgtggtggtcactgcattcaatgcggcgtggattggcttggccctgaacgaggccgcctacctgtccgaaatcgtgcgcgccggtcttgaagccgtggatcccggccagactgaggccgccaaggcgctgggcatgaaccgcacgcttatcatgcgtcgtatcgtgctgccgcaggccatgcgcatcatcatcccgcccaccggcaacgagaccatcggcatgctgaagaccacctcgctggtcaccgccgtgccgttcaccctcgaactgcagtttgccaccaacgccatcgccaaccgtatctacaagccgattccactgctgatcgtggcctgcttctggtatctgctgattacctccatccttatggtgtgccagtcccgcctcgaagcgcacttcggcaagggcttcgatgcccgaccggtgggcaccaagggcaagcaggcgccattgccgggtaagaccgacggtgagccgaaggatgacgtggacaagctcaaccagaccacatttgtcggattgaatgcataaggcgggagtgcgattatgactacgaatgacatcaccagtgttgtcccagccgtgcacaaggcggctgacggttccgtgattcccgctgtcaaggcggtgcaggtgcacaaggccttcggcccactgcatgtgctcaagggtatcgatttgaccgttatgcc

SEQ ID NO: 429 - DNA, 4232 bp, Unknown
  R48_24m  MAG No. k141_15027
actcgggtcggccttctggtaggcggcggtgatggcgtcggcagcgttggaacgcaccttggcggagaaccagacgtgcgggttgtcgccttccttgatgccggcggtttcggcggcggtgaccagcgtggccttggtcgactgggcggccttggtggcccacgggtcgtaatcggcaccgttgaccacggccaccttggcagtgccgaacttggcaacatcctggctggtgggctcgtaatcgtgcgcctcaacgttggtcttggtcatgatgttggtgacttcgacgttgctgccgccgaggtcttcggccacggaaccccactggttgatggaggcgacgacctcgatcttgccggaagacgcggcgctgctggaatcggacttgttgccggcggcattgctggaaccgcaggcggccatcgagaacagggtcgccgcggcggccgcgatggcgagcgcgcgcttggcgttggacatgatggacatgattggattttcctctctaattcggctgtttggccaggcgatgctgctgttgctgcatcatcgcccggcccccaacacgacagaataacatgtattgagaattattatcatttgcatttacgtcagtgtgttgcacgcgcacacccgcgctgccggcggaaatcccgcaccccgacgatgacaacgcgggatcccgccgttttcggcagacgaaacggcagtatccccgcgtccgaacgatacccgcgcgggggttctgccgtttaaggcctcggaaacgacagaaatcccgcgccaccttcgttcggacgcgggggttctgccgtttgccgcacatgtcacaacggcatcgcggcacagaccgacgcctgcaccaggtcgacgagccccacggtgtgggcatcctcacagaccagcgcatcacgcaaggcgattgcacggatgatgtcgcggcaggcgcactccccgtctgtatccaaatggcgtgccaggcaaccggcaccaatgaccggcaattcgagcacgcacgaggcctcacggatcaggcgggagaccactacgccggtcgaacgctcgtcatagacgccgttctcctcgcccatgccgcacaggcacaaacggtcgtcgtcaaagaatcgctcttcgaattcgtcaaggcctacggcattggccaccgcacccacgaacatcgactcaccccactcgttgagacggaaggaatcggccagatactgcgcgaccggcgtggcctcaaggcccacaggcagcgagaccagaaacgcgccggcccgcccttgcagcgatccgagcgtccgttcaaggtcatgtttgaccgtgcagctcatgcagcacccctcgagcccgaacgaatcggactcgccgaacaccaccccgcttgcctggggcttcgcgacgttgcgcacgatatcgagaccggattccacggcttcgttcgggcgcacgtcataagcaatcgagcatacggacgggaaggaatcgatcaacgagaacgccacggagtccaggctcaggcggtcggcgccggtgagcagcaccacgggcgtgcgcccctccgcgtttccctgtgattgcaatgccggatgaatcatgacagcctttctaatttgataatggttatcattatgatatagttgcaggcatgtccaaaacatgtcaaattctgggaacacgcgccggggtcggcaaccgcgtctcccactcgcacaggaaaacacgccgaaccttcgccccgaacctgcagtccaagcggtactgggtgccgtccttgcagcggcacgtcacgcttaccgtgagcgccaagggcatcaagaccatcgaccgcatcggcatcgaggcggcgatcgcccgcatccgccgcgatcagaacgtcaactgaaccggccacggcatcacccccatgctcgggcagtcagtaggcccgccactgtgccggcgcgtaaccgcgcaacaaaccgcgctaacgagctgcatcacccacatggcaccgcgacgtacgcgacatacgtgacataacagcgtgacacccacacatagaaagcaccactcatggcaagcaaatcctccgcaatccgcccggtcatcaccctgaagtccacggccggcaccggattcacctacaccaccaccaagaatcgtcgtaatacgccggaccgtcttgagctcaccaagttcgatccggtagtccgcaaacgggtgctcttccgagagacccgctaatccatctgttcgttcattggacaccagtcgcgaggcgaggaagaggcttaagcacccgccgaaatcgtttcctcgttggcattccggcggtttcctctatcaccatttcatgaactcatcttccgaaccttgcggcatgcgcccaatgaacgaatgcactcgtcccagctccggccggcgcgattcccgcgccccggagccttatcaaggagccggacatggccaaaaccagtaagatcaaccgacaattgcagcgcgaacgcatggtcgccaagtatgccgaacgccgcgccgaacacaagcgcgacagcgtcaaccctcatctgaccgccgaagaacgcgccgaggcgatgcgcaagctgcaggccctcccccacgacgccagccccacccgtctgcgcaaccgcgattccatcgacggccgcccgcgcgcctacaaccgcaagttcggcctgtcacgtatcaatctgcgtgagaaggcacacaagggcaaactgcccggcgtggtgaaatccagctggtgatcgggccggcacaaccggccgtcaggccgtctcaggccatctcaattcaccggattccacccgcgcgtccgacgccattctcatccatatcaccacacaacaccacacaaccaaaggtccataaccatgcaagagggcatccaccccgaatacggccccgtggtcttctatgaccgctccgccgacaagtacttcctcaccaagtccacactggtggccaaggccgtaaacctgccgaccatcgactgggaggacggcaacacctacccgctcgtcaatgtggaggtgtccagctacagccacccgttctacaccggcaagaatgtggtgatcgacgccgccggtcaggtgcagaagttcaacgctcgttacgggcgcaagtgattcgccgcacattccgcaaagaccgtaagacaagaagaaaggaacggacatgaaggtcaaggcatcggtccgctcattggcccgcaaggatggctcctatgtcgtccgccggcgcggccatctgtatgtaatcaacaagaagaacccccactggaaggcgaggcaaggctgatggcactgcccaagtacaaggcgtcccgagcaaacacgcattcgcgccgagccaactggaaggccaaggtgcctcagctggccacggtcagaacgcctgaaggcgaagtggttcaggttccgcagaatctggccgcagccgtacgaaaggggtatatgaagccataaccaacatcgtggattccgcaatccatcaagtctcgcaacaacaactcgacggtccgctccacaggccggcggcgtacgttctttctcccatttccttccgtatgccgtcacctgccggggcgaaccgccgttttatgaggccaccgcatccgatctggccaagctcgccaaggcagacatcgtggtgctcaacggcgccggctacgacggctgggcggaaaaggcgcagcttgacaagaaacgccagaccatcgtgaacgtgggcggcctcatgggcgtcaccgccaccgacgagcacgagcattcccacgaccacgccgagggcgaagaaggccgccatcaccaccatggtgctacgaacccgcacctgtggttcagcccggaagccgtgctgaaggccgccgaagccatcaacgccgtctacgcggacaaggccggggtcggttctgccaccgccgccaccgtgcaacgtcacttcaacgacaggaagaaaccctcaaggaaatggacaactggcccacgtattacccggcatccatgagcaaggaggaagtggccaccgagatgctggcccaccgatttgccatcggcccagacaaccatgtgcaaagttccccgcatatcgatgtgtaccatcggtatgcggggaactcgcatattatctcgaccactatcatgcgtacggtgctaatatgacggcgatatggcaggtgatattcgcatgaaagaacctcgcacgcagcgcacggaacaggtgaa

SEQ ID NO: 430 - DNA, 2561 bp, Unknown
  R48_24m  MAG No. k141_15241
atgagcccatggaattcctgcaaatccttgacactgaggttcgtatccagcaccacgggcgaataggccctgtggaatgccggatagccggccggcacgtcgaatccaaggaaggcgaacagccgccgcgcgtaggtatcggccacgaatgtgcggcgcgagaacacgtacagcatcagatcgtcggccgtctcgccgccaataccaaataatccaagcaactcggcccgtaattcggcatcggaaatagccgcggcaccctcgggcgcggccccgcaacgctccacataccaccaactcagcgactgtacggtcttggatttgttgacataaaagcctgacggtcgaatcagttcctgcaaacgctccggctccatggccaccagcttatggggttcgagcacaccctccgcgttcaacgccgcaagcgaacgattcacattgccccacgccgtattctgcgtcagcaccgcgcccaccataatctcgaacgtggtctccgccggccaccatccggtcgggccgagtgcgtcagccatggtgcggtacagcaattcgatgcgctccggcacaggccacttgtgtgcctggttggctttcatacgtttcatattctgcattcaggctccgtattagccatccgccattcatttattaggtcgattatgcgttcattaggtcacttgtgatgaacactgccttcaagaatggcttcattccaatgctcattatctcatgctaagcagggcaccgacctaatgaacgcataatcgacctaatgaacgcaacggtaaggaaaaactacagagattcagcgagatatgctcggtccacctggtctggaagtcgaaaatcttgatgacatctaccgcaattcgtgcaggattcgccgcatgaacgggatggtgaccacgaatgtcagcacgtcggacaccgattgggccatttccacgccgagcacgccgaacatcatcggcagaatcagtacgatcggtgccaaaaacagaccttgtcggcacagggccaggaatgaggcgatgccagtgcggcccatggtctgggtcatcatattgcccatcatgttgaagccgttgagaatcaccgtgcagcattggatgtgcagcgcggccacacccaccgcgaccacggccgggtcggagcggaagatctcgaccagttgcggtgcgaacacccacagcaacaccgccaacaccacgagcacgcaggtggcgagccgcacgcagaaccagtacccttctttgacgcgcgcgaacaggccggcaccgtagttgtagccgcacaccggttggaaaccttggccgaggccgacgatcaccgagttggcgcccagcataatgcgcatcacaatggccatgccggcgatggccgcatcgccgaacggattggcggcaatgttcacgcaggtcacggaaatcgaaccggcgccttggcggatcagcgagggcaggccaccgccggccacttcgcgcatgagcagcacatccggcctgcaattgcgcagggacagtttcatcacgccgaatttgcggctcattgtggtcagaatcgtgaagctcaccgtctggcagatggcggtggccaggccggcaccaaaaattccgaggtgcagcacgaagataaacaacggcgcgagcaggaaattcagcaatgcgcccgaaaccagcccgatcatgccgaacgccgattgcccttggtatcgcagcagtccgttgagcgcgaacgacccgcatacacagggtgcggcgaccaacaacggcgtcaggtattgcacggcgtatggggcgattgtcgaggtcgatcccagcatgacgaccagcggccgcagggtcagcaatccgattgtggcaatcaccaaaccagagagcaccgcacccgcgaagcccacggccagtagtcgggaggcgcgttcattgttctgtttgccgagttcgcggctcatcgagttgcccgcgccgttgccaaagaagaagccgagcgcctgcatcacggtcatgatggagaacgcgatgccgatggcgccggactgcgcggtgccaagctggccaataaagaacgtgtccgtgagattgtaggcagtggtcaccagattggagatgacggccggcaagcacagtttgagaatcagcggcttgaccggctgcccggtcatctgccgatatttcgcgtccgcgcttgcgcgtctaatgccatgaatctgcaccatggacggctatcctactcgcgcagggtcctatgcgaatgcgcgtgaccgtcatacgggttaacatgtcattctcgggagtgagccaaagaaaagataaagccacagcccgtgccacgtccacaccggctcattccatattcctaaaaagcgccgtggtaaagacgtccgttgagccttaccctaaataccgcccagtaatgctgcttgggttggccgcgacctgttccggcgttccggtggcgacgatgcgtccgccgctttcgccgccgcccggacccatgtcgatgatccagtccgcattggcgatcacgtcaaggtcatgttcgatgaccacgac

SEQ ID NO: 431 - DNA, 6569 bp, Unknown
  R48_24m  MAG No. k141_15647
aaggccgataacaaggagcaggccttcgagatgtgcgagaagatgctcaagctgggtgccggccacaccgccgccatccacaccaacaaccaggagctcgtgcgcgagtacggtgttcgtatgcacgcctgccgcatcatctggaaccagccttcctctctcggcggcatcggtgatatctacaacgccatcgccccgtccctgaccctcggctgcggctcctacggcggcaactcggtttccggcaacgtgcaggccgtgaacctcgtcaacatcaagcgcattgctcggaggaacaacaacatgcagtggttcaagatcccggccaagacctacttcgagccgaacgccatcaagtacctgcgcgacatgtacggcatcgagaaggccgtcatcgtgtgcgataaggtcatggagcagctcggcattgtcgacaaggtcatcgaccagctgcgcgcccgctccaaccgtgtgaccttccgcatcatcgactacgtcgagccggagccctccgtcgagaccgtcgaaaagggcgcggagatgatgcgcgaggagttcgagccggacacgatcatcgcggttggcggcggctccccgatggatgcctccaagatcatgtggctgctctacgagcacccggaaatcgccttctccgacgtgcgcgagaagttcttcgatatccgtaagcgcgccttcaagatcccgccgctgggcaagaaggccaagctcgtgtgcatcccgacctcctccggcaccggttccgaggtcaccccgttcgccgtgatcaccgatcacaagaccggctacaagtacccgatcaccgactacgcgctgaccccgtccgtggccatcgtggacccggtgctggctcgcacccagccgcgcaagctggcctccgacgccggcttcgacgccctgacccactcgatggaagcatacgtgtccgtgtacgcgaacgacttcaccgacggcatggccctgcacgcggccaagctcatctgggacaacctggctgagtccgtcaacggcgagcccggcctggccaagaccgacgctcaggagaagatgcacaacgccgccaccatggccggcatggcattcggctccgcgttcctcggcatgtgccacggcatggcccacaccatcggtgccctgtgccacatcgcccacggccgtaccaactccatcctgctgccgtacgtgattcgctacaacggccagattcctgaggagcccacctcttggccgaagtacaacaagtacatcgccccggagcgctaccaggacatcgcccgcaacctcggcatcgacaccggcaagaccccggccgaagccgtggagaacctggcgaaggctgtcgaggactaccgcgataacaagctcggtatgaacaagagcttccaggattgcggcgtggacgaggattacttctggtccgtgctcgatcagatcggcatgcgcgcctacgaggaccagtgcaccccggccaacccgcgcatcccgctgatcaacgacatgaaggacatcgccgtcggtgcttactacggcgtctcccaggcggaaggccacaagctacgcatcgagcgcgagggtgaggccgccactgaggaagcctccgagcgctgattgcaggcggttggcggctgctggcaccagcagtagccaccaaccgcggtgttgcagcttagtggctgcatagcggacacaaggagcccgaccccattacaggggccgggctcctttgcatatgtggcgctccctcagccggcaggtgcctccatggggcggtaacctactcatggggcggtaacttgcccatggggcggtgaaaaccccatggggcggtgtacgaaaacggctctattctgcggaaggtaaaattttaccgtccgccccatgggctaattaccgccccatgagggaattaccgccccatggaatcgctgagcgtcgctaaatcaccgcaataatgcagccaaaagcaataaagctggcaaacgcctcggtaatgccggtcaccacgggcttcaaggttgtgcgccgtgtaaccaccggcaacgcaacggcgcgggccaacagcagcacagtcatcgcaatcagatacgggctgcgtccagccggcacggcggctagcagcaatagcgccacatgccatacccacgaagccgccacgtacgaacgcttcccgcgttcccggatcatggttttgaccaccaaaaccgacccatactgcgtcagcgcaaacagcacggtggcaatcagcccgttcacgggcaatgaacccgcaggccaccaggcgtgaaggtcgaatatctggctcaaatccggcatattccgaatcgcggcgcgtgcggcggtgacatcagcggctgcgcacgaggcatgtgctgcgttgatgggaataacacatgccgtctcaacagcgttgccaaacgacgcgatcaccgtggccatggccgatgcggcaatcaccgacacggcattgccccacagcgagcgctccttcctcagccacgaggacagcatcgacagcgcaaccagcactatatataaaggagcccaacgcagtatgccggtatgcgtaatcaggaatggcaagccgatgacgatgagcgctacggcataagtgagcatcggcggcagataacggcgtgaaaagtgtgctttgaaccagtgcgcggcgctgaactgcacgcaatagcacacggcccacgtcgccaacagccaaagcgtatcaagattaggcccgccgataaagaagccagccacagcgggcagcataaccattacccatgcgccaggttggttgtcgaaccaatcgcgtttaagagtcttgcggcgggaagtcatatctgtcatgatatcgcagcgaatggttctcaataagaaagatgtgagacctgcattgcgacaatcgaacataggaagtgcgagaagccagtgcttccgccattatgcaacgtgtgcgattgttcggaaatgttcatttggctcacattgtgtttatgtgagactaatctcgttgagtatcgccctcggcgctggaaatggcctcggctatcggatcttggctgaagtcgtggttgcgataatcagggtcgtccaccggcagatgctgcaccaaggtatcgaacacctgactgtagattttgccgcgctcgagcaccgcatcgagcacatggccgccgaacgtcttgtcgtcggacaggaagtgctcgtggaatccggccacagccgcgccgtgaaacatcacgggggagaagtacccgagcatggtgcccttgacgtcgtggcgcaggaacacggcctgccggtcggccacctctaccagcgtggggtagggtgcctgctgcttgatgaccgcgcgtgtcttgatgaagctgaacgtgccgcgcacaattaccgaaaagaacgtgttcgcgcggccgttcgccttgacgatcttttcgttgagctcttctaggccgatatcatgacgctcgcactggtactggaaggccgcgcgatggctattagcgaatggcatggtgaagtcgtccggcacgcgttcggccacaccggattggcctatcttgtatgccacgccatccaggatgatgagctcgccgtccaagccctcgccggtgccgatgccggtgtcgccatgcttgagcaattcgccgatggtggtggtgccttccagcagccccggcacgagtaaggccaaagtgccgtgctgatataacacgttggcgccgtgctcacgaataggtttgatgttctttgccagtgattgtgtcacgagccttaagagtaattcgcgttaccgtccaactcaattaatcaatccatattcgccaacgtgagctgtgccactatatataggtaagtctcagaaggatgttggtaggcgacgccgagcggctatgccgcgaggtaatacgaacggcatgagcgcgacacgcgcgaattcctccgcgctgtcccacctcaatgcttgaataaacaagttgcctgatttgggctcgcaaattggaattaaaaaagcgagcgcgggccgggagccacttcaagtgaagtgacagccggaaaccgcgcactgatgtcggatgaccgccagaggacgtatgtccaagggaggccatgcgcgccggtgccctagaagcaggttggtaaacagtacaacgaacatcgctagaaagggcggacggcaatggcgggacagaaaatccgcatcaggcttaagtcctatgaccacgaggtcatcgaccaatcggcgaagaagatcgtcgaaacggtgacgaacgcgggcgcaactgttgttggccccgttccgctgccgaccgagaagaacgtcttctgtgttatccgttctcctcacaagtacaaggattctcgcgagcacttcgagatgcgcactcacaagcgcctcatcgacatcgtggacccgacccccaaggccgtggactccctgatgcacatcgatctgcctgcggacgtcaacatcgaaatcaagctgtaagggaggaggaagcattatgtctaatcgcaaggctctgctgggcaagaagctcggcatgtcccaggtgtgggacgagaacggcttcttcgtgcccgtcactcttgtcgacgtgtccaccaacgtggtgaccgccgtgaagaccgaggaatctgacggctacaaggccgtccagctcggctacggcgccatcgaccccaccaaggtgaccaagccgctggctggccactttgccaaggccggtgtcaccccgcgtcgccacctcgtcgaggtgcgcaccgacgacgtcgatcagttcgaggctggccaggaactggccgctgacctgttcgaagagggtgctgaggtcgacgtgaccggcaccaccaagggtaagggcttcgccggtaccatcaagcgttggggcttcaagtcctaccgccgtactcacggttctcacaagaacgagcgccgtcccggttctgtgggcgcatgcgccactccgagccgtattctcaagggcaagcgtatggccggccgcatgggtcatgtgaccgccactacccagaacctgaccgtcgtctccgctgatgtcgagaacggcatcctcgccatcaagggtgccattcctggccccaagggcggcatcgttctcgtccgctcggctgtgaagggagcctgataaaccatggcaaacgttactctgaacgtcaccgacgccaagggccaggccaccggcaccgttgaagctcctgaggctctcttcggcgtttccgccgaggatgtccaggctcacatcccgctgatccaccaggttgtcaccgctcagctcgctgctgctcgtcagggcacccacgccaccaagactcgtggcatggtttccggcggcggcaagaagccgtggaagcagaagggcaccggtcgtgctcgtcagggctccatccgtgcaccgcagtggtaccacggcggcaccgtgttcggcccgcagccgcgtgactactctcagcgcacccccaagaagatgaaggccgcagctctgcgctacgccctgtccgatcgcgccaacgccggtcgcgttgccgtggtggagttcggtatcaccgagccgtccaccaaggccgctgtcgccgccctggccccgatcaccgcggacaagttcaccacggtcgtcttcactcgtgacaacatcaacgagtggctctccgtgcgcaacatcccgaccgttcacccgatttttgtcgatcagctcaacacgtacgacgtgattacctcgcagtacgtggtcttcaccaaggaagccttcgaggctttcgtggctgccaagaccgagccgaaggaggcctgatttagatggtcgctattcacaagcccgctcacgacgtgattcttaagcccgtcgtctccgagaagagctacgccgcttccgaccgtggccagtacaccttcgtggtggctccggatgcgaacaaggtgcagatcaagcaggcaatcgaagagatcttcaaggtcaaggtgacgaacgtcaacaccctcaaccgcgctggcaagaagcagcgcactcgcaccggtttcggccagcgcgcttcccagaagcgtgcgatcgtgaccgtcgccgagggccagacgatcgacatctttggtaactgaaggctagccgagaaaagttaaaggaagaactacattatggctatccgcgtttataagccgacgaccgcaggccgccgcaacgcgtccgtctcggatttctccgagctgactcgttctacgcctgagaagtcgctggttcgcaagaagtccaagaccggcggtcgtaactcttacggccgtatcacctcccgtcatcgcggcggcggccacaagcgccagtaccgtctcatcgatttcaagcgttgggacaaggacggcgtgcccgccaaggttgccgagatcgagtacgatccgaaccgctccgcccgtatcgccctcctgcacttcgcagacggcgagaagcgctacatcatcgcgccgaagggcatcaagcagggcgacgtcatcgagaccggtgctcaggctgatatcaagccgggcaacaacctgccgctgaagaacatcc

SEQ ID NO: 432 - DNA, 6080 bp, Unknown
  R48_24m  MAG No. k141_16243
cctcggacttgccgaacttcttgccggaagcatcagtgatgatcgggctggtgaacacattgacgtccacaccgcgcaccttgtgaatcaggtccaggccggaggtgaggttgccccactggtcggagccgccgagttccagcgtgcagtggtattcgtcaaacaggtggaggaagtcgttgccctgcagcacctggtagctgaactcggtgaaggagatgccttcctcagagttcaggcggcgggcgaccgtgtccttggcgagcatggtgcccagacggaagttcttgccgacgtcacgcaggaagtcgatgacggtcatcgaggcggtccaatcgtaattggacacgaaacgtacggcgttcgcgccttcggtgtccagaatgccgccgatctggttcttcagacgatcggcccagccggccaccacgtccttcgggttgagcgtgcgttcgccggactggcgcgggtcgccgatgagtccggtggcgccgccgaccagggcgattggatgatggcccgcaagctgcaggtgacgcatgttgatgagctgcacgaggttgccgatatgcaacgatgcagcagtggggtcgaagccgcaataataggtgatgggctcgccgttcagtgcttctgcgagtcgatcccggtccgtggactgggaaatcaacccgcgccattccagttcctcaagcagggtgttgaaacccgcttccttgaagtcggtgacgtgagccatagcttgtcgcttctccctatcgaattgtgaatgagactgcccaattgggcacagtcaagtttcgcagaacatggcgacagtgccgaacaccagccgagccgcgcgattcagtaaaacaccttattctagcggcgcgggcccataagttcgcgcaaagagtcgatgatgtcctgacgatccggcacctggaacttcgggaaggacttgagcatacgcttctgctgtgcgttgatgacgccattgacggcccagcgcagacgctcaaccgtatcctgcgaaaactcacgcatcctgtcggataccgcactggagccccgctgccacgtgccaccggcgcgtgccgccacatcctgcaccacctgagagacggaatcgagcacctgctcgaatccgagcatgcccgtaaccgtgaccgccaagtcgatgatggtgatcagagccagtaccgtgaccagcgtatgcagcatcggcagcggaatcatatccgtgacccgctcgacatatggctgcgaaccaagtaccacgcccacgccgccgagaccgaaaatcaacgcgcccagcaggcagacgcggccttggaggttgaagcggaaattcgagtaatcccaccagcgggcgtggaacagctgctccatgacccacgaggttgtgtattcgagtatcgtggcgcccaccatcgaaatcaggaagatgatgatcgggttatgtacgttgccgagaatggcgacgccgagtatcgcgccggtgccgtagatcgggcacagcgggccgttgaggaaccctcggttgaccaagcggtgctgttggcaggagacgagaatggattcgtacatccagccgacgaaactgtagaacagaaaccagaggaaataatgttcgagtgtgatgatcatcgacgggcttcgatctcggcgtagggcttcgcggcgggcaacgcgcgcttgttgaaccggtcgagcgagaaggtctcggcggtggcggagcatttgtccgccaaggtgaccagatagccttcgatatagcgcggcggcaccagggtcatcgggaacatgtggttctcgatgctgttgcgttcgatatcgttgagcttgaagtccttcagggcattgaccagggcggcgtggccatgggtgaagccatgccactggtgttcgccgttatcccagtcgtgccagtcgtacaggaagtaatcgtgcaggagggccgcgcgaatcagggatttgaggtcgacgcggtaccacaggtgcgcgcggtcggccatccacacagccaggcaggcgacacgcacggaatgttcgaacgtggtgacgttgccgtgctggtagcagcagcgttcgatctgcatgtggcgatgctcgatgacctcacggccgtgcttggcgaccaggcgttgaatctgcgttcgggtgagcagatgtcccacggtttcgaccctccgttcgggttggttcagtgcaatcccttgttgtgaattacgattacccgacgatattcaagaatccatcgagtaataccgtgaccgattgtagggcacacgtatgtccgtgcacactcatccaaaagaacgacaacgggaaccgttaatcgtggtgggtttcaagatagtcgagataaccctgaaaaccgccatcgaggcttgctacatcgtaaccgcgatcggcaaggatttcagctacttcctcgctccaccatccttgagcacaatagactacgacagttcgatctgtgggcacggttttgagcacatgggccagcgggtcgagtggtgcattgatggcaccttcgaccgggtgggcggcgaagtcggctggttccctcaagtcgagcagcgtgaccgtattcgggtcgagcttggcaaattccgccggcgtgatgcggcggtacgatgattcactgctctcatcgtcatcgaccgcattacgcaaagcaataggcatgttcttcccctctcgttctgatcttggctcccctcaaggaggggtgccacatagctctaaatcgcgcaggccggctgaatatagttggccggatcaatagcagtaatggtcggctgctcaccgcacaccgggcagtcgggcacatggttcggcaacggcacacggcggatgttcatggtcagggcatccacagtgagcatacgagccacgagcggctcccccacgccggcaatcagcttgacggcttcggtggcttccagactgccgatcacaccgaccaccgcgcccagcacgccggcttccttgcaggtcggaatctcacctgcggcgggcatatcgcggaagatgcagcggtagcaggggccttcgcctgggatgacggtcatcacctggccggagaacccgaccacgcccgcatggatatacggcttgccggccagcacacatgcgtcattgatgaggaattttgcggcgaagttgtcggtggcatcgatcaccagatcgtacggttcgatgaggccggcgatgttgctggcatcgacgagctcgtagtaggtgtcgaccgtcacatctgggttgagcgcgcggatggccgtggccgcggattccactttgggcgctccgacacgtgcagtggtatggatgatctgacgttgcagattgctcatatccaccacatcgccgtctaccagtccgatatggccgacgccggccgccgccagatacagggcggccggagagccaagcccgcccgctccaatgatgagcacgctggaggccaacaaccgcttctgccctttgacgcccagccccttcaaaatcagatggcgcgcgtaccgctccacctgttcatcagtcaatgccatgttttctccatgtttccagctcccctcagtccgctacgcggccagctcccctcagagaggggagctgataaaagtgtcagtgcaaatatcccgtagtcggactggacggcacggcctgtccctcggtcaccttgcccagaccggacagatacgccgcacgaccagcatcgatggcgtgcttgaacgcctcagccatcagcgggatattgccagcagaggcaacggccgtgtacgccatcaccgcatccgcacccatctccatggcgtcgcatgcctgactcgggcgtccgatgccggcatcgatgatgaccggcacatgcgcattggcgatgatgatctcgatgaagtcacgcatgcgcaggcccatgttggagccgatcagcgaaccgagcggcataacggcggcggcaccggcctcctccagctggcgtgcggcaatcgggtccgggaacatgtagggcatgaccacgaagccttccttggccagcatttcggtggctcggatggtttcggcgttgtccggcaggaggtacttggtctcgtgttcgatttcgaccttgacgaagtcggtgtggcacacttcgcgtgccagtcgggcgatacgcacggcttcctcggcgttgcgcgcaccggaggtgttgggcagcaacgtgatgccttcgggaatgtagtcgagcacgctgttctcggtggtctgcgcgcggcgcagtgccatggtgacgatttgcgtgcctgcatgttcgaccgtggccttgatgaggttcaggtcgtagcggccggagcccagaatgaatcgcgactggaactcgtgaccgcccagggtcagcggcttgtcttccactggcagaatcggcgcggcggtgccgaccggattggtgacggcgggctgcggcggcagcggagtcgcctcaacagatgcttcagtaaccggattaatattgctcatagcttttcctttcatccaccctgtacaaactgcacaatttccatgacgcactggtcgtcgagcatggcgtcggcacgcttatcgcgcgggataatctcaccattgagttcgatggccacacgctcggcgcggaatccgtgcgcttcgagataatcggcgacgctgaccggcgtctcgagcgtgacctgctctccgttgacctgcataatatcctttcagatagtaaaaaagggtgcacgaaacgaaccgtaccttaagtggtgcgcccattcatgaacccaatcatgcgaccgttcgaccgctgtgatgtattggctccatcacgaccgtctcacggctgaattatgcaaacggaatgaaagctgtatcggagaacccggcaaatctgcaacaacgattccttacggcggcatgacccgcgtcaagttccccggtcgaagtctggcgacttcctctcagcctcacggctcccgttcgttacgatttctcagtgtatgccgttgcagtgacaacagcaaaatagagctccctctgacgagggagctctattgggactagaacgtgccgggggctttgtaggcggagccatccgacgtggatgcggggaagagcttgagttcttcgacctcggccttggcgtcggcgatctgctcgcgcacgcgaccgtaagcggtgccgcccttgccgttgcgggagtcgaccgaaccgtggctggagagcacttcgcgtactcccggagccttgtcggccggcaggaacgcggcgaaggtctcgatgaagtcattgtcggtcagatcccacagttcctggccgcggccttcggcgagcttgacgcaggcaccagagagctcgtgcgcatggcggaacggcacaccgttcttgacaagccattcggcgatgtcggtggccagcgcgaagccggtcggggcttcctcttccaggcggtcgccgtcgaagtgcatggtcttgaccatgccggtgaaggcgggcagcagcacttcgagcgtatcgacctggtcgaacacggcctccttgtcttcctgcagatcgcgagcgtaggcggtgggcaggcccttcagggtggccagcagaccggtcagatcgccgatgagtcggccggacttgccgcgggcgagctcggcgatatccgggttcttcttctgcggcatgatggaggagccggtggaatagccgtcgtcgagcttgacgaaggcgaactcctgggtgttccagatgatgatctcctcggacaggcgggagatgtccacgccggtcatggcggccacgaacgcgaattcggccacgagatcacgtgcggcggtgccgtcgatggagttgtcggtcacgcgggagaagccgagctcacgcgccacggcctccgggtcgaggccgagcgtgttgccggccagtgcgccggagccgtacggggaggcgttgatgcgcttgtcccagtcgatcagtcgctgcacgtcgcgaatcagcggccaagcgtgggccatgagctggtgcgcgagcagcacgggctgggcgtgctgcatgtgggtgcggcccggcatcacggtgcggccggccttttcgctctgctcgatcag

SEQ ID NO: 433 - DNA, 15388 bp, Unknown
  R48_24m  MAG No. k141_16491
gaggcagcagttttcgagttcctggtgagcggtgatcagagccacggcacccggagcctcgtacagctcgcgggacttgatgccgaccaggcggtcctcgatgaggtcgatgcggccgatgccctgggctccggcgcggcggttcatctcttcgatggcctgcagcggggtgacgtcacgtccgtcgatcttgaccggcacaccttccttgaactcgatgacgacttcatcttcgaccggcgggaaggccgggtcgtcggtgtaggagtagcagtccttggtcgggccgttccacggatcctcaaggaagccggtctcaatggcgcggccccatacgttctggtcgatggagtacggggacttctcggtctgggtgatcggcagcttgtgctccttggcgaacgcgatctcgacatcgcgggtcagggacaggtcacgaatcgggctgatggccttcagcgtcgggtcaatggaggcaatggagacctcgaaacgaacctggtcgttacccttgccggtgcaaccgtgggagatggtgtcggcgccgaactggtgggcggcgcgcacgaggtgcttggagatcagcggacgggagatggcggagaccagcgggtagacgccttcgtacatggcgttggccttgagggccttcatgcaatattcgttggcgaactcgtcacgggcgtcgaccacgtaggattcgacggctccgcaggcgagggcgcgctgcttgatggtctcgaggctttcgccgccctggccgacgtcgagggacacggccacgacgtccttgccggtgcgctccttcaggtacgagatggcgacggaggtgtcaagaccgccggagtaggccagaacaatgcgcttgttatctgccattggttccctttcattcaaggtctgaaaaacaaactgatgcaagtatatacagaggactgtatatttatgcacggcgtgttggttatttggaggcgaggcttagtagccagtcggagcgggagacggcggtgtcgtcattggtgcaaatcaccatgacggtgtcgtctccggcgatggtgcccagcacgccttcgatcggctgcctgtcaatcaccgaggccacgtattgtgcggcaccggaaggcgtgtgcaccacaaccagatttccggcggcggccaccgaggtgaccagtccgttcagcacgcgggacatctgtgcctcaccgcgctcccctacatcctcaccttctgaagcaacgacgctgcgacccaccgtgtaggccaccgtgccgtccttcagccgggtcttcaccgcatgcatctcgtcaagatcgcggctcagggtcgcctgagtcaccgcaatgccctcgtcgataaggattttggacagctgtgattgcgaggtgatgatatgcgtggcgagcgcctgttctatggcactcagccgcgccgccctggtggcagggcgctgcagggacggaccggtttcactcatgcgagcaggctttcgtctccacgggccttgccggtcaaccaagtcagcaacgctttctgtgcgtgcagacggttctcggcctcatcccacaccacggactgcgggccgtcgatcacttcagcggtgacttccttgccgcggtaggcgggcaggcagtgctggaagagcgcatccggcttggccaatgccataagttcggtgttgacctggtaatcccagaacggcttggaacggatggcgtattcggcctcctcgcccatggagacccaggtgtcggtgaacacgcagtcggcgtccttcactgcttccttggcatcggtggtgaccaggatggagccgccggtctcggccgcgacgcgcttggcgtcggccacgatgtccgggcggggcaggtagccgtgggggccggccacgcgcacgtccatgccggccacggcaccgccgagcaggtaggagttggccatgttgttggccgcgtcaccgaggtaggcgatggtctggttcttcaggttgtcgacgccgcctcggtgctcggcgatggtctggaagtcggcaagaatctggcagggatggaagtcatcggtcagggcgttgaccaccggatgggtggagtacttggccatttcttcgacgcggtcctggccgaaggtgcgccacaccacgccgtaagccatgcggtcgagcacacgagcggtatcggccacgggctcgccacggcccagctgggagccggacttgtcgatgaccagcgggtagccgccaagctcggcaacgccgatggagaagctggaacgggtgcgggtggatggcttgtcgaacagtacggcgacggcctgcggaccggcgaacggctgcttgtagaagcggtcatggtggaacttgatggcaagttcgagcacctgcttctgctcctcatggttgaggtcgtcgtcacgcagcatgtggcgaagttctggggtcatgatgatctccttggatcggtgggtcggcagtgacggcgagaaatcagtcgtcgggcaggtccgtaggcacatccttgaggatggcaagtgcctgatccacgtcttgagcggttacaatcagcggcggtgcgaaacgcagcgcattgggagccaccgcgttgacgatgagcccgtgttcgaggcagtagttcatcaccgcgtgggagcagggatgcttgagctcgacggcgtccagcaaaccacggccgcgtacggaaacgaacagcggattaccggtggccataatgccatcgcgcagctgtttgccgcgagcttcggcgttggccaccagattctcgtcttcaatcacgccaagagtggcgagtcccgcagccgcacccagcggattgccggcaaaggtggagccgtgggaaccaggagtgaacagagccgcaagtttctcgccgaaagcgatcatgccgcccatcgggaatccgcctgccacgcccttggcgaaagtcaccatatccggcgtcacgccgccggacagatcgtcacgctggaatgcgaaccacttgccggtacgtccgataccggtctgtacttcatcgatgatgagcagcgcgtggttgatatcgcacagttcgcgcacgaacttgacgtaatcggcgcccaacggctgcacgccggcttcgccctggataagttccagaatcacagcagccaccggacccttgccatagcggccgagaccggtctgtgcaaaagcgtcgtgcagggcgaccttgtcgccggcgcgcacgaattcgatgttcggcaccagcggatcatacggcttgcggataccgggtttccatgtggcggacagcgcacccatcgtacggccatggaagccgtgagtcattgcgagaatgcgtgcgggcttgccgccgatggaaggcagggcaccaggcaaggtgcggccatacagcttggcaagcttgagggcagcttcattgccttcagcaccggagttgccgaagtagactttggagccttcaggtgcaccagccagcttgaccagtttggatgccagctcaatttgcggctcggacgcgaaatagttgctgatatgagccaccttggcagcctgatcggcaaccgctttgacccacttggggtgggcgtatccgagggaattgacggcgatgcctgccaggaaatcgaggtattcgttaccgtcaacatcccagatgtgggcaccttggccgtgatccatgacgcgcaacggcgtaccgaacacattcatgtggacctgagagtactctcccagccactagctgtcctccgtacctagtttttcctcatgctcagtagccataagagctcctcatttccagtccttcatcgggcataaccatggtaccgatgcctgcggaggtgaatatctcattcaaaatcgaatgcggcttgcgcccgtcgatgatatgggcttggggcacgccaccgtcgatggccctgacacaggcctccatcttgggtcgcataccggattccaggtccggcagcatatcgcgcaggttttccacaccgatccggccaatcagagaattcttgtccggccaatcggcgtacagaccatccacatcggtcaagataacaagcttgcgtgcgcccacagcggcagccaaagcggcggcggcggaatcggcgttcacgttgagcacttcagtggcatcttcttcgttcggagccacggaagagacgaccgggatacgaccggcggccaccagatcctcgactgccgaggcatcgacggaaaccacatcgccgaccaagccgatatcggtgggcttgccattgatgatgggcctgcgctgcatggccgagaacaggccgccgtcttcaccggacaggcctacggccagcgggccgtgcgcgttgatcaggccgaccagttcgcgtgacaccttgccggtcaggaccatgcgcaccacgtccatggcctcgggggtggtgaccctcaggccgcctttgaattcggatttgatgccgagggccttgagcatgtgggagatctgcgggccgccgccgtgcacgacgatcggatgcaggcccacctgacgcaggaagaccatgtcttcggcgaagcactgcttcagatggtcatcgaccatggcgttgccgccgtatttgacgacgatacgctggccggcgaactcctccagccaaggcagcgcttcaataagcacttctgccttctgatcggcgcgcaaatcggtgtgcacgtcgaaatggaacccaggtcccttcaattctgtagccaatttttctcttttctgcgacgccggcgacgctatcgctgccggctgctacaaacagcccactgggctgtttgcgttatatgcgacgccggcgacgctatcgctgccggctgctacaaacagcccactgggctgtttgtcagctttcgtagtcggcgttgatgtggacgtattcgtgggtgaggtcgtcggtccagacggtggcctcggcgtccgagccggtgttcaggtcgatgtcgatgtggacttcgcgcggggtcatgtcgacctcgctgcggtcgcggccggcgccgccgttctcgcagatgcgcacgccgttgacgtccacggtcaccttgttcgaatcgtaaggcgcgacttcaggcggcacagtgcccaaggagctgacgatgcggccccagttcggatcgttgccggagatggcgcacttgagcaggttcgaggcggcgacggcacgaccacaggcaagtgccgcgtcttcgctggtggcaccggtgacggtgatgcgaatgtcgtgggaggcaccttcgccgtcgccgatgatctggcgggacagggagacgcaggcctcacgcaccagcttgttgaattcgtccttgtccggttcgacgccggaggcaccggaggcgagcagcaggaccgtgtcgttggtggacatgcagccgtccacgtcgatgcggttgaacgaatgttcggcggccacggcgagtgcggcctgcatctggccggcggagacgaccgcatcggtggtgatgacgcacagcatggtggccagctgcggggcaatcatgcccgagcccttgaccatgccgccgatcttccagccgttggagccggtcaattcgaccgtcttcggcttggtgtcggtggtcatgatggcgtgggaggcgtcggcgccggcttcggcggtggcggcaagagcctcatgggcgctcttggcaccagccagcacgttgtccaacggcagcagttcaccgatgagaccggtggagcagacagccacatcattcggttcggcgccgatgagaccggcgaccgtttccgcggtggtgacggactgggcgtaaccggcctcgccggtgcaggcgttggcaccgccggaattcagaatcacggccttgacgtgaccgtcggcgacgaccttacggctccactgcaccggggcggcacaaaaacggttcgaggtgaacacgcctgcagccgcgtcgagcgggccgttgttgaccacgagggccaagtccttcttgccttcgacggatgaaataccagccgccacgccggcggcggagaaaccttgtgcaaatgtaacgctcacggtgctactccgatcttggtcaggcccgcgtcttccggcaggccgagtgcgatgttcagtgattggaccgcttgtccggcggtgccacggttgaggttgtcgatggcggcaaaagcgtagatgcggccggccttgcggtcggtgacgacctgcaggtgggctgcgttggatccgatgatgttgccggtggcgggcagtgtgccctcgggcagcagcaccatgaagtcctggccttcataggccttggaccatacggcgcgaatctcctcatcgctcagtgccttggccttgtccgtcatgcgggcggacacggtggcgaggatgcctcgggacatgggggcgagaatcggcgtgaagccgagcgtgaattcgctggcttcggccgcgctcttgccggccgcgtgggcgaagttctgcagaatttcgggaatgtggcggtgcttgccgcccaccgaatacggcagggcggattgcagggcctcggcggcaagcaggttggtgcgcttgagattcttgccggcacccgagtatccgacgaccagatcggccacgatatcctgcgattcaaccagtccttcggcgatgccgggctggagggccagcgtggtggcggtgacgttgcagccagggcctgcgatgcgcttggtgccaggaagcgccgcgcgctggcgggtgtatgagccgtccgcggctttgccggtgatgagctcgggcatgccgtaggtccaatgctcatagaaatcgccgccgtagaactcatcccaagcggtctgctcttcgagacgatggtcggcgcccaaatccacaaccacggcattcggatcgagctgcgaggcgagcttgcccgaagcaccgtgcggcagtgcgaggatgataacgtcatgcccgttcagcacttcgggcgtggtatcttcgacgaccagattggccagttggggaatatgcggcatgtgcttggccatcgactcccccactgaggaatggcctgccacgcaggtgatgtcgaagtcggggtgcgcggccagaatgcgcagcgcttcaccgccggcatagcccgtggcaccggccacggccactgtatatttcgccatactcatctcttttcactgatgtgtcttgggatgagtatacgcgattatgcagactattgcatatttatgcagtgggtgtgttggtatgtgaacgccacttatgcggagatggagtcggaggaggagccggtgccgccggtgagttgctggagggcttcctggtagaggctcatggcgtcatagccattgaaggccatccagatgacggcgatggtgtacagcacgttgatcaccacggcggccacagccaaaccgaagcctttcatatggaaggtgcgcgtgcgccacattgccaccgcgcccatcagtgccgagagcactggcaccgggaagaacagggcgaggataaaggagatgatcgcatacgaatcccagtgcccgtagagtgggttctggtttggatcgttcaggtcgatgccgtggtaataatgcggctggtgaggctgaccgttcggctgttgaccatacgactgcccctgcatgcccgggtacccgcccggatatgcgcccggaccggactgttggccgccttgagcatacggccagccgcccgcctgctgattgccgggccacgccggctgctggccgtacggctggccggcctgctgggattgcgccgcgccaccgttgatgccagcggctgcggcggaatccttcttggtatccggctcgggagcgccataaatatacgggttgtaattcggtccgtattggccagacatagcaccatattcaggctgctggtactgcccgtatttcggcttgtcctgctccggttggctcatgacgctcctcgattcggatgatcggttgggtcaggcgcgcagctgggcgccgatttcggcggcctcagccacgatggccttgcggatggcgtcgctgtcttcggcggacagcgtcttgctcggtgaacggaacaccaccgcataggccagggacttcttgccctcgcccacctgttcgccggtgaacacgtcgaacagttcgatggattcgaggttcgcgccggcggccttgcgaatcacgttctcaagctggcctgcggtcacggtctcgtccacggtgaaggccaaatcctgcttgaccggcgggaacgtggagatcggcttggcctggacgggcttgccggtcagcgtggcgaacagcgcggtgaggttcagctcaaaggccgcggaatgggccgggaagccgagcgcctcgttgacgcgcgggtgcagttcaccaacccagccggtgaagacgtcgcccaccatgacgcgggcgacgcggccggggtgccattggacgggcacatcgtcggcggcgggctggtcgagttcgattgcggcaccgatacggccggcgatgcggcgcacggcctcgacggcgtcggaccagtcgaccgggcgcttgccgcccatccagccatcgtcctcggccagaccggtcaggatgccagccacatggtcgggctgttcgggcagaccggcgtcaagcgcggcgagctgttcgtcggtggggcgcacgccgccgggcagtgccgggatggcgggcgcgttcggatcccacaggtagacgtggccgagctcatacagggacacgttttcgatgccgcggcggatgttgcgctgcacggtggtggccagggtcggcagaatctcgcgacgcaggtacggacggtcgccgtagagcgggttggcgatctcgacgctgaccttcttggtggcttccgggtcgaagccgaaggccttgtaatcgtcgtcgcccacgaacgggtagctcagcgattcgaccatgccgaactcggcgagctcgtccgccacgcgacggcgacgctgctggtccggggtcaggcccaccagaccctcgaccggtgccggcggcacggtgatcggaatctggtcgtagccgaccagtcgggcgatttcctcgaccaggtcgcacggctcgttcaagtccgggcgccagctcggcgcggttacggcgaactcgccgttgccgccgccggccaccgtgcagccaatgtcggtcaggatgtcggagatgcggttgatgtccacgtcgaggccggccacgcgggccacttcggaggccttgaagtggatgaccttggcgcgcggcgtgttgttcacgtcgttcgggtgttcgctgggctcgccgttgccgtacttggccatgagctcggcggccatctgggtggcggcgggctgcagcgcggtgtcgacgccgcgttcgaagcggcgggaggcctcggatggaatcttgtggcgacgggccgaacgggcgatggtcacctgatcgaagtgcgctgcctccagaagaatgttcttggtgtcagcggtcacttcgccatacaggccgcccatcacaccggcaaggccgaggatgcgcgagccgcgttcgccgttcggcgaatcggtgataagcagatcttcgacgctcaggtcatgttccttgccgtccagggtggtgagtttctcaccctcgttggcgcggcgcacgacaatcgggccttcgagcttgtcgaggtcgtaggcgtgcatcggctggccgaggtcaagcatcacgtagttggtcacgtccacggccaaggagatggagcgcatgccggcgcggatcaggcgacgacgcatccagttgggcgtgtgggcgttggggttgaagtccttgacgatgcgcgcgtagtagcggtcgcaaccgggcacgccgtgaatcggattgttatcgtcgatttcaacatcgatgtccaccggggtgccgggctggtagtcagcaggttccggggccttctcgttcagtgccacggccggatcggtgtagacggcaccggtggagtggtggtattcgcgggccacgccacggtaggacagcgtgtagccacggtccggggtgatgttgatctcaagcagaggctggtcgaggtgcagcaggtgcatggcgtcctgaccaggcttcagagcctcgtattcggcctcggagaagccgtactgacgcagcaggatgatgccgtcgtggctgtctcccagacccagttcgcgctcggatgcgcacatgccgttggagatgtggccgtaggtcttgcgcggttcgatcttgaagtcgccgggcagcacggcaccgggcagggtgacgacgaccttttcgccggccttcatgttgggcgcgccgcagatgatgccgcgcggcaccttgttgccgtcttcgtcggtctcgttccattcgtcgccgcagtccacgtggcaccagttgatggtcttgccgttcttctgcggttcgggggtggcgtcgaccacgtagccgaccacaatcgggccggtcacctgggaggagtggatctcctcttcctcaagacccaccttgacaaggtccttggcgagctgttcgtaggtcaggccttcgggaacctcgacatggtccttgagccaatcgatatcgatcataggcatggctgaatcactcccccatcacaaactgttcggcgaaacgcacgtcaccttcgaccaggtcgtgcatgtcgttgatgtcgctgcgcagcaggagcgtgcgctccatgccgacgccgaaggcgaaaccggtgtagacgtccgggtcgatgccggcggacttcagcacgttcgggttcaccatgccgcagccgccccactcgagccagccggggccgcccttcttgtcggggaaccacaggtcgagctcggcgctcggctcggtgaacgggaagtagctcgggcgcaggcgcgtcttggcttcagggccgaacatggcgacggcgagcttgtccagcacgcccttcaggtcggccatggtcaggtgcttgtcgacggcgagggcttcgcactggtggaacaccggagtatgggtggcgtccagctcatcggtgcggaacacacggccgggggacgcgatgtacagcggcacgccacgggtcaggagggcacggacctgatcggaggaggtctgcgtacgcaccaccatgttggagccgacgaaaccggcggcgtccttggcttgattgcccttgacgtagaaggtgtcctgcatctgacgggccggatggtccgggccgaagttcagggagtcgaagttgtaccattcggcttcgatttccggaccggaggagatctgccagcccatggagatgaagaagtcctcgacgtcttccatcagcttgggcagcgggtgacgggcgcccagaggcttgcggttcaccggcagcgtcatgtccacggtttcagcggcgagtgcggccttctcggcggcttccttgagctcgacctccttggggccataggcacggccgaagtcggcgcgcagcttgcccatgagcttgccggcttccttcttctggtcgacgggcagggagccaatggccttgctggccttggtcatcgccgaatcggcacctgcgtacgttgtcttgatggccttgagctcctccaggttggaggcgttctggattttctcgatgcccttggcaacctcagcggtcacctggtcggcgtcgaacaccatttgttctgccacgagaaccctttcgtctgatgttttctcagcgtttcacagcgtttttaccggtttcacattctttcaacatgacccgacatagacagcgacatcaacatcaccgcggccgaggtgccgaggttcagcgattcggccttgccgtacagcgggatggagacgatgcggccgcagcgtgtgaggatgtccggttccaagccacgcgcctcattgccgaacagcacggctttcggagcctcgaccgccgccttgtccgccagtactgcgggcaggctttccggcttgcattcttcggtgccgtatacgtcggcggcccagacgcccatattatggtcgcctgtccaggtgaagaattcgtcggtgctcatggcgagtaccggcagatggaacagggagcctgcggtggagcggatgaccttggggttcagcacgtccacgcagtcgtccacgaagattacggcgtcgcagccggccgcatcggccgcacggatcacggtgccggcgttgcccgggtcgcgcacctgccagaaggcggcgatctgcgggccccggccgttcttgccaagttcgacgtcatcggcaccggcgtgcatggactcggcattgccgacggccacgatgccctgggcgtccggactgatgcggtgcatcacgtcgccggtgcagtagtgcacataaatcgtggcatcctgcgaggtttcgacgatcttctccaacgtggaggagatgatacgcggatgttccaacgcctgcgaaacctccacatagaggtcctgcaccacgtccggccgccaagtgacggcctcgcgcacggattgcgggccttcgataagaaaacggcccgaacgttcgcggcctttggcgcgggtcagatcggcgatgcggcgaacgcggtcggatttcggattatcaagaatctgggcgttgatgggcatagccactaccctactgccgggtcattacgtcagtcgtggctcgctcccgctggcggagacatcgtaagcctttcagacaccttgaaaggcactgtgccagtctgtcgcctttcagacaccttgaaaggcgaagtgccaattcccggtgccgacggctacgcctatggaggccagcgggacagccagacagatgacgtagaagatccagtcgataggcttcagacgcgagatacgggcttgggagcgtggggcgctggagccgaagccgcgcgcttccatggcggtggcaagtttggtggcgcgccggatggagagcaccagcagtccgaacgcttgggagagggcacgggcgatggcgttaccgtcgccaaggccgcgcgaacgctgggacaagccaagtgcgcgccaatcttcctgcagcagcgtaaacatgcgcaatccagccaacccgccgtatacgaatcgcggtgagaagtgcagaatctcaaccaaaccgtccgccaaatcagtgggatcgaggcccagggccaggatcacgccgggtacggcaatggccgccaccctgatagccgtggcgatggccagattaatggatccctcactgatcacaatccagccaccctgccacaggatctcgcccgaggtgcggccgtagagaaacacggagataaaactgccggcggcggcgatccataccggccaggtcttacggcatacggtccacggagccacgccgccaatccacagcagcacgaattcgatgccgagcgccgtggatgcggataccacatccagactgatgaacatcggaacgcacagcaacagcgcaccgatgatgcgactgaccgcgttgatgcgcgctatgaaccatgagggcgatgaggctttgaccggctccacgcgcgtttcctgcgggctgacggttaccacgtcactcatgcctcgcctcctcgaacatcacgcgtcgtgcgcccagcgcatccaccagcgcctcatcgtgcgtcaccatgaccacgcacgagccttggtcgcggatggcggcaatcagcttgaccatttcattccacgtactgaaatcctgtccgaatgtcggctcatccatcaccaacactttgggtgcggcggccagcatggaggccacggacagtcgccgcttctccccgccagacaaggtatacgggttggctttggcgaagcgcgtgagattcatctgctcaagcatgcaatcggcggtccgataagcctcgtcttggctctgccccatcgacttggggccgatggcgacttcgtcacgcacgaaattggcagcgaactggtgttcaggctcctggaacaccatgccgatacggcccagcagttccttgcttttccagtcgatcggctcacgcccggcatgcgcgggcttgaggttgtcggcgatgagcaccttgccggcgataggctcgagcagcccggccaaggtcagggccaaggtcgatttgcccgcgccgttcggacccatcagagccgttacttcgccgggatagaaattcagattgatgccaacgccaagagcggttccacggccaaagcttaagttctcagtgctgagcaccggcgcatcgtgcgcaggctcctgcttcggcgagtaatcgggaatcgcacggcccggcacccacgcgccaccggcggccaatgcgtcgcccatctcggcgaacacctcgtccggcttgccgtcggcgatgaccgcacccgtgggcgaacttgcatcgggtcggccgagcacaatcacgcgatcgaccagatcgagccatacatcgatatgatgttcgaccacaaccatagtctgtccggtggcctcgatgacctttttgaccgcgtcatgcacttcgaccacgccttcggggtcgaggttggcggtcggttcgtccaacaacagcagaccgggcttcatagccagcacgccggccaacgcgagacgttggcgctgaccgccggacagatggcgggtggaccgatccagttcgagtccgccgagtcccaccatatccaatgattcgtgcactcgctgccgaatctcctcgcgcggcacgttgaggttctcgcagccgaaggccgcgtcatcgcccagtcgttcaagaatgatctgcgagtccgggtcctgaagcaccagtcccacgcggcctcgcgcctcgcgcgcatcgacgccatcgatggtgagcgagccctcctgctcgccttcctcatcgccgccaagtacgcctgcgagaccggccatcatcgtgcttttgcccgcccccgaagcaccgagcagcaacacacgttcacctggccggatggtgaaatcgacggcacgcaacgcgaagtccttacgcgtggcgtgccgccatccccagccgctggcctctaccgcagccggattaacctgcatcagacgcgcgccttgctgcggccggattcaaagcgttccagagcgccggtggcggcgagcgcacgagacaagtaccagaccaccacgccggcgatcacgacgccggagatgatggagccaaccagataccaagtgacgcgcaggccgttccagcccgggttggtggcccagtagtaggcccagcagcccacgccggcgagcgcaccggacaggatggtggtgccgatgttccacttcttccaagcgaagacggcgaaggcgatttcggcacccagaccttggatgatgccgacgatcagcgagccgccgacaccccactggttgcccagcgtaagctcgaggaaggcggcaagggtttcggcgaacagtgcggcaccgggcttgcgcacgatgattgcggcgagcgggccggcgaacagcca

SEQ ID NO: 434 - DNA, 11365 bp, Unknown
  R48_24m  MAG No. k141_16561
gcggcagcaacccatatccctgcggtagcctcgcctaccgacgctcccaagataaagcccgcctgcaggtctgtcaactacgtcgcagtgccttggtgttggaatgccatcaggcagccattctgtccgcaataatccgtacaattgacgattgctgtgtcgagaagtgggccgccgcataagcccacgtctccatgggtccagtccgaacggccgcaaggcctgactttcggcggatcggcaggcttcccaagggcaaacccgagggataacgagaacaggccaacgcacgtgatgcgcaatcgcgtggatggccccagatctgtggctgatatgcggcagcactgaaggaaaacaatggttaacgctgttgaggcttttgacgccaagcacatgaagccggctgaggaaatcccggccttccgtcccggcgacaccgtcgacgtgaacgtgaagatccaggaaggcaacaactcccgtatccagaccttcaccggcgtggtgatcgctcgtaagggcgctggcgtgcgtgagaccttcgtggtccgcaagatcagcttcggcactggtgtggagcgtcgcttcccggtgcactccccgtccatcgactccatcaagctcgtgcgtaagggccgtgtgcgccgcgccaagctgtactacctgcgcgctctgcgcggtaaggccgctcgtattgccgagcgccgcgacaactccgctaagtgagtcgattcgcgggtgcaatcgtgggcctgatgatgcaggtgcgcgaataaaccgtgaaattcagcccggaaccgtttcggtttcgggctgtttccgtattttccacgtatgatggacgggcgccggcacccctcatatccggcagcatgaatcgcgaggagatggtatgcaggacgatcaggataacggcgaattcccgatttccgacaatccggagagcaaccagacctcgtatgatgacgaggccgatgcccgcgattcccgtacgttccaagtcgccgaccacggcatcgccccgtccccggttcccccggcaccggcgcgcccggcgcacgccgcttcttccgctggcgcgaatgccgcggcagcatcatcgatggatgatgaccacttcaccctacgcgactttttcctgtggtgcggcgttcccgtgcttatcgtgctgctgattcgcattttcgccgtcggcttttacgagattccttcgcgctcgatgatggacaccatggtgcccggcgatcgcgtggtgaccagcaagctcacccccaagatcttcgatctgcagcgcggcgacgtcgtggtattcaaagatcccaacaactggttgaacgaggagcagagcagcgctcccggtggcgggtacctcatcaagcgactgatcggcctgcccggtgacgtggtcgaatgcaagggcgcgggccagccggtgaccatcaacggcgtggccatcaatgagacctcctacattcgccccggcgtggacccgagcgccttcccgttctcggtgaccgtgaccgaggaccacgtgttcgtcatgggcgacaatcgcgccaattccgccgactcccgctatcatcaggatgacggcgatcgcggcttggttcccatctccgatgtggtcggagtcggaatcgcgaaatactggccgcttgaccggcttggtgcgattgatgaccaccacgaagtcttcaaggacgtgcctgacgcttccggctcaaattcctgagtcttttttgaaccgtgtgagtctttgaacgattgagttccgggccgtctgaatcctgaaccatttgaacctggaccgtctgaatcctaaccattgtgagacgatgggagccgcgcatgattaccccgacacttgacttggaacgcagccttgcggcccagggctatgaccttattactggattcgatgaagtcggccgcggcgcgctcgccggcccggtgatggtcgggtgcgccgccatctgggcccgtgatttggagccgttggatggcgatgatgccgtcgaactgtccgggcggacctacctcggcgtgccggacggcgtggccgactccaaaatgctcaccgaacataggcgcgaggcgattttcgacgaactgcgcgactggtgcgcggcctacgccgtaggccaggccagcaacaccgagatcgacgaatggggcatcacctatgcgctcggcgtggccgccctgcgcgcgctcagccaagtcgaacgcgaacttggcttacggcttggagggggattgacggcaaaaaaggctgcgggggagattgtggaaggtcgtccgggagactccgtaggggaatccattggaaattgtggggaaagcgttcgcgccctgcccaaagtcgccggaattctcgacgggccgagcgattacatcaccaaggcgctcaacacgttcgacgcgccggacgtgccgattccagccgatataacgaccaaagtcaaaggcgaccagcattgcgccaccgtcgccaccgcggcggtcatcgccaaagtgacccgagaccggctgatggtcgacctcgcgcaaagcaacccacgttacgccgcctacgaatgggctcataacaagggctatggttccgccgcacaccgtgccgccatcgccgaacacgggccgactccgctccatcgtgtctcatggcacctgacctgagccgcgtgcgacacgacagtgtgagcgctaacgcaaaactgttgtggacgcgctaaagtcagtattgattaaggtacaagcctggccgtgcacggatgccggccgccagaggggaggttaggtagcatggtgaccggccgcaagccaagcaaacgtccatccatgttcgaagtggccaagctcgccggagtcagccatcaaaccgtctcccgtgtgatcaatgactcgccggacgtttccgacgccacccgtgcgcgagtccaggccgccattgaccaactcggctaccgcccctccaactccgcgcgcgcactggcttcccgccgttcgcgcaccatagggctgatcgccggaggcctcaaattcttcggcccgatttcctccatctcatccatcgaatccatggcccgcgaacacggtctgttcatgagcgtgatgatggtccacgaggccttgtgcatgcagtccgaattcgacaacctgtgcgacaccttcaacgagcagaacgtcgacgccttcatcttcctgaccccgaccgacgtgatgttcgccgccgcctgccgtgcgcgagtcactcagccacgcgtcatcgtcaccgccacccacggccaaatgaccgtgcgtgagggattgggccttatctccaccgaaaacaagcgtcgcactgcactggtcggtatcgaccagtggggtgcaatggccaaagtggtggccttgctgggcgaatacgggcacaaatcggctctgtattttgccggtcccaacgaatggcgcgacgcccacacccgactggatgcgtggcgcaagctcgccgcctcccgatccatcgattcacagatcgtgcgctgccatacgtgggatgcctctgaggcatatgcgcacatgaatcatctcattgatgagtatgggcgtcgaggcacggcgttgcccaccgcggtcgtcgccgcgaacgacaatcaggccgtcggcatcatgcgcgcgttgcatgagcatgggcttcggattccgcaagacatcagcgtggtcggattcgacgacatgtctggcgtggataacatgtacccaccgctgaccaccgtgcatcccgatttcgaggggctcggcgtggccgccatgcgcgagacgctgcgtttgctgggggagggcggcgagccgaccttcctgaccgcccagcacggcgtggggctgattcccgccgaggtgcgtgctcggcggtccttggggccggctccccggcggtaaattggcgctgttatcaaaccgttatgatgcgtgacacggtataagttgtgtcgaatgcaggttatcggtacaatgtttttttgaaattgtgagcgctaacatcctccccaaggaaggggataacaacgccggcgctccaaggcaaaggaaagatatggcagcaaccgacaacgcggccgagcaggccgcccacatcgccgagaagattcgcgctggcaagaccacgctgggcatcgaattcggctccacccgcatcaaggccgtcctcatcgacgacaacttccagaccatcgcctccggcgactacagctgggcctcccacttggaggatggtctgtggagctacaccaccgaggagatctggggcggtttgcagtccgcttacgcctccatggccaacaacgtcgagaccgcctatggcgagaagctcacgcacgtcggccacatcggcttctccgccatgatgcacggttacctcgcattcgacgaggccggcgaactgctggtgccgttccgcacctggcagaacaccaacacctccgaagctcacaagaagctctccgagctgttccagtacaacatccccgagcgttggtccatcgctcacctgtaccaggccgtgctcaacaaggaagagcacgtctccgaggtggcttacttcaccacactcgccggttacgtgcactggaagctcaccggtgagaaggtcctcggtgtgggcgatgcctccggcatgttcccgattgacccgaccactcacacttacgaaaccgcattcatcgagaagttcgacgctctgcctgaggtcgcagcccagccgtggaagctggagaacctgcttcctgagccgctcgtggccggcactccggctggcgagctgaccgaggaaggcgccaagctgctcgatccgtccggtgccctgaatcccggcatcgtgctcgccccgcctgagggcgacgccggtactggcatggtagccaccaactccgtgcgcgtacgcactggtaacgtctccgccggcacctccatcttcgccatggtggttctggagcacaagctcaaggccctccaccctgaggttgacttggtcaccaccccggccggcgatctggccggtatgagccacgccaacaacttcacctccgacctcaacgcttgggtcggcctgttcggccagttcgccaaggccatcggccagtcggttgatgccggtatgctgtacggcaccttgttccgcgcggccatcgccgacgacgtggacgccaactgcggcggcctgctgaactatccgttccgttccggcgaattcctggccggtctgcctgaaggccgcccgctgttcgcccgcagccccgaagccaacatgaccctcggcaacttcatgcgcgcccagctgttctccgcgttctccccggtcaagatcggcatggacgtgatgaccaagcaggagcacgtgcaggtcgactctctcgtgggccacggcggcatcttcaccactccgaaggtggctcagaagattctcgccgctgccttcaacaccccgatcaaggtcatgtccaccgccgccgaaggtggtgcctggggtatggccgtgctcgccaactacctgtggaacaccaacgaggatcacagcaacctcgctgacttccttgatggtttcgtgttcaaggacgcccagtccaccactgagaagccggtggcttccgatgtggttggtttcgaggacttcttcgcccgcttcaccaagggcctgcccatcgagcacgctgccatcgaaaccatcaacctcgaagataagtaagcctttctgacctccctctattgagagaggtccttgagattttgaaaaaacgtccatccatcacagtggaaaggaaaaccaataatggcaactttggctgattacggccccgaggttcgcgccgaggtcaagcaggttcgtgaggtcgtctccaacctgcaccagcagctgatcaagtggaacctggtcgtgtggaccgcgggcaacgtttcccagcgtctgcacaccgccgacctgttcgtcatcaagccctccggcctgcgctacgagtacctgaccccgtcctccatggtcgtgtgcgaccttgacggcaacgtggtcgacggtgccgaagccccgtcctcggacaccgcttcccacgcctacatctaccgcaacatgcccgacgtctacggtgtcgtgcacacccattccacctacgccaccgcttgggctgccactggtcagaacatcccgtgcggcctgacgatgatgggcgacgagttcggcggcccggtgccggtcggcccgttccgtctgatcggctcggaggcgatcggcaagggtgtcgtcgagaccctcaagaagtacccgaagtccccggccgtcctcatgcagaaccatggccccttcaccatcggcaaggatgctgaaggcgccgtcaaggccgctgccatgaccgaggaagtcgctcacaccatgtgggccgcccgtcagctcggtgacatcatcgagatcgaccaggccgacatcgataagctcaacgaccgctaccagaacgtctacggccagcactgatttgatggagtgtccgccgcgttgcggaaggctcgacgtaccttcgtacgccttcgccttccgcgccttgcgggcacacacatcaaatcagcgctgactccgccagcacggtggtgtcttggctcccctctctgaggggagcctcggtcggcgaatgaaacttaaacaaacccccataaacaaagaagtaaaggaagtaaccctatggttatggaaaaccccttcgagggcaaggaaatctggttcggcgttggttcgcaggacctgtacggcgaggaagccctgcgccaggtcgccattcactccgctgaaatggtcgactacctgaacaacaccggcaagattccggccaagatcgtcctcaagcccaccctgaagtcctccgacggtgtcaaggagttcatggtcgaggcttccgccaacccgaacgtcatcggcgtcatcacctggtgtcacaccttctccccggccaatatgtggatacgaggcctcgaagtgctgaccaagccgctgctgcagctggccacccagcaccacaaggaaatcccgtgggagaccatcgacatggacttcatgaacctgaaccaggccgcccacggcgaccgtgagttcggttacatcgtctcccgcctcggcatcaagcgcaaggttgtcgtcggccactacaccgatcctgaggtcgtcgagaaggtcggcacctgggcccgcgcctgcgccggctgggatgcctccaacaacatgaaggtcatgcgctggggcgacaacatgcgtaacgtcgccgtcaccgagggcgacaagaccgaggccgagcgcgtgttcggcgcctccatcaacacttgggccgtcaacgagctcgtcgctgcgtacgacgccgtcaaggacgaccaggtcaaggagatcatcgaggactacaaggccaagtacgacgtcgacccggctctgctggacgccaagtacgactccctgttcatcgccgccaaggaagaggccgcgatggtcaacatgatgcgcgccaacggctgcaccgccggcgtcgacaatttcgaggacctcggcgctctgccacagctgccgggcgttggcccacagcgcttcccgtccgagtacggctggggcttttccgctgaaggcgactggaagaccgccgtcctcgtgcgcatcggcgccgtcatgggctacggccttgagggtggcgcctccctcatggaggactactcctacaacttcaccgagggcgacgagctcgacatgggctcccacatgctcgaggtttccccgtccatcggcaccatcgccaagccgaagctggagatccacccgctgggcatcggcggcaaggccgacccggtccgcctggtcttctccggcaagcccaccaaggacgccgtcgtggtctccatgtccgacgttcgcgaacgcttccgcctgctcatggacgtcgtcgacgtcgttgagccgcagggctccctcaaggagcttccgtgcgcccgcgccgtctgggagccgaagccgagcctgaagaccgccgttgagtgctggatcaccgccggtggttctcaccacacctgcatgaccacctccgtcggtcgtgaggcttgggaagacttcgcccgcatcgccggtgttgagctcgccgtcatcgacgagaacaccaccgctcgccagttcgagaaggaactggagctgtccgagatgtaccaccgtctcaacaaccagcactgattggcggagcgtataccgcctttcctcaggttcgacgtaccttcgtacgcccctcgccttcggacggcggtctccgcacgcgccaatcagcgctggcaagccagcaccgatgactaaatcagtctgctgactgctaccgctaaaaggggctgttccggaaaaccggagcagccccttttgctgttatcggcaactccccacaaacgcatcaaaaatcgcctgcgagcgtggatctaccttgtagagaaactcgggatgccactgcacggcccacaggaagtggcttgccggccggtacagggcctcgatcacgccatcgggcgcgacggccatgacttcgagaccgggtgccacatcacgaaccgcctgatgatggtagctgtttaccgcaatctcagtctgccccgagaacaatgaagccaggggagtgccgggcaccaaggaaacgctgtgtccgaacgcatcgtacggcggattcatatggtgttcgatatcgctcggatgctggcttggcagatcctgccacaacgtgccgcgtagcgctgcattgatgaactgaatgccacggcagatgcccagaatcggcttgtcccaagccattacagctggcagcagaatcgattccattcggtcgcgctcaggagagagcacctcgttacggccggtggcggaggccgctgcaccaaccatcggtcccacatccggcccgcccgtaaacagaaacgcgtcaaaccgttcggcgcattgcgcaagaatgtcggcgtcatcggtcagcggcaacatgatgggcgtaccgccggcccgcattatcgcctccatatatccgggcagcatccacagactatcgcgcccgtaatccatcagcggagtcaccgcaatgagcggtcgattcgtagtcatgcctgcctcttttcgcccaagtgtcgctttcgtcgttctgccgcaaatcgcttgatccagtggccaataatgccgtcactgtaccgaaccaatgtaaccggtcggccagcattatttcgtcagccagtcgcgacgagatcgcacaatgtgccaatgatgggggcattcggtgcggccttgtcaatgttcgggccattgcacgttcggcggggaaagcatgcccccgtccgcgcatcgtgatgaacgagtaaggttgacggggagggagaatcacatgaaccaggcatgcgtacgcaacgacaccatcgacgcgggcaaccatcatggccgaccgcaataccggtcgttcctgcgatttctgacatcgcaggaacgcaacgtcatttggctgttgctggccgtcgcttttcttccggtggacggcaccacgcttggcctgtacgcgccgttctggtcgccaatcagtccggcgctgttcgccgtgtactgcctatgcaattggcggcaactgcgcatcgcagccaaccggtacctgccaatgttcctcctaccggtggtctgtataatcctgtccatcccgggatggctgaagttcggcatccacctcaacgccgcgttcatgagcatcaccggattgctgggcgtgctcgccactttgggtgcgatcgcccttgcgttcgacatcaaacgcattccgtggcgtacgccattgcggattctcatcgcatcatactgggtttccttcggagtgggcgtcgtgcaatggctgtccatccgtctgcgcgccaaaccgttgaccgactatttctcgcacctcatgtaccggcaatacatcagcgacaactcggtgtggggcggcggccgtccgcagttcctgttcgccgagcccagctatatcggcatgcacctgttcggcatactgcttccgctcatgtggctcatgcgcgggcgcgaccgcatctacgccaaacggctgcgtgacctcatcgtcacgtatgccgtcggcgcggtgctcatgcaagccggcaccagaatcgtcatcgattccgtcgtggcgttgctgatcgcccttgtggcgcgcaccgattggcatgacggcgcacgccgcgtccggggcatgctgcagattctcggcgcatgcgcactgggcctgctgggtgtgctggcggattccagactctccgccatcgcggagaacggggccgagggagacggctcgttcttcgcgcggatctaccaaagcctcgatccgatatgcggattgctcacccatccgtggacgctgctcaccggttatggcgcgggcaacatcatcaatgcggtgtgggccggcgcggccaaagccggacggctgctggacggtcttggtatgaacggcggcgcggccacgggattcgcggccggcgtgaacgcggacacggtgtggacgatgtgcgcgtataccagcgtcatcgccgaatacgggctgatcgggctggccatgctggtcggagcctcgatggtctgcatgacgcgcgggaggacggtatgccgtggcggtgcggatggcgcatcgtccgacgggctggcgcacggtgtttgtgtcaccgacgttgccgacgttgctgatgttgccgggggcaatagtggtgatggcgttgccgacgttgctgatgttgccgggggcaatagtggtgatggcgttgccggcgcgggttcgggcgaatccggcgtctggcacaagaccgtcatctgctggctcgtcctggtcgcatacctgtacatccaatgcgagaactatgcgttcgccgctctgccgctcctcgtgttcgccgcctcgaaggtgaggcgcgagcgctgattcctctcgggccgacgcatcgacgcggcccgagatggaccaaaatccagaataaacgacattcgccgctgttccgtttttcgcccaaggcgtatctcttcccgtatcttgaggtgcatcatgtattgtcgcggctaactaaccggcgaaacgcggcatgtttcgcattttgggcgaaaagcccaaggcccacaggaggtattgatgacgttcgttgcacggtcggtgcgctatgtgctcagaaaacgagtacgaaccatagtgctccttatagtattgaccatcataacggcgagcatgctatccacgatcgcggtttctcgggcagctcaacaggccgccggacgaatcgagaaggaagcggtcggcgggttcgtgctggccagcaacctgcagggcagcatgctcac

SEQ ID NO: 435 - DNA, 6235 bp, Unknown
  R48_24m  MAG No. k141_16580
gacacgttctttattggccagcttggcaccgcgcagtccggcgccatcggcatcgcgttctccatcatgaccgtgatgcaggcgctcggcttcttcttcggcaacggcgcgggcaattcgatgagtcgcgaacttggcaaacagaacaacgaacgtgcctcccgactgttggccgtgggcttcgcgggcgcggtgatttccggtttggtaattgccgcgatcgggctgctgatcctgcggccgttggtcgtcatgctgggttcgacctccacgatcgccccatacgccgtgcaatatctgacaccgctgctggtcgccgcaccctgcgtatgcggttcgtttgcgctcaacggattgctgcgataccaaggccagtcggcattcggcatgatcgggctggtgtcgggcgcactgctgaatttcctgctcgcgccattattcattttcgtggccggcctgggtattttcggtgccggcctcgccaccgccatctgccagacggtgagtttcgcgattctgaccacaatgagccgcaaattcggcgtgatgaaactgtccctgcgcaattgcaagccggatgtgctgctcatgcgcgaaatggtcggtggcggcctgccctcgctgatccgccaaggcgccggctcgatttccgtgacctgcgtgaacatcgccgccaatccgttcggcgacgcggccatcgccggcatggccattgtgatgcgcattatgttgggcgccaactcggtgatcgtcggcctcggccaaggtttccaaccggtgtgcggctacaactacggtgccggcctgttcgcgcgcgtcaaagaagggtactggttctgcgtgcgtctcgccacctgcgtgctcgtggcgttggcggtgttgctgtgggtgttcgcaccgcaactggtcgagatcttccgctctgacccggccgtggtcgcggtgggtgtggccgcgctgcatatccaatgctgcacggtgattctcaacggcttcaacatgatgggcaatatgatgacccagaccatgggccgcaccggcatcgcctcattcctggccctgtgccgacaaggtctgtttttggcaccgatcgtactgattctgccgatgatgttcggcgtgctcggcgtggaaatggcgcaatcggtgtccgacgtgctgacattcctagtcactatcccgttcatgcggcgaatcctgcatgaattgcggtgaatggtagatggcaactatgaataatcgaagtgcaaagcgggtgccgagcgttccttctcccgcgtatatcgaatcgctgtaccgcaccatggctgccgcccttggcccgaccggatggtggccggctgaaaccacattcgagattatggtgggcgcggtgctgacgcagaatacggcgtggggcaatgtgaatcgttcgcttgcggcgttgaacgcggagggtgtgctcgaaccccataagctggcgattatggggccagcgcatctgcaggaacttattcgcccgtccggcttttatgtcaacaaatccaagacggtacagtcactgagccgatggtatgtggagcgttgcggagcctcacctgagggcgcggcagatattcccgacgccgaattgcggaccgaattgctcggattattcggtatcgggggcgaaacggccgacgacctgatgctatatgtgttttcgcgccgcacattcgtggccgatacttatgctcgccgactattcgccttccttggattcgacgtgccggccggctatccggcattccacagggcctattcgcccgtggtgctggatacgaacctcagtgtcaaggatttgcaggaattccatgggctcattgacgagttcggcaaggcctaccgcgacgatgcggccaaaagcgagtcctttttgggtggatggagggcttgactgcacggcgaatcgttctcaataagaaaagtgtgaggcccgcacggtgccaatcgcacatctgaatccttgactggctgcgctcgatgctgggtgtcgaaaacgagtctgtgacagaatagttcgaccgacacaatcgccaaaacgccgaacaggagccaatgatgaccgaagacaagccgatcgccaagccgattatcgatgatgcgacgcgcgagaaaatggcgcttatgttctctggcgaggtctacctgccggatgatgtggacggcttttttgatttgcaggccgcccagcgtgatctccagctcgaactcaacgccacgccgctgaccaacccgaagcgccgtaccgaactcatgcaggcgttcttcggcgcggcgggggagggtctgtacctcgaatgcccggtgtatgcgaactggggctgcaatacttattggggcgagcgctgttacgccaacttcaacctgacgctggtggacgatggtgagatcttcatcggatcccacaccatgatcggccccaacgtcacgcttgtagccaccggccatcccgtgcgtccggacctgcgctatcagggtgcccagtattcgttgccagtccacatcggcgagaacgtctggatcggcgcgaatgtcaccgtgctgcccggggtcaccatcggggacaacgcggtcattggcgccaactcgctggtcaccaaggacatccccgccaacacggtcgcctatggcagcccgtgcaaggtaattcgcgaaatcaacgaacgcgacgacatctactactggcgcgaccgccaattcagtgagcgttttaagctcaaagagcagtagcgcgaaagctcactcccacacgtcgagcttgcgatttttgtagaaatactcgcggtccttgtcgccgatttcacgcacgacctcgcagggcgcgccgtaggtgacggagttggcggggatggaatgtgtcacgaccgaaccggcgccaatcacgcaattgtcgccgatggtcactcccggcagaatcgacacgttcgcgccgacccacacgttgcgcccgctgatcaccggaatgcaatacgtgtaatggtgctcgcgcagcaccggcaacacggggtggccggcggcgcattagcacggggaacggttgaacgagaagtggattggcatgtggtggtatcgaacatactgatgcgtgtgccgccgagcctgtccagatggctgcctatatgaaccagtgacagaaaagcacgggaacgcgagcgagaggagtgtgcatggggcagttcggcgtcatgattggccagttagtcggatttctgatcatgctgatggtcgggtatggatgtgtgaggcttcgattctacggtcagacggcgttggatggcatgtgctcgttgctgctcaacgtgctcatccccgtgcttgtgttttcgaacgccgtcgatggtgcggaccgcgcgcagcttgcctctaactggggcgtgatgctgctgaccgccgtgatgtacgcgctgctcatcctggtgttctggctggtcgccgaactgttgcggctcaaaggttcgcgtagccatgtatttcaggcgtcgcttattttcggcaacgccggattcatcggcattccgttgattatggcactttggccgcagaacggcgcgatttacgtggcgctgatgtcgatcatcgaccagacgctgctctggacgtacggcgtatggctgtgcgagccggtcgccgaaacgactggcggcaacgcgattggcgcgcgaggtgcggtcgtgaacggttcggtgaacggcgccggttcggtgggggaggctggttcggcgagcaatgccgcaaacggtggttctccggccgtcgtccgcccctcgccaggcacccgcgtcctcggcctgcttaaacgattcgtcaatcccgccttcgtcggcgtgatgctcgccctgattctgattctgctcggcgtcaaggtgccggacatcatcctgaagccgctgcacaccatcggcaatatggccacgccgatgtcgctaatctacttgggcggcctgttcgcgctgaccaagtggtggggcgtcctcaaacgctacgaactctatgctggcctagtcgccaagatgatcgcattcccgctcgccttctacgcgctactgaccgcgctgaccggcgcattgccgcaactgccgatcacccatgacatggtgctgatgattacggtcatcgccggactgccgaccatgaccaccattgccatgttcaccggtcgcaagaacaacatgcccgagtatgcggtcggcttcgtgctcgtaagcacgctgttctcgctggcctccctgacgattgtgtcggcagttgtgttctgaattgtccccttcgacgaaaagaatgccgggggcctccggcgcttggaatttcatcgacgccgccaacgactcggcatccgaggcggccgtgccgtatttcaaggagatattcgattacgcgcgcacgctcgatccgcagcatcgcccgctgacctacaccaatctgctgatggccgccggaggcaaagacaagtgccatcagttcgcggatgtcatctgcctgaaccggtattacggctgatatgtgcaagatgggtatcagctcatcggagccaagaaggccttcatcaacgagatgaaccaatggatgaacaccgaacccaacaagccattcctgttcaccgaatacggtgcggacaccgatgccggtgcgcacaagctgccaagcgtgcagtggagtgaggaataccagtgtgagtacctcaccatgcagcacgaagtgttcgacatgttcgaggcagtggtgggcgagcaggtatggaacctctgcgacttccaaaccggtgaaggtatcatgcgcgtcgacggcaacaagaagggcgtcttcactcgcgaccgtcagcccaaagccgccgcctatgtactcaaggagcgttgggagactaagtagcggcccgcccctggaatattccaggagcaacacacatcgcataacacacaacgcaacatacaaaaaagaacctcgtgaaacgaatttcacgaggttctttctagttacgctgaatgactcccattagactcccacaagagaagagcaatggcgaaatcccaacgttgctaagctctcaaactcagatgtggaagtagagctcgtactcgagcggggtcggggccaggcgagcctggtcgatctcgtcgcgcttgaggccaatccaggtctcgatcaggtcgtcggtgaacacgtcgccggcggtgaggaagtcgtggtcctcttccagggcgtccatagcctcggccagggagcttggcacctgcttgatgccagcgtgctcttccggcggcagctcgtagagatccttgtcgaccggctccggaggctcgatgtggttcaggatgccgtccaggccagccatcagctgagcggagaaggccaggaacgggttgcaggacggatccggagcgcggaactcgatgcgcttggcagccggggaggtgccggccagcggaatacggatggcggcagaacggttacgagcggagtacaccaggttgaccggagcctcgaagcccgggaccagacggtggtaggagttcagggacgggttggtgaaggccagcacggaggaggagtgcttgatcagaccaccgatgtaccagcgagccaggtcggacaggccagcgtagcccttctcgtcgtagaacagcggcttgccgtccttccacagggactggtggcagtgcataccagtgccgttgtcgtcggcgatcggcttcggcatgaaggtcgcagccttgccggccagagcggcggtctcgtggacgacgtacttgtacttcatcaggtcatcgcctgcgtgctgcagggtgttgaagcggtagttgatctcctgctggccagcgccggcgacctcgtggtgggaacgctcgaggatcagaccgaccttctgcaggttggcgaccatatcgtcgcgcagatcctgggtgtggtcaatcggcggaaccgggaagtagcccttcttgacgcgattcttgaaaccgatgttcggggtgccgtcctcttcggagtcaacgccggagttccacggagcttcgatggagtcgacctcgtagaaggagcgctgcatggagttctcgaaacgcaccttgtcgaagatgaagaactcggcctcaggagcgaaggatgcggtgtcggcgatgccggtggacttcaggtaggcctcggccttgccggcgacctgacgcgggtcgcgggagtacggctcgtcggtcagcgggtcgacgatggagaaggccacgtc

SEQ ID NO: 436 - DNA, 2734 bp, Unknown
  R48_24m  MAG No. k141_17003
agattggtgtcaagtcgttgggcgcggcattgcggatgctggcatcgctggctccggtgatatcgcaagaagcaatgacatcccataacgcaatgtggtggcgcagagcaaacgcacgacgggactcaggtaaatcgccgacagcgtcagtaggatcagcggagttggcaaacagcgcctgcatcaccggccaaaaccggttctgtggatgcatatagtaaaacgccgccgctcgggatttcggactcggcatcgatcccaaaatcaaagcccgggactcaccatcccacaccggcccaaacccatgctccacatgttcgctcatggtttccattctaagtcgggcgattgagcgcacgaggcaatcaggccgagaactgtttgccgaattccgagaagagctgacggcgggcgaagacgagcaggccgagcagcaccagcagggagaccagcccgctgaccatcaccagcacatcccacggagcccagccgagcggaatgaacgtcagaggcagcagaccggcgacgatgtcgaacgccagatacttggcgtactggtcaatggccttggcccgcagcacgataagcagcaccacgtcaaagaccagcgaaaccagacacgtgatcggtatgacgaacatggtgacgacatgattcatcgtcgccacaaaccagaccagcgcaatcgccagcatgatatagaaatatcgaaacatgaggcgaagcggccgcggcgcgtgcagaatcgcactgttgatgaacagcacgctgatgatcagcgcggctgccgatgcactggcaatcggtatcggccacgaaaacagatagctgaagaagccatgcagcagcagaatcgcgccggttacaaacgtgatgatctccaccgccaaacgcctcggacgcagatagatctgctgcgcggggaatgcggcgggagaggcctcgccgtgcaattcgttctgacagagtgggcaacgggccatatcgccggtgaaatcgacgttgcaggcatcgcaatgcttcatgccgacgctcctttctccacatgcgcgccggcgatgttcatacggccgctgatgccctgcgcggcgagaatccgacacaggttcttgatgacgttcagatcatggtagacggtggagatgccgatgctcaggtcgtcgccaaacgagcagaccgtgaaattcaggctggccggtgtggtgaggaagctcaccgaacgcacatggcgcgcgagtcgttcgtccaaggtgactcggccaaggttcgagacggtggtcgtggtctcgcggtcggcgatgaaccgggccagctccagcacccagtccttggcaggggagggcgcgagacgcagcgccggattcttttccagcgcaatcatgcggttcatatgcgattcgacgcgctcgcgactggtggcatggccgagctgctcctgcacctggcgggcgatgtcggccaacggctcatcggtcagcaatccacccataccgttgccgtgcgcggtgcgggcggcggactgctggccgtcgccggtcgcgtctgggcccgttgcggaagttttcgcggagtcctcatcggcttcgatatcggccggcgtgtacgccacgtaagtcatgccgtagaagttgcgcacggtctccgacctgaagaaggcgcgcaagtcgaccggaatatccacgcgaatcgcgcgattgcgggcgcgcgagggcatgacgtcgcgaatcgcgcacagtatcgcggcgatgaggtaggaggtgaggctcactccgcactgatgcgctgcaccaagcaccttgctggcgctgacgtgatattccatgaacgtgggcgcgtcccggtcgatggggccggccagccggtagatcttcgtgccgggcgcggcaccggccttgtctttctcgtagtatttgtcgaagctgttttcggctttgtcgctgtccgagccgtcgtaatccgaaggcacgcccggcacgtcgtaccgctcggcgatgtaggcgtgcaacagtgacttgaacaggttgatggcgccgcgaccgtccgaaatgatgtgcgagacctcgagattgacacgattgcggaaataactcacgcggaacagcatgcttttgggcccgtaatgcagtcgcgagcatatcggcagatgttccggctccaccagcggccggccgtccgactgttcgaggtaatgccagaacatgccgttgagcaggtgcacgttgaagctcgggaactgggcgatggcatggtcgagcgcgtgctgcaggatgtccggggcgatgtcgtccgccagctcggccgaatagcggaacacggtctgcgaggagcggccagcctgggaggagtagaacttgccgatgttgtctagtcggtaccaagtacgtcttgccacgcgtcgcctccctccggtgcgttggcggtggtgccggtgccgggagctggttccagcggtgtgccgtcgaggaaatgctcgatgattcggtaggtggtggccaccagtcccacggccgacgtattgagcaggtagccgtggatgccatcgtgaattcggtaacaggagacgttgtcgttcaccaattgcaggcgacgggcgtacgcttcatcctcgtctctgagcgggcagtattcggcggacaacaccagcgtgcgcggctgattgctcaggtcgtgcgcggtgagcggcgcgaaatacggattggtcagatcggccacggacgaacggtacatgtcgatg

SEQ ID NO: 437 - DNA, 10423 bp, Unknown
  R48_24m  MAG No. k141_17018
aataatcatcaggtacaggccgaacggcgtggccagctgcggaataatcactgcccatggggtaccaaccagaccaatcttcgagtacatgaggaacagcgggacagagatgaccgtggccggaatggacatgaatgccaaagttatcgccaacagactattacggccggggaaccgcattgtagcaatggcgtaacctgcgagagtggcgatgatagtggcaccaaatccggcgacaactgcatacatcactgtgttaagcaaccaccgtgcgtatgtaccatgctgatatgcaagagtttcctggacgttctgccagaacacattcttgtcatcgaaccacagaccaaaggagctaaacatgccctcgttggtctttgttgcagagaagaacacccaaagcaacggcacgaggcagtagatgaccatcatagccataatgatgtgcagcagccagttgagcacacgctgcttaccggtcagctttggagctgcctcacgctgctgcatacgcttatagcgttggcttgccttgagcgccagcttggcgtctctgcgctgcagcgacttggaacgtggttttgcacttgcttcactcatcacttgttctcccacttattgccaatgaccttcacgactgcgacaagacccataacgatgacaccaatcaccaaggagacagccgcagcgtagttgaggttctggccgttgaacgcaaggttatatgcgtagagattcggcgtgtagttactggtgatcacattcggcgcggaattcatcaagatgctcggttcgttgaacaactgaagcgtgccaatcaccgagaagagcacggtcatcataatggatcccttaatctgcggaatctttaccgaccatgcgatacgcagctcggatgcgccatcgatacgagcggattcgtatagctcgttcggaatgccgatcagtgcagaataataaatcagcatgttgtagccaagagaacaccaagtgcagatgtttgcgatggcgaacagcataagcttttcagaaagcatgttcggcgcagtggccccaatcatagatgcgatctgaccgacaaggccatacttgtcgccgtaaatgtatccccacatcagtgctgcgatgacgcctgggacggcataaggcaggaacagcaggattcgcggcactgcgatatggcggattctctgggaatccagaatgagcgccgccacaagggagaggatcaaattgagaggaatctgaatcgccgcataaatcagcactcttctgaaaccgctccacagcgcttcatccttaaatgcagctatgaagttgtcgaagcctgcgaatgtggtgccgccaagaagggactgcttgaagaagctgagataaagcgcgtagaacatcgggatgatcatgccgaataggaagaccaccacgtatggaagacaatataacatgcctatgtactcgcgcttcggcttgcgcatcccggaagtatccggtttcgccgttgcatttgtcatagtttttctctttcttcttaacccgtctgaatgagcccgccaacaacatcgttgccattgccgtttcattcatcggtacgttcaatatacaaggttctgcaaaaaagagcaaataaaacttcgttgcgcgtggcgaaattttctttatcttgttttttcgccttaaaagggctttattgcaacgatatgcacaaatcgtactcatcgaagaaacagcagccaatccatgtctacaacacccatttccgctatatagacagcaatacgccgataaaaaagctgttttagagtagcgaaaatttcgctactctatatataacgctttttttgcagcgtcgcatacgaaaagagaagagtcatggccacaatcaaaacaacaaacagaccgaaggtctccgacatcgcccaagcggcgggagtatcccccgctaccgtgtccaaggtcatcaacggccgtgatggagtctccgacgagacccgcgatagggtggaactgctcctcgaagaagctggattccgcaaaaaacttcccacaacaaaaaccatacggtcaatcgaactggtcgtcagcgaaatgaccaacaacggcaccgtggaaatggtcaaggagacagcttcatacgccagagattttggcctcggcatcaccgtaagctgcgccggaccggattccggagaatacgcaacaagaaacgaggccagcagctgcctccgtaacgccatcgaacgcaccccactaggcgtcatacttctcttatcgaatatctcatcggccgaggaatcgctgctgcagacgaggaacatcccatatgtgattgtcgatccggtcggccaggtctccgctgacgcattgggagtgggcattgataactggaccgggggaatgctcgccacgcaatatttcatatcattggggcatcgacgaatcgccgtcatcactggccctactaattcacagtcctcgcaggcgcgactgagcggatacatggcggcgctgcagaaaaacggcatcagcgcggatccgcatctcatcaaggttggcgactacgtatctgacaaggcatacaaggcggcatgcgatctcctggaaatgagggagcaggaccgaccgaccgccatcttcgcgttcaacgatctcggcgcgatcaacgtctatcgcgccgcccgacagcacggcatcagtctgcccgaacaattatcgatcatcggtttcgacgatgtctatcctgcggcaagcatgtgtccatccctgacgaccatcaggcagccattcgacctcatcgccagacaatgcatcaacctgattctcaaagcgcgggaaggaaaggtggaacagaattacttcatttttcccacgcagcttgtcgaacgcgaaagctgcgtatcgccagcacgtccgtaactcagcaacggaacacagaatcagcttccacgaagcacccatgcatatgcaatccgtctctggcacaagcatttacttctgtttaccagatgaaaatacaatatcgtgcgattacgggggcgcagccctagcctcagctggaggtcaggaaggtttcgttgcctcgggtgaagtcgaggacggcaccggcgagttggacctcgtctgccagttcggggtcggcagccagaagctgctcggcacgggtgcgggcgtcggcgatcatgtcggcgtccttgaccacgcgcaggagcttcaggctggacttgccgccggattgggcgtcgccgagcacatcgccggcaccgcggaattccaagtcggcttgggcgatttcggcaccgtcgagcgagtggtgaatcacttcgagccgttgctcggccggggagccgggttccgcacgggaaataaggaacgcccacgagttggtgccgccacgccccacgcggccgcgcagctgatgcaactgagagaggccgtatcggtcggcatcaaagatcacgatgcagctggcctgtttcacatccacaccgacttcgatcaccgtggtggacaccagaatcggagtctcgccgccggcaaaatcggccatgacctgggttttgacgtcatccttgtcgcggccggtcagagtcgcaaaccgaatgccttggaattgcgggagtttctgcaaccggtcggcgatttcggccaccgcatgcaatggcgggcgagccacggtttcgccgttttcgtcgaaggtttcgtaggggtcgtcgatgccgatggcgtcggccgccgcgcgcgttgcacggccgcccgcagctgtgcgggcactggaaccagatgctgcggcgcgtccgcgggcagaaccggctgctgccgaaacgccggaaccgccttcgttcccctcatcatccgcatcaatgcgcgggcacacgatataggcccgctcccccgcgtcgactcgcgcgcgaatgtgcgcgaacatacggcccatggtggcggcgtcggcctcattgaccaccacggtgcgaatcggtttgcggccgccaggcaattcggtgagccaggaaatatcgagatcgccaaaccaagtcatggcggcggtgcgcgggatgggcgtggcggtcatcaccaatagatgcggcgtggtgccgtcatcggttttggcgttgagactttcgcgctgttccacaccgaaccggtgctgctcgtcgattaccaccaaggccaagtgcggggcttggaaggtcttggaaaacgccgcgtgcgtggccacgataatgcccggctcgccactggacgccgcagcaagtgctttacgtcgcgcagcaagcttcatgccgcccgtcaacaacgtgactggaatcgctggcttgagttgctccaccatccggccaatggtttcggcatgctgctcggccagcacctgagtcggggcaacaagcacggcctgatagccggcgtctacggcttggagcatggcagcgagcgccactacggttttgccggagcccacctcgccttgcagcagacgctgcattggccagtcatgagccaaatcggcggcaatatcatgaataacctgctgctgccctgcagtgagggagaacggcagggatgcgatgaactgatcgcgcagactgtcggttaccaacgggcaagagtgagccgcggatttatgggcgtgcgacctggctttaagcagcgaggtctgcgaaacgaaagcctcctcatagcgcagggtttcgatggcctccttgaaccgggtcgtggaggccggatcatgaatggccaggaacgcctcagcccgatgcatgaggttcttggccttgcgcaccgattcgggcagcacatctgggatggattgggagagcgcctcagcaccggattcggcggtcgtgccggaattctcttccccgttttggacggcgatggtgtcggtcgtgggagccacaatgccggctgacccagcgccagcgagttgcccgtcaggcgtggatgacgtgcgggcccccatcatccacagcaatcccagaatcgtctcatgaatatgttcggacgagatacgcgaactggcgtgatataccgggcggggccggcagacgcgggtaagcgcctcttgcacggtatcggcgtcgtatttcagcgcggccccggaagaggcagccgcggccggcggatacgcggactgcacactggcatacggatcggtacttcccgcaaacgcaccattgccggatgccgcaccccgagcgtaaccctcaagccccgctcctgctccggccgacccgggcgcgacagtgaggatttcggggtgcgtgaattgcagctgccccatgtattcgctgggcataccggagaccaccacagacgtgccggcgcgcagccgcatgctgacccaatccacatacgatttacgatacgaaaagaacgtgagccgggccgtgctgccgggtacgcgacgcgaacgggcaaagtcggcgtcgtcaaccgtcgcctcgagtcggtagccgcggcgagcgttcatcggcaccacgcgcatgtctcgtatcacggcggcaaatgccatctgctggccgggtgcggcctcgcggatggcgcgaagcggcaccggttcggtgacgcggaagggatagtaggtcagggcgtcgccgacagtgacgattcccagcgatttgagcgcggacacgcgacgcttgttggtgaccagcgaagcgagagtggtgtccatagtgatgctcatattggcctattctattcgcacggcctctttaggccgcagaaacaacaaaacccgctgagccgaagctcaaacgggttttgctccacgttagtacgcgattcacgcggccacgcgctgaaccttgccggccttgaggcacttgacgcacacgcgcagacgagtgttctcgccatcaatcgtggtgcgtacagactgcaggttcgggcggaagctacgcttggtacgacggtgcgaatgggaaacggtgaaaccggtctgcggtcccttgccgcacactgcgcaacgagctgccatgatggactcccttaaccttgatgtgtcaagtctttcacgcattcgaccgccggtttcacccgacatgccgaacacacaacttcacaaatatatagcccaataccgacaaccgcaactcttgcgtgtatcatgggcgaacttcggcggttcacgcgcggttcgagcgtaacttgcgagtgggccatcagcggttcgcgagcggttcggcattggttcgccagcggtccgcaagtagttcgccagcagttcgccagcggcgaattacgctgcaaatcgtagcgtttacccgataaaacacgccggactgcctattccgcatccaacaaactctcatataatctcggtataagagacggcaagggacgaaggggtcctcgtgcaacttacgacgaaggaggctgtcatgttgaatctcaggcgaggtatcggcactcacgagcccagcgtgatttcactgggtcaagtctgggtggacatcatgctcaatgtggacgaggtgccggcacagggcggattcgccgtggccgatcatccgaagccctccattggcggcagctatcgcgtactgcaggcggccagccgcatgggcgtgccgaccgagcacgccggcattctgggcaacggcctgtgggcgcatttcatccgccagtcattccaggacaacggcattacgcatatcggccaggatcgtcttgatgaggattccggtttccgcgtggtgctgagctccggcgcgccgaagaagacgttcatcgcttcctatggcgccgaggctcatggcgacgcggacacgttcaacacgctggagccgcagcccaaagacgtggtgcacatcagcggcaacacactgatggaccacacggccaccggcgtggacggattcctactcaaggccggtaccgacccggctgcacgcgactacacgctggtgatcaatcccaccaatacgttgcgtctggtcaacgaccacatgctcgaggacctggtgctcgcacgcccggtctggtcctgcaaccgtcaggaggccatgacgctggccgagcgcctgggcgcgccgatcgacgacagcaaggtcaccatcggcggtggactcgacgacttcatgcaccagttgtgtgacggcttgggcactacactgcgcgcgccgctggtggtgcgtgtcggcgcccgcggcgcttggattcgtgagccaggtggcgagacgattcatatcgagggatacccgaccaaggccgtacacacccgttcggcgggcggttgccacaccggcgtgatgtgcgcgatgctggcaaagggccatagtctggccgaatcggtaaagatcgccaacgcggcggcatccatcgccatccagcgcagcctcaacggcgtgccgcaatgccccgattatgacgaggccatcgcgctgatcggtgaatagtttccggacgattgagtggatttcctcatctgggggaatccacgatcggctcccttcagtccgcttcgcggccagctcccctcagcgaggggagctatttttttgctctggctcccctaagaaaggggcccggcattattcacccgccgttcaactttggcggttttctaccctagtccgcgcttctacgatagattgagttgaatactgtcgaggagtgcatatgactgatcccgcaaatgtccacgaaccggtgccgcaaagcgccaaactgaccgcccgcgagaagaagtggatcatctacgacgtcggcaactcggcattcgtgctgctgtccaccgccgtcatccccatttacgccaaatcgctgatgccggcggacggcaacatcgtgtccgcctggggctacgcgcaaaccattgcctccttggtcatcgcgctgctcatgccgttgctcggctccatcgccgacgtgcaaggcatgaaaatcaagttcttccttggcttcttcggcaccggcgtggtcacctgctgcgcaatggccctgcccctgacctggctgccgttcctggtcgtctacattctggcgaccatcggccttaacggctcgctgacgttctatgattcgatgctcatcgacaccacctcgaacgagcgcatggacaaagtctcctcgcacggctacggctggggctacatcggctccaccgtgccgttcatcttctgcatcgcgctgatcttcggcggcccgtcgctcttcggctggtccacggtggcttgcacgcgcgcctcgttcatcatcaccgccatctggtgggtggcattcaccatcccgctgcttaccagctaccgccaagtgcactatcgcgccacccgtgaccagctgggctcggccatgcgcggcacgttcagcgaactggcgggcacgttcggcaagatcgtgaagaacaagccgttgtggatgttcatgatcgcgttcttcttctacatcgatgccgtgaacacggtgatttcgatgagtacctcctacggtgccgagcttggcatcgactccacccagctggtggtggcactgctcgtcacgcagttcgtggccttcccctgcgcgattctctacggtcgtctggccggccggttcggctgcaaagtgatgatcacggcggcggtcgtggcatacatgtgcatcgtgttcttcgccgcgttcttcatgaaatcggccgtggagttctggattctggcgattctggtcggcatgtttcaaggcggcatccaggcgctctcccgctcgtactacggcaagatcatccccaaggatcacgccaacgagtactacggcttctacgatatcttcggcaagaccgcctcgatcatcggcaccttcctggtggccaccaccacgtccctgaccggcaacgcctcgttcggcgtgctgtccatcgccgtcctgctcgtcgcggcgctcgtcttcctgctcctgcaaaaggacccgacgcgggagtgatttgccggccctcggcaactctgcgccgcgggcgacatctcgcaacccctgcaacgggccctaatagcaatggaccatcgccacttgatcacttacgctcgcgataatccttgatcagctgaatggcgacggccgcaacgccgcacagcacaccgccaatcggccacggcagccagaacatcgccccgtccgcggcgctcgacccgacggccgaccaatcgccgcgcaatgccgcagggttcaaaaacagcaggcacaagccagtcgccgtggctatcagcataatgatgccgcacaccgcgccggtcagtctggcatagaaatcctgttcgcccgcatgctccttgcgatcgtcctcggccgctttgttgtatgcgttgatatcgagcagactgtatctcatgccgcagtagacaaacccgaaaacaccgggcgcacagagcagcagaaaaattgcgttgggccagccatcggagacgccgagcatgtcatcggcatacaccgtcaccgcaatgccaatcagaatagccgagatgccaccgacgatgccgattaccagcagccgcaattctcggctgcggtcctccccggtgtagaaatcttctacgtatgggtgacgccgtttgaagtcaatacgcgacagacctcctggaatcagcatcgccagccccgcaatcacacccacacagacgcacagaaacgtcagaaaatcgttgagcggcgtcgctccgagaatggaattgctggaatcgaacaggttgccgatgccaaccccggcgacaatcgcagcaacaccgccggcaatcagcagcgcgaatcggcggcgatgttcatcgtagccagtgatatcctgcgcaagctccgcgataggagcgattatgcccgccgttttggaagaagcggctaaaggcgatgccgtctcagccgaggagtcaacattcgacgaaccggccgcagaagccgacgcggcaggccgactcacatcgccaagtaccagatcatcaagcgtgcagccgaacaggtcgcagatcataagcagcttgtccatctcgggataggccttttcggattcccatttcgaaatggcctgacgcgagacgccaagcaacatggccaatcgttcctgggtcaggttgcgttgcgcacgtaggtactgcaggttagcgcgaaaactcattggaatgtcccttcatacgtaatctttatcatgtcatgttcggccgatgggctcactatggcatgccgtccatgtcgcccgccaccatctttgggttgcaatcgccggttattcgagcgcaaccacaagttgcatcggcggaattccgccattccgttgacctgagcagctttaacatcgcactccacgagaccgaagcttttccagccatgcgagggcagcttgtctcacctgccaccacgaatccgcttcgacccacgtacacatctgtgtacagcagcgctcgcaatcggttacctacgacccatatgatttgctgagcgaccgcaaaacacgcaatagccgagacaa

SEQ ID NO: 438 - DNA, 12034 bp, Unknown
  R48_24m  MAG No. k141_17325
agattcgaggaatgccggattgatttccttgcagatttccatgtcgttgacggccaccagcagatcgcccgtatcgtcggtgatgaacatgtaggtggaagaacggcgtccttccagctgtgcggcatagtcaagattgatgttgttggccgcgcacgaacgttccagggtcttgccgttttcatcgtcgccgtagacggtgatcaggtatgtcggcatgcccagatgagccatgttctgtgcgatgttctggccgacgccgcccgcggacatgctgacgacgcccggattcgagtctcggtccactacggtgctcgtcgatctgccgcagatgtccatgttcataccgccgatgaccacgacatagcgatcggtcagcgtattggtagaagacatatccgccatggatatttccctcctgtattttcgacatatccacttcgatacgttgataaaatattttatcttggttttaagatacaacatttgtttatatacgtcaacttttgttgatagcaagttgtgtcggactgcaaaaaagcatgaaaaatgccgcgcgtcacacgacacgcggcacccatcaaaacgcttgctcgcccctacctatcgtccgcaacactcaggccgacgcattcaaacagagcatgcgcatcaagatcggggaacaccgcaggcacctgtctcatgctcagcgatgcggcggcggcagccaaacgcgcgctttccacgtcgttgcgcccttccatgcgagcccacagcagcgcgctcattgcaccgctggcggcaccgttctcaagctgcagcgcatgcgagtcgcccttgggcaacggcacggtcaccgtctcctcgtcgccgcgatatatcaggccaagcccctgcacaaacatcagcgcgtgcttcacaccggccttggcgagcgcctccatgcaggtatgcgcggtccgctcgtcatgcactgcgattcccgaaatcaactgcgattcggcctcactcagcaccaatgtgtcgacattccccagtaccggcaccaagcgctctgccttgttaacggacaccacccttgcgaaaatgggcctactcaccttgctgcacacccatgccaatgtttgcgacggtaggctggaatcgatcaccaccgcctcggcattgactatcaccggttcccgctgttccaggaattcaggcgtgatgctctcgctgatcttcatatcatcgagggcgacgatctgcttcccatcggcatcgaccaccgaaaggtagcgcgatgtggacgcattcggaagctgcctgcagtaggtgatgtcgatgccgttggcgaaggagtcgctgcgtacatgctcgccatcctcgtcgtcgccgtatacggagatcaggtagttgcgcacgccgagatgccccaggttgaaggagacgttgcgggcgatgccgccgaccgttgagacgatgctgccgacattggagctctcccccaccacgtcgttgtcggcaatgccgtacacatccatgttgatcgcaccgatgaccgccacatagcgaggcggcgtgagcacatagcctttgccctgaatgtatccctttttcatcaggttggagatatgcgcggccacaccggaacgggtgatgccgcaccattcagccaactcgttttggctgatcatcggattctgctcgatcttcttcagaatctgtcgttcgcgttcggtaagtgccatatcattcccctttcagcacctttcagtgtatggcatcgggaatatagccgcttgccgatcttcgaagattgcggcattcagtgcctcaaatccgttcaacctataaagactactgtctctctgaatccatatcccgccataagaccggcaatagtccgccaatcaaagtcgtctcaatcgtcatcatcaatctcattcattgacacccagcaatgctggatatggtggatagccgactgcattacaactgatatagagcaggggccgccccatacggaagcagcccctagctatgcccaagaaaaacagtcactccgcataatgatggaagacgcccttgagcatggcagcaaaggcgtcacgatccaccttcatgccgaccttgcacttcggctcacgaggatcgtcctctggctcgataacagtctgcccactgttctcagcatcatcgccgtcctcaacgtacacgtatcgctcatcgtattcaatcaggtctggattgatcactgatgcgacagctaccgcgtcatgaatgacactgttgtccgagccaggcagatgactttgccgctcggagaacgtggccaactcatggagcatcttcgagggacgtgaatcgccaccaatagcgagcatttcctgaaaatcagcttcggtcagcgccgccgcatgcgtgatattcaaaccaatcatctcaacgggcagctgagcaaacacctcatgagccgccgtcggatcgatgaatacgttgaattcggcaaatttagtgatgttaccgaatgtgccaccgcccatgatgcagaaacggttgatgtacttcggcagatccgggtgatgctgcaatgtcagcgcgatattggtgagcggaccggtggcgaacaaaatcaaacgcccttcggctttgactgcttcctcgtagatcacatcccatgccggcttggggtcaggctcaattgacggggggtcgaacaccacgtcgcctacaccggaagccccatgaatagacgaagcatcacgatcgtacgccttgcgcaacggtttttctgcgccgaacgccacacgacagtcaatacccaatgtatccgctagacacaatgcgttatgccgggtaagcctagcaggcacattgccttcgacggccgtgatggccacaatgtcgaagcctggatgagcatgagccatggcgatggcatagctgtcgtcgacgcctggatcacaatcgatgacgatgggggttgtactaatcatatggatctcctttgatgagtgatttggttgacaattagttaacaggacggttggtagagaactatcgattggccattgaccggcgtttcggaatatctacgggtatacacgcattttctcaaatccgccacaggcgacgatgaagaaccgtccataccactgcaaacgcggcgataagggcgaataccagaaataacgtggtggcatttacagcagagaaaggacgcacggcaatatatccgccgaacacagcaatgcccaccgagcctccgccttgcagagcaagatcgttcatgccgacaccacggccatattcttccggacccaacgcatcaagtaccgtggacgataccggcgaatacagcatggccataccgatataaaacaccgcgagggaagcacctacagcaaccatgctcacaccggatgcgaatgccatggccaccagacccaccgccatcagcgtgcatccgagcacaatggcggcaaatctgccgatatgccccgctatgcgccctgacagcgcaccggagcaggcggccagcagcaatggcaccaacatgaccagcgctacctgaaaggcccccatgccgtatacttcaccgccgagtgcattcagcagcggactaattgcaaaattgatgaaatagatgatgacgatagtgagcacggcagtagcccatcgcctattcgtgaagaacgaggtggtcataaacggctcacgcgccttggcaatatatacagcaaacaggatgaacaatgccacggacactgcgaccatccaccattgcgatatcgagaagaacaaggtgaggaataggatgcctgcaccaaataacgcgaaccctggcacatcgacatgcgctccggttcccatgtcaggaagattcctcatcagaaccggcagagtgaacaatcccagcagcggcactaagaacatcagcgaccagtcgatcgatccaagccagccaccgatgagcacaccggcagccgttcccagctgataggaggcggtgaacaggccgaaccacagcagtttctcccccggtttgaggtatcgagccacgataaccaaatatgcagagccagcggtttggaatcccacggtctgcaccacgcggaacacaatcacccacaacagggatccatgaaggagaaacccgcctatggaccctgcggccagcaccataatgccaatgacagtcatcctgcgcagggaaatgaaatcaccgagtgaaccgaacacaaaacatacaatgcctaagacgactccggggatggccgtgatcagtgaagcggatgccccagcatccaaatcggcaccaatctcatggaacactaagttgaacgcgtgaatagcgagcgtgcccaacagatagacaaacagcaatggaaacagcgtcttacgagctttggcactgactgcggcaacatcgacagcagtgtcagactcttcggaagcggtatcgggaacattgtgtgccgtggaagtgatgtcgctcatatgatgtcctttccgtcaaaccaatcagtacggatcttggaagagcgaatacgggaaaccgacatgaattggaatcacgagtgcagcgaaatgaatccggccaccggaatcaggaattccggcggccgaatcacagctcaggaggaggaatcccaagcacaatcggtttgtgtcttaccagacgaacagaccgacaatggcggcggacaggcaggagacgaggatgccggcaaggagcatacgacccacctgcttggagattgcatcattcttctccttatcgacgatgcccttgaagcagccgatgaccatacccaaggtggagaagttggcgaaggaggtgatgaacacggtgagtactgccttgtagtgctcagcataggtggcgatatcaccagtgatctggcccatgaccacgaattcattggtcacaagcttaagccccatgagctcagacatcgaccatgcagtactcggatcaagaccgaagagtagcgccgggatgtacatgattacgccaaggatggattcgagggaaaggtgctcccaaatcatgcccaggaaagcatcgatgagtcctgcaagcgccacgaaggcaatgacattggcagtgataataagcaccagcttgccggcgccgaggatagagtcaccgaggaaggagaagaacggcgccttcttcggagctgcaggatccttgtgatagagctgcttataccacggcatcgcgttgtacttggcgatggaggcttccttcttggcacgctcctcatcgctcaggccttcgaagacatccgcctcggaatcagcaagaccatagatgacgtcctcttccggagtgacctccacaggatagagcatgtgagaaacgataagggcgttgatgcagttcaacgggatggcggtaatgacatattcgccagggaccatctgaatataggaaccgacaatagcggcagtgatgcagctcatcgacatcatggcgagcactacattacgtcctgccttcatgcgctgaagctgaatcttggagacagccagagcctcggtgttgcccaggaacatcatctcgaccgcatagaaggtctcaaacttcggacggcgggtgatgaggctcagcccacggccgatccatttgatgacccatgggagcaaaccaatgtaagtcaggatatcgaacagcgggacaatcaggagaataggcaacaacgccgaagcgatgaaattgaccggggacgggtcaacgccattggcccccacccagttcgcaagagcgaaattaatgcccttataggagatattgacgatccaggcaaagccgtcggcagccgccttgactacggcacgaccggcttcgaagctagtcagcaagaaggcaatgacgaggttgaggacaaccatgcagccaaccgacttccatttgatgcccttacgattattggagaatacccaacctacggcaaggaagaccagcaggccgaggatgttgatggcaagatacatgggagggtacctttcttatggtttatgttcttgtgtgatgtctaatattggacttcattgaccgcatcagacgatgatgtcgtgaatgagggtgatgggttgggccttcttgccaatagtgatgttgttgcggatcaaccgttcaacatcagcgatgtcctcacgattggagtgcacggtcagtaatgtttcacctttggccacggaatcgccgactttcttgttcagagtcaggccaacggcatagtcaagcacatcgtccttggtggcgcgccctccgccaagcatcatagaggccaaccccagcttgtcgctggtcatggcagtgaccacaccctcttcccccgcaataatcgggatatgatatcgggcctgcggcatgattgttggatcgtcgatcacggtgtcatcgccgccttgtgcctcgatcatcatacggaagcgttccagcgcggatccgtctgcgatgtgagactcgagaatactccggccctcctcaagagtggtagctttaccacccatgtgcagcatctgcgagccgatggtgagcaccagatcaagcaggtcgtccggcccctcacctttcagcagcgcgattgactcttcgatttccaaggcattgccaatggcacgtcccagcggctggttcatatcggagataaccgccatgatatccatgccgacgcctttgccaatatcgacaagagcacgagccagagccttggcgtcctcctcattcttcatgaaggcacccgagccggttttgacatccatgacgagcgcgtcagtgccactggcaattttcttgctcataattgagccggcaatcagcggaatggaatcgacggtatcggtcacatcacgcaaggcataaatctttttgtccgcaggggcgatgttgcccgtggctccggcgatgatgcagccgacttccttaagctggcgtttgaacgcatcctcattgatctccacagtgtaccccggaatggcttcgagcttatcgagtgtaccccccgtatgcccaatcccctaccggaaatcataggtacgattagcccggctgcggcgaccagcggagctaacgggatggagaccttatcgcccacgccgcctgtcgagtgcttatcaactttgacaccgggaatatccgacagatccagctgatcgccggagtggagcatggccatagtcagttcacgggtttcttcggctgtcatgccgttgaaccagattgccattagcaaagcgctcatctgatagtcgggaatatcaccagcggtatagccctctacgacgaacctgatctgttcgtcactcaatgtgattttgtttcgctttgcgtcgataatatcaagcattcgcatcaatttgcgactcctttgtcttatgcggaatgttgtttctacagactaaaacatcttcgcattttttacaaatgcgcgtgttgcatagtttacattttttcagaataagtgcgcaaagacacctggcatcgcaccatcatgcgtgccgtatcaattctcgaacgacagaagatcttgcgcgctatcctcgtcaatcaccaacgtattggcgtatccggcaacgacggctgcacgggtcgccggcactttggccgtcgacgcaaccaccaagatcgaatgcggcgtagccttgaggtctgccagctcaatgccgatggtgcgccggttgatatcttcatccaccacacgcccatcgatgtcgacgaatcttgaaacgacgtcgccaacagccgtggcctgcaaatgagactgttcacgctgagtcaggtaacccaagcggaacagcattgccgaatcgcgcaccgtacccactgtgaatacggctatgttggcacgccgccccatatcggctatatgacggatataggtctcgcgttccaccaacgccttggtctgctcctgctcaaaaatcaccggcagcggaagatactgcggtaacgtatggaaggcgttggcaaaggcattagcactttcgaagccatagttgttgtgttcggtgttcgaggcgctgcccttgatctgcacaacggtcacgccgcgcacgtcctttggcgccagatgctcgccgacactatgtaccgtacgtccccagccgataccgatgatatcgtcgtcacgcacaatgctttcgatatagttggctgctgcatgtccgaccgtgtcaagtcgatcggctggcgcgatgttgcgcgtaggcacgacaatcacatgacgcaggttataacgttgtaacaactcgtctgccatctgctcggccgtctcacctggatcaccgatttcgatgcgcaccagcccagtatcgagggcatggcgcaacaatcgggagacagtgggacgggagatggacagctccttggatatctcactttgcgagcgatcctgctggtagtacattttcgctaccctcagcgcctcggcagtacgacgatccttggcagccatgcccatctccttccccatttccggatttactacgccttggcgatagccgtctccaacgcaatggtaatcatatcgttgaacgtgcgctccctctcctcactagtggttttcccttcagagaagagcaaatcggataccgtcagcaccgataatgcacggaagcctagttttgcaccgagcaggtacaagccggcggattccatctctgtaccgagcacgccgtaatcggcgagcttcttgacatcgagttcgtcattataaaaacgatcggcggcaagaatatcgccgaccttcacgtcgatgccacgctcctgtgccacatggtaggcggcatgcaacaggccgaaatctgccaatggcgcgaaatgcaccccatgcccaaaggtgttggagacgacagccgaatcggtagtcgaaccagacgccagcagcacgtcacgcaacttgacgtctggtgccatgccaccgcaggatccgacgcggataatagtcttgacaccgtagatgctagcaagttcattgacgtagatcgatagcgacggtatgcccattccagaggcctgagtagagatacgatgtcccttgtacgtgccggtaaagccaaggcagttgcgtacagcattgacctgcacaacgtcttcgaggaagttttcggcgatgtatttggcacgaagcggatcgccggggagcagaacgacatcggcgtaatcgccgggttcggcttcgatgtgaggagtggccatgagtgttcctttcaatggtcaaaggatttacggatgagatattgcagacgcgtgaaagcgcatgcgttgcgaacgtgacgcgctttcacgccatcatgttggacggggctcagcaatacgcggactcagacgatgctgttcaagaagctcacgccgttgccattgccctcgacatcgaagttgtcaagaatggtggcgcccatgtcggatgccgtgtcacgtgtaccaagcgactggctgggattggccatggacggcgagtatgccaggatcggcacgtattctcgcgtatgatcagtgcccttataggttggatcgttaccatggtcggcggtgatgagcaaaagatcgtcatcgtgcattgcacccatcacacgccccagccgctcgtcgaaggccatcagggcatcaccgtcgccttgggcattgcggcgatgaccgtacatcgcgtcgaaatccacgagattcacgaagcacaagccagtgaaatcgagacccatggcttcgtctacatggtccatgccgtccatattgctcttattacgccaaccccgatcgataccatggccggagaagatgtcgttggttttgccgatagcgagcacatccacacccgcctcgtgaaggaaatcgagtgcggtcttctcggtaggctccaggccataatcgtggcgattggcggtacgcgtgaaatgatccttgtccggacccacatatggtctggcaatgactcgccccatcatgacctcgggaccgttaatcaacgtacgcgcgtattcgcagatgcggtacagctccttcaccgggataacatcctcatgcgcggcgatctgcagtacggaatcgcccgacgtatacagaatcaagtcgccggtggccatctgatgctcaccatagtcatggatgacttcggtgccggagtatggcttattgacgataaccttgcgaccggagaatgcttcaagcttgtcgacaatccaccgtgggaacccgtttgggaacgtggccatctcgaagcgcacaggcaggcacatcatctcccaatgcccatcgagtgaatcgttgccgtgcgaggtaatcgtcatcttgccaaagcagccaacggcatgctcggccaccggcacaccctgaatggggttactgggcctgatgttgctcagacccagtttgcctagattcggcaggtgaagctcgccgttgaagaattcgccgatatgccccagggtgtcagcaccctcatcgtcgaatttggccgcgtccggagcctcgccgatgccgatggaatcgagcgcgatagcgaatacacgcttgtaccgtcggtaattatgcgtcattgcattcctttcgtcgttgaaaaattacagcgtatacatagagactgataagcctactggcgtgcggcctcttcaaggatggccacggatgcggagacgcccaagcgcgtggctccagcctcgatcatcgcataggcgtccgccaaggtatgaatgccacctgctgccttgacgccgaagtcaggtccgacggccttgcgcatcagcgccacgtcaggggcggtggcacctgcggtggagaagccggtggaggtcttcacatagtcggcgttaccttcgacggtgagcttgctggcacgcgttttctcctcgtcggtcagcagcgcagtttcgatgatgactttgagcagcttgccgccctcgtgggtggcatcggccacagcgcggatatcgttacgcaccacgtcgtcgttgccggccttaagctcaccgatgttaatcaccatgtcgatttcgtcggcgcccttggcaatggcgtcacgggtttcgaacaccttagtctcagtggtggaggcacccagggggaagccaataacagtgcaagtggccacaccggaaccagcgagagccttcgagacgcgcggtacccagtaaggattaacgcatacagatgcggtgccgtacttgatagcttcggccaccacagcatcaatctggtcagccgtggcagaagccttgagcagcgtgtggtccatatacttggcaagttgggcttgggtgaggttcatgtcatgcctttctcaatggaatcagtcatctttggctgactgagatggttatgactataacagctttttttacaattgtcaattatagaaaatgaatatttgtaacaaattgaagtatgtcaattccatggaatgcggtgcttacacatcagaccgcattccatggaatccacaatgtcaactaaacatcgaccgaatctgcgcggtggtgccatacgaggcctgggcaccgtaaccggtggcggcgtaggccgacacgtatgacgcgagccttgccgcgtcctgcaggctgaagcccgatgccagcccggcgagcactgttcccataaaggagtcgccgcacccggtagtgtccacggcatcgaccttcaccggagcgatgcgcacaatccactggccttcaggagctgcggtgtccagcaccacagaaccgtcgccaccaaggtgacaatcgcctccttgaacccgtattcggccatgcggtcggccgcatgctgccaatcgaaggcgccccaattgtcgtcgtcgggctcgtcgatgccgagcaactgggccatctcgtgctcattgaccagcagcacgtcagaggcttcgatcagttcagccggaatcgtggacatgaacggcgaatcgttaagcagcaccttcaccccggtctcatggcacatctgcgcgttggaacccggcgagtagacgatgatgttctcgccttcggcagcttcgagtccaccgtggcgaccagtcccgtgcaccggtcgccgaccacgagccggacgcccttcaggccgcgttcgatc

SEQ ID NO: 439 - DNA, 8153 bp, Unknown
  R48_24m  MAG No. k141_17494
ccgaacggaaggattcccggactgcgggttcggcacatcaacgggatctcctctgcccacgggccggccggatcggcgaaggcctgaacggcgtcccgcgcaggaagagcgcgacgggcggcaccatggcgcgcgtcgcggcggggaggagggtctcggcccatgccaggcgcgcgcgtcgttccggcaaggccgcgcgatcgggcggccggagggccagatccgccgccaaggcctcgacccaggccgcacggcaggccatacggatggtcgcacggacggcgatggcggtgaaggccggcatcaccgcagcggcgtcggccacggtcggcgtcccgatcctgctgggcgcggtggccgtgctgatgatcgtcagcctgttgctgtggttcatccccaccgtcgccgccggagacggcggaggctgcgaggccggcgtgatcgaggtccctgacgaggcgaagccctgggtaagcgaggcggcccggtcgagcgggttgggcgcggatttcatcgcggcgctcatggaacaggaatcgggtttccggccggatgcgtacgccgacgacagcaacggcggcacatggggcctgctgcagatgaacaggagcgtatggcgcggcgtacatcccgacggcgccgaccagacaccacccgaaggcatcaccgaccccatggtccacgcccattacggcggcatgtacctgaaaaaccgtctggaaggcgtcaaacagctcaaggccgcgcacccggacatgccattcgccaagctcgacgatctgacggcactggtcatcgcccacaacgccggcgaaggcaacctcatgaaatacccggatatcccaagcatcaccaaacggtacctcgacaacgtcagaccggcgatcgacatgggaggcggctgttcggccacggcaggacgaaccatcggcaagctcgcgccgccgttggccatgcagcccggcacgttgaatgtggacgtggcggcgaccggcacgcccgtgggcaggatcaccacctatgcgaccggccaatgcacatggtgggcggccgcccgccgactgcagatcggcaaaccagtggacggctacatgggtgacggctggatgtgggcgtcaagcgcccggaaactcggatacccgaccggcggcgacatacagctcggcgacgtggccagcttcaccaaaggctatctcggcgcaagcaccgactacgggcacgtcgccatcgtcgaggaaatcaaagacaacggcagcatcgtcatcagcgaatccggcggaggcatcccgtacgcatggctcaggaccctcaccaaggaacaggccaacaatcccaacatcacctacatacactgaccccgacggaaaagaaggaaacatgcgccgcatcaatcccaggctcgatccttacgaactttccgacctcatgagcgaccccggcaactgggaccttcttacccagatccacgaccatcccggcacatggccggaactcgaccaatgggccgcgcacgccatcgaggacccgggaacggccggagcgccgccggaaccaccagccggaacgagacccggacgccggttccggcccatcgcacccgttctcgacgacaggccggcacgagccacgcgaaacgagaagaccaagacacacacgcccgtcacgcataggcgggaggaaccgacaacagccccgaaacccagggaaaccggtggccagacagccgacgacgccatcacaccggaggaaatggcgcccggggaatcggacgaggtccccgtacgccgacgcatcccccttgtccgcatcatcggcatcacgcttacattggccgtcatcatcgggtcggccgcgggtctggctgcgatgatgagcatccgggaccatcaggcggcgctcacgtcatgcaatcaagcaatcaagcaatcggacacgatacgaacggactggggcaaggtattggaacaggccgaaccatacctgagactcggcgacggggatgtgcaggatcccaagaccctggaactggtcgccgcgatcacgcgataccggctcccggaaccgccggccgcctgcgatccggacatgacgacgaaccagctcgaccaccggcggacgtccatggaaaaaacgaacggccaaatccaggcccgcaccaaggacctgcgcgacgccgtcggcaaggccaaagcctcacgcgaacgcaagcagctcgccgacgcgcgggagaaactgaaccaggtcatcgaacaggccgacacgctctacaaggattccgcggacaggaccgacgacgcccggccacgcatcgatctcggagccgaactcgaccacgcccgacacacggcgcacgagaacaataacccctccacactggaacaggccgccgaaaggctcaccgacgccatgcgacgggtcaacgagtcgatgcaaaggaaaacggaggcggacgccgccggacaacgcccctcaccaagtacgggtgccccggaccatgggggcgcgcaaccgcatgcgggcgatgcggatgccggcgaacccggccaatccgggaacggattcccgccacagcacaagccgtcgtgggatacgaatcagggggattccccgatcttcccggacgaattacgttttgagcagagatgaggagcggatatgttcgctgtagggggctggttcgtcttgttcgtaggtgaggaatgggatagcgtcgcaaatcctgatgtgcagaccggtgaaaatgtcggatatttctgctgtagtacatcgctcgacgcgacagcacggggtgtcggatgcgttttccatggaagctggcataggacatgtcaggcaatggcatagatatgacaaaatagatattagagagatatatacatatacccgctgtagtgtacgtcatctgcaatgatgaaacattcgctctcttcggcttgcatggtagcattgcgggcaatggtgatgatgttcatgcgaaaggtagcatatgaatgataatcagattgactggcgtgagaccgtagagacactccttgcccgctcgaaacggtcattcgtgccgattgacaaatccttcgtgcagcttccacgtggcaacgaagagcgcaacagcgtgcttgcccggttcatcaggaacggagatttgcgcggtctcaaggcgtatctgctgatagcggcatcgaccagcagcagcgatgagaacggggaatggtacaccacactgccattgcagacctgggcaagggcgttcggatgctttcagcatgccggaatcgattcaggaaaagctgcagccacgaagatactctcccgcctgcagcaacggaaactaatcaagcgggaacgatcaggctccggccgcgaggtcaaggtgcgtcttctgtcccaggatgggtctggcggaccctatcagaggcctcggcaacggtttctgcgcctgtcatatgagttctggcgcaccggtctcgacgaggaaatcagtcttcccgcattggccatgctactggttgtactgggagagaaatcctactgccggctaccttctgagcgcatgcccgaatggtacgggtggtcggctgacacagccgaaagagggctgcatgagttggtcgaacgcgggttggtcagcagaatatcagaaagtatttccacgccattgagccccacagggttctccaaggtgaacacctacacggtgctaccgccgttcgatcgggaatcgctgaactcgtcccgcagaagaagagacatgacggaggtgaaagccaatgagtaatctagtcgcttggggcgatgaaagcgtcagaacgcagggacaagacgttcccgcatactacatgggtgtctgcatctgcaatctggaggaagttgatgtacatcggatgctgaccacggtcaccaaaagacacgtgcccaaacttcactggcgcgacatgacaccttcggagaaacgcaaatccataccgattatcgaacgactcgcattgtcgcacatcgtggtggcggccataccactcgacgggtcggtgagttcggagcgggccaggagaaaatgtctggaactgctgctgcccgtcttggaatacgagtatggggtgaaccgtcttgtcttggaggcgcgcgaatcccatcaggacgacagggatctcgactttgccagggggattcgcagccgacacatcatcgagacgttgcgtgtagatttcaagcccggcaatgaggacgctcgtctatggatcccggatcaggtccttggcgcactcggggatacacgcaacggtacgatggatttcagcccgatggtcgcatccttggattttcggaccgtggatcttcgcacaagctgactcttcccgaaacgaatcagatatcactggtcgttggtgaacgatatagtatgagataagccagcctctgaggaggaaatggaagtaggagccggattccctgtgcatcatgggggccggctcctgcgctatcgattgcgagccacaggaagctctggatggccagagatttcactaatgattccaatcatgacattattgaagttcctgtatcaatgacatcaatatgtttaccgagcacgtcactgtgcatcgacgatgctacgttattcccactgacgggaagcagccaccgcggctgcttacaatagcttctcgacaaattccacaaagattgatcatctgatatctctctgcttttgggcgatgcaggcgatgccgattgcggtcatggcatacgcgagggcaatcgcgccgctgagcatcgggctgatgcctggtttgggttccagtatggcggtgccggctatggagggcagccattcgtgcaacgtttggggtgcctgcagattggtcacgacgatgggcaggagataatacagggctatgtaggcggccgcgcctttgcccgccgagtcgagggtcacgcataacgcggcggcgaccaacattcgtccggcgagtatcaatgccacgggcaggcacagcagcaatgccgtggacagcggcgcgggccatgcctgttcgggcacgacgggattgaggatgagtcgagagacctcggtcgcagcaagcgcgccgagcgtcgccgcgataatgccgattagggcgatgtcggtgcacagggccaggaacagtcgcgtccgtttcggctcgatcaggaacaacggcacggcggtggccgtgttggtcaggatgcggatggcgagcagcgcggcgatgatcgccacgggctcggtcatgggcatgacggcgccggcgatgctcggccccatgcccgccagcgtggccaggccgtcgagtttggaatcagtggagagcatgagccgcacggagacgctggtcagtgcggtgaacaagatgaacgccaccggcagtccgaaccatgccgtcagcggtgccggccgacagaccgcatagcgcatgagcagcgtcaaacggcgtatgcatcgtcccgtcctgttcatgatgcgtgttccttttccggggtttgccggatcatgccggtcatcacgtcacgtaatgtcggctcggcatggtccagacggaccagtgtggcgtcatgcctcgccgcaatggcgaacacggcggcctcgtccgtctgtcgtgccagataggagccgtcatccgagaggtgaatgtcggcaccaagccgggccagatcgccgatgaccatggcctttcgagtctcatccacatcgggcgcgaaccggaacacggtcccggacttgccgccgttgccggcgatgacctgttcgagcggcccacaggccatctgcctgccgtgcatgatgatcagcacgtgggtggcgatgcgctgcagttcgtcgatctcatgggccgcgagaatgacggtcttgccggcggcggaccattggcgcatcgagtcgtgcagccagagtctgccggcgatgtccaatccgttgaacggctcgtccaacacgagaaccggcgcgtcggcgatgatcgcgccggccacgcccagccgttgccgcatacccgtggaataccccttgatccgtgtcttcggccaacgctccaaaccgcagtcgcgcagcacgcggcgcacgcggcggcgcacgttgggcaattccatcatgccggccatgaacgtcagatactcacggcccgtcatcgactcatcgcccaaccggccgcccagaaacacgcccacctgcagacccggtcgctccaactgcccgtacgggcggcccatgaccagcgcatgtccccggctgggagcggacaggccaagcgtcatgcgcagcgtggtggactttcccgcaccattcgacccggccaccgccaccacctgacccggctgcgcctcgaaatcgatcgggcctatcgtcggcccggacgcataccgcttgaccaggccgcgaacctcaacagtggcgtccatggcgagtcttgccgcgatgagataccggatcgccggcgtttactgatgccgcgatactggaatctatctgccctagctcatctccgatcatttcatcgtcagcgacaatactcggttccggaggcttttcctccaaccgaacgactcctctgcgctgatccaccacctcatgcatcagataaaccacaaatggcatatacagcaggctgcacaccatcaacacaatcatccatttgaactggcggcgagcccactgccgatacgccaacaccagccagaccgccgaacacgaccattggaacaccgtcacctgcacgaccgcgggcggcgtggacggcacccctgccagcaaattcgagaacacctcatgcgcgtacctgccatacgcaggcaacgccacggcctctgccacaccaagccacacgatcagcacgccggccaataccagataccaccagttcaaagtatggcgacgcccgttggaaatacgccacttcaaggactcaaaccagaccgaaaggcgaatcatgatgctccttaaatatgagatacgtatgtttctataattgcagcaaggacaagcgaaatccatgaaataaaagccattgacagggtcaataaaacgacattacctgtatcaacatttcgtttctgactgttttgtaagaaacataattcataatgtgtaatagttagtgcaatgcctgcagcagtaatcaaggaaaaacattcaaagaaaagatgcggaataaccgctgttaataatttattaccaaagccttggaacaaatactgagccgcactccaaccaaagatgccatagttaataaccaatacgatagttgtaggaatagaaaaaagaaatccccctaataatagtgttagccatactttagtattattccacagcagttcattaagatacacgtttggaattatggccttgctcaaagggtacggacgtagtctggccaaaagtccaccacccagaaacgccattaaggaaatcattaggatacaacacgtcttaataaagagcaacttcaggaatcccacattattcctttcctgaaaggccataatatctaattaataaatcaccatgctgcggcacctgatgttcccaagatgccaatcatggattgaatggcagaagtgagtggcgccgccgcggggaagatcattcccaccgcagcagatccaagccaagctacagcgacaattgcggtggctgctgcgcttccaattcctagcactaccattagagaagcgacaagtggaacaacaaaaggagtgacgaacactgccgcaagagcaactgccgcacttgccatttgacgctttcccttatcgcaagacgtgaggcggatatcattttcatgcttagacatcattgtctcctttgaataatgttaacaaacactatgtaacttcattagttaattgcattagtttccttgagtaatacatcagcattattttgtagcctgctattggtcgcacttaatggaggtgatcgtgctgcattcgtaaactcttttatcatagggctccttataaaatctcagtattataatgttgccattttattgctataagacatcgacaagagtctcattcgcaattctctcgttccatttgcattgtcagcttctcaaattgaaggtggacttacaagctccaaattgtcaactgtcattccgggatgacaatacctcaggattttttggaactatgtatca

SEQ ID NO: 440 - DNA, 3703 bp, Unknown
  R48_24m  MAG No. k141_18081
ccaacaaacgaaacgacgagccgcgtgaaaggaagaaaaaatgcagaacaacaccttcgaccagatcgccaacgccaacaccgtttccatggatgccggcctcagccagttcgccttcgccaaggcctcctccaccttgttcaagaaggttttcagcaagtagtattccaaaagtctttatcaaacgcctcggctgctgtgatgaaccggtccagcagccgaggcgttcccatataccttggaccgtccggcaaccaatcgcaacaaatcgtatttacgcgccgatcaattcgagcatctgcggaatgctcttcttgccgaactcgacctgctgcgtgccatcggcttcgcgctgtggttctcgatcgtcacgccgctgaccgaaatcggtctgttaccaatcggctcccgtccggccaagcgtgatctgggcgccaaggcccttgacgatttgcaccatcccgtggatcttctcctgggcgcgggcgcgcatcaatctggccgcatggtacggcctgggcaccgcatgcgaacggttcggtgatttggatatgctgcgccaagagggtggacaaggaggagctctcgcagagccaacaggccggattcatctacctcatcctgtacaccgtctccggcttccccgctcgcaccatccgccaaaccacagcgatgctgatacttgccgatggagggttcaggcccaggcgattccgaaaaggtcggctctgctctcatcgaacgtcttgagcagacgccgcagcaggaaagtcgcgaaatacggggccgtgaagattccatcgctgctgccgacgttacccgccgtcagcttgatgccgaaccggatgtccggatacgagtcagacgcaatcagcgtgcgcaatgatttcgcggtgccgttcttcgacttcacctcaacaggaatgagcgcgtctcgcgaccttacgaagaaatcctcctccaaagtggagttctccctcttgtagtagtagaggtcgtagccggccttacgcagcgcctccccgatcacgctctcgtacaaggcgcccttgtatatgccaaggttccggttcgcgcggaaatcgtcgctggcctcgtcgtccagcatggagacgaacagtcccgtatcggcgaaatacatcttgaacttgttctcgtcataattgccccgcaaaggcaattcggggaacgacaggcaatggcacacattcacaattcctgcggtttccagccattccacgcatccgcggtagtctttgaagcgcgctcctttggcgactttgctgatctggaacttcttgttctccttcgccagctggaccgggatatgcctgaacacgttgaggattcgggcccggtccatgccgtccgcgtatttctggatgtcttcctcgtagtccagaaccagctgacgttgcatattcaaggtgccctcgaaggtgccgcgtgcaatgtaggaggagacgacctcaggcatgccgccgatggtgcagtagtcgaggaacgccgaagtgaatgtgtccatctcgatccgcgagaagggccgtaacgaaatcaaatgatcgaacatggattcgacgatcgcaccgtcgaatcccttggcccacaggaactcctcgaaatcaagcgaacacatcccgtaatcggtcttgtacccgacgctgttgctctcgatggtcttgtaattaatccccagcatggacccgctgcagatgacgtcgaaacggccgtcctgcctaaagaacttcagcgtcgtggcgatgtccggatgatcctggatctcgtcgaagaagatcaacgtttcatggggaatgaagcgcagtgtcggatcaagcagcgacatgctcttcaccacttcgtcaacggaatatccattctgcgtaatcgcacggtatctgggattctccacgaagttgatctcgacgacactgcggtaattggcggaggcgaaatgcctgatggcggccgttttgccgacctgccttggccccttgacgataagtggcttgcgattaccgtcggccttccaatccaagagaaaccggtcgaccttcctgcgcaggtacacgttcccccactccttccagaacatccaacgctctcattctgcatttccatgagcgagatttgacatcactgtaacatttcatgagggacatttcgagtcatatacacattttatgagggacattctctgaaccactatcatatgcccaaggcgctgcagcaggttcgcagaacacggctgatcgttcggctgactgtctagataggcgagcggggaggttccccgctcgcggtcgtacggtcccaaactggccgtcggcggatgatcgcggacaagcgcgggaacaccggtgacacggacggtatcaaagcgaagggcgcggtggaaaaccgaatgccagacctacccgtcatacggcgcaatccgtattcgcccacaccctcacgctggcagccatcgtggcccccacttctcatcaagaatcatttgacagatctctcagatcttacggcgaagccaattgaatatatccaattctctaattggagggtgtttttatgttacctgttaactaatgaacagcacattaattcccttaaactgcgctaatcgtaattagcgcaactcacttgttcgcagctcaccggatgatccgtgagctgcaaacaaggatgagaacggtatgcttaaaatcgagctaaaaggtgattccaaacatattgtcattgcatggcatttggtcaccagattccataccgagtgtttacgcaccgatcaattcgagcatctgcgggatgctcttcttgccgaactcgacccgctgcgtgccatcggcccgtgtgatgacgatgcagggcacgctcatcgcgccataatggtccctaagctcagggaagtgcgcaacatcgtaggcctcggcgcgcacggccgggttcagcgaggcgatacgctgggaagcgagcacggtctccgggcacatcgtgcaggtgagcgagacgagaatcatgatgtccaacgggtccgtgatggaccgcgcccgttcgatcagatcatcacccaacggctgaccgggaccggccacgttgtacaggcccagcacgaacgaattgaattcatggccggaaggcacaccatggaaggcgaggccggtcggctcgccgtccaccaccatgcgcacacatgggcgcgcggcgggcagcacgtgttccacgtcgaataccgcacgccccgtatcatccttctcgtactcaccatcgaccaccgtcgatttcagcttgccgccggacaacgcgaccaacgcatcaatgaatccccgcagttccgtagacagcggcgtatcgtccagatccaaagcaagcgtgaccggccgagacatgcggccaaagaccacgttgagctgctgtctggtggcgtcggagaacaattcgccgggcttcttggcggcactggctgcggctgcggcatcggcactgcgcttgacgggtgccggagcgggcgtcatgccggcggccgaggcggcggaggcggccttcgcttcggactcctcgtaagcggagacggtggggcgaggcggcaccatgccggttttctcgctcatctgcttggcgtaacgctccagctccacggcagcaatcgcaccatcggcggtggcggtgaccacctggcgcaggttcttgacgcgcaaatcgccagccg

SEQ ID NO: 441 - DNA, 3833 bp, Unknown
  R48_24m  MAG No. k141_18625
accggttcaaatccggttgggggtacgacgaacaactcttcggagttgctacgccaagccaaattggggtgtggtgtaattggcaacacagctgattctggttcagccattcttggttcgagtccaggcaccccagccaataaccctcgcggattagcgagggttttttgtttttacacgtcctgctcatgagatacggccgagagggtaatcctgaatagacaactctggggcaaagactgggctatagtcccaatccgtgactcaaaaacggcagaaatcccgcgtccgaacgtaaggggcgcgggatttctgccgtttcgggccgtgcaggaccggccgacatcgcgcgttgccgcgacttgagcgctgtccgatcctgaaaacgtgagggagaccgccctcgtcttacttcttgaccgcgttgacggcgtcaacagccttctgcagcgacgtggtgtgctcgtggtaccacgtgacctgctgttcgagtttcttggtcgcggcctggtagcccttggtgtcgtcggccacgcagccttcgtacgtcggcagttccacggtcagttccttggacagcgcgtcgagagcggaggcgtccgagacgtctgccttggtcagagcggcggcttctgcagcatcgccattgaccaagttgttgtagtcgttggtggcgttacgtacgtcttccgaggcggcggcgcaggcggccactgcactatcgtactgagacgcgctgtatgcgcgggtgccgaacaccgcgaccgcggcgataatcgccaccgccacgatggcaatcactatagcgacccacttcgtcactcgcttgttgtgcggctgtgccgtcgcttctgcttggttctgggattcgggctggttgccgttcgcctgctgtgcgtcagtcatatttacctctacttctcactgcccctgtttgtatcttgcggagggcctgtttcaaacaacgggtatccaacatatcgaggagagccgagattgccgggcgtttcctactggttgcgctgtggcgtggccgtttttgtctcatatggcgaaagtatgcgccagaggctattgccggccggtgacccacggcgcatccgaatggacgtgcggaatcatcatcgcgatgaccgccagcagacacccgagcatcaccatcaagatgatgttctcgtgtccgtgcgcctgcagaagcgcgccggtcagcgcgccagacgccagcgccagcattacgaccgcacgccgcccgagcttcgactgctggtggccgtgtgccgaagcgtctgcgacgacgccggtcagcgtcatcgtgagcacggtggtgggcaggtccggcaccgacagcttgcgggcggtggagttctggatgcccattgccggggcgagcagcacgatcagcaggatgatgtgcaggtcgatgtgccgtgcggtggggaagttcaggctcggctgtgaggcctgtgaggcctgggtggtctgtgcaagccgtgcaatcgaggagacgccggacgcatcgtctgcggggccggtgatgagctggttcaaaagatagacgccgattagcgcggcgagtacgaacgacgcctgcacgcaggtagaaaccaacagatgcttggcccggttctcctcgaatcgccggatgatgcgcccgccgataagcgcgccgaccatgaaggagacgagcgtcagcgccgacgtccaccagacgaagccttgggcatgggcgatcgaaaacccaagaaacacgatgttgccggtcacgttggccacgaacacatgccccagcgacaggtagctcagcgcgtccaccagcccggcgacgaacgtcagcaccaccaaggcgggggagagcagaccgtatctgtcttccttgcggggaaccaacgtgcgtcctgcttcggcaagatgtgatgtcatggttgcgacgaggctccttttcgggattgaaattatggcgagaacgtgcgtcggtcgacgccgccactctactccctactcccgtacggttcctccggtttccgctcgtgcgcagatcgtcgggacggagaagacgccggtgatgcagatcgatgtgccgaaatcccgcagcgtggtctcgaccaagtcgggcaaggtgttgcgacgccgtatgaaggtggatggtacgccggagagcgtgccgatgtacccgtacgagatcgccacgcgcctgtccgatttgggacgtttggacttttccgcgcagccggtgccggatgcgacccgtgatgatttcgatccccttgaacgcgaccgtctgcgccggattatcggcacctaccaatccagtgaccgtaatttgttggaactgaccgatgaggagctggagaaatccctgcaattgacggtgaccgtcgatggcaagaccatgccgacgctgaccggtttgctgctgctgggcaagggggagtctctgaaacgcttcgttccgactcatcgggcgtctttccaagtcatgtctggtacggatatcaaagtcaaccaagactatgccggaccattgctgaagaccatcgagcaaatcaacgacatgttctctccttggaatccaagcgtcgagctatccgtcggtctgttctcaatgatggtgccggaattcgaccatcgggcgttccgagaggcgctggtgaacgccttcggccatcgtgactacaccctgctgggacgtgtgcgcgtgcagttggatgatgcggggcttaccatcgccaatcccggcgggttcgtggagggcatcaacatccataatctgcttaccgccgaaccgcatggccgcaatccatgcctgatggatgctctgaaacgaaccggattggccgagcgtacgggacgcggcatcgatcgcatctgcgaagggtcgctgcactatggacgtcccctgcccgattacacggcgtcgaatgagcgtaacgtgtccgtgtacctgcagcgcagcgcacccgacgtcgaattcgtgcggatgcttgccgaggaacaggagcgcaccggtaagactatgccggtcaacggtctgctgattctgaatatgctcaggaacgaacggcgctgcacgttcgagaccatgaacaagaaactcgatatgagtgagcagcgtctgcgcgctatgctggggcagcttacggaatccggcatgatcgaaggttctggcaacggttctcggcggacatacactttggggtctacggtctaccggcgcaccggcaagaccatcgagtacgtacgtcagacgggcatcgaccgtgtgcgatggccggagctcattatgaaattggttgcagagcagaatgatgtcatgcgggcggatgtcatggaactgctgcatgtcgatgcgaaccaggcgtactaccagctgtccaagctcgttaagggtgggaagctgagggtcattggccgtggcaaggggacgcgctatacgatcggtggcgttaccgggcgaaagtgatgtgctggcggatgtgcctgtatgggtgttttgtgctgggcatcgtccgaacttgggaagtcgtttcggtacttaggaaggtacctaggaacctaggaagtggtgtgggtaaggttcctaggttcaggtatgcgttcgtgtggcgttcatcggagggggtcagggggaaccttcgcgctgggccgaccggtattcgctgcgatgcgcttgcgatacggaggctgggattgttgcgaaccaaaacgaaaaaactgcgcggagaacacacggggaacgacaccatgggcgctgcgcccgtccccgccagcccatcaccctccacccgcgacgaggttgcgcgaagcgaaaaccttcccgaaccatatcgcggccc

SEQ ID NO: 442 - DNA, 3127 bp, Unknown
  R48_24m  MAG No. k141_18758
aaggtacatcttggcgatgcgctcgtcagtcttggccagcgacatttcgatgttgtcgatgaacgtggagaacagaggccattcctcatatgcttgacgcaaggtgtccaaatcgccgaactgctcgcacgcggtgcccagaccgtaccatgcggccagattgatgcgtgcctgcgcccaggagaagatccacggaatggtacgcagatcgtcgagggacttggctccaaggccacgtttggccggacgggagccgattggcagcaggccgatttcggtcagcggcgtgacggtggagaaccacggtgcgaagccgtcggtgttcagcaggtcaaggaagcggttatgcgcggcctcgtcgagcttgctggccatgtcggcgtacttggcggtcatgtccgtattgcgcttctccacgctcggagcggactgcagcagcgttgcagccgcaacggactcgacgtggcggatggccagtgccgggttaccgtagcgtgcgaagatgacctcgccctgctcggtgagcttgaagcggcacttcacggagccgaccggctgtgcgagcacggcacggttagccgggccgccgccgcggccgacggcaccgccgcggccatggaacagggtcagatcgatgtcatgcgattccgcccacttggcgatgcgttcctgcgcggaatgcagggccaaggttgcggaggtcgggccggcgtccttcgaggagtcggagtagccgagcatgacttccatcttgccgccggtggctttcagacgagcctggacctccggaatcttgatcatttcctcgagtacatctaccgagttctgcagatcctcaagctgttcgaacagcgggatcacgtcgatggttggaacgtcctcggggtgggagaacgccagacggttcagctcgtacacgtccttgatgttttgggcgctcttggtgaaggagatgatgtaacgacgggcggccttgataccgttgcgcttctggatggaaccaagggcgcggaaggtgtcgagcacctcgtgggtcatcggctgcagttcgccacgctcaccgtgcagaccatgttcgcggatatcctccagcgcccgggaatgcacgatggagtgctggcggaactccatctcgaccatatggaagccaaaggtctctgcctgccagatgaggtcctgcaacgggccgtaggcggaacgtttggcgttggcttcggcgagggagcgctgcacgaccttcaggtcggcgatgtaatcctcgcaggagtggtacatgagatcagcatcgcggtcgatggtggccttcagacgatcggccatgaccagcatgacggcacggtgcagctccttggtggagatcagcgcggccttgtcggtcagacgctcgctcatttccttctgatggttccacaggctcttgagctcggcgctcggcggagtggtctcagcttccatcgtcaggttcttgccaacgcggcgggtctcgatttgcaacgcgcccagcacgtggtcgctgaacttgcgggccacctgacggctcaccttggcggtgacgttcgggttgccgtcacggtcggagccgatccagcttcccgggtggaagaacgccgggcataccggcggtacgaggccagccttatctccgaggacccaatcgtcgaaacgccggtacacctgtggaatggtatagaacaacgtgttgtcgaaaatatcgagaatggtttcagattcctcaaccggagtcggtttcttcagtgcgatcggagaggtgcggaacagcgcgtcaatctcgttgaagagtcgacgggagttttccttcttgtctgaaccgccaagcagcttgtgcgttgcgagcagctgggagatgcgacggattttgccttccacggccttgcggcgggcttcagtcggatgcgcggtgaacaccggatggaactcgagatggtcgagtagttcctgggctttggccggacccatttcgttaatgagctggtggtaggcgcaggtcatttcgttcactgggtcgacggcttgggtttcatctacggctgcctcacggctgtgtagcacggagacgcggtagttctcctcgcataggttggccagatggaagtaggtggtgaaggcgcgggccagcagttgtgcctcatgcacatctgttttatcgatgatgtcgacgaccttctgcaggtcatcctgatccgaattcgtatccgtcagaatgccggagaagcgttcggcgctagcgttcagtgcgtgttcgcgcacttcatcgaacttggccagcagcttttcgtcgaattcgccgagaacctcgcgaagaatctgcagacacagatccatttcttctttgagggatgcgggaagatcgcgctcttcgggacctttggttcccgtgccggacgagacgatagctgcgtccgcaggcgtgatctgttgattattatctgccatcagatctccttctccgaaccatcgggttgctcggtctgtcggtccttcgcggcacctccgcgattgttttggccatctgttgcgagcccacagccctaagttcggtcggtaatacacggctattgtatgctcggcaaatcgacagtttggttacggaaataccggaaatgtccgcatcgtggtctagtggtgtccacaaagtgaaatcgatggaaatttcgaaaaatctccgaccagcccacacgttagacctgaacttgtgagcgcacaatacgaacatgaacatgagacgaatttcgatagcgcggaaaaaagcgcttcggccgtcagcaaattccatacacactccattccgctcgatatggaagatatcgaacgggattgggacaagccggtcgctgaagcgggaatcgcagcaaaagccagcgtgatcgtacgtgtcggcatgctcgatctcggcgcgggcaccggaagcttccgtgtccgcgaaatgatgcaccgcatcgcctatccgctcggcgtgcacgtacgcgccgacgtgaacctcaccgacatcgaagcctcctgcaccgacggcaaagaccgcatcaccgaagtcatcgacctgccaaccaccggcgtcaatacggaacgcatttggctgctcgaacacttcgctgactggttcaacgtg

SEQ ID NO: 443 - DNA, 30905 bp, Unknown
  R48_24m  MAG No. k141_19007
cctcaactcgtcgatccggatgcgttcctgtgccgacaggtgggaataggctttcatatcgagtgcaacgctttctcttcggttgtggacttgaacacttccaaccatagacaggcgttgcacttctacctagaacccgggaaatcagaagccaaatgaataatgagatagcatagaatgcatgcttctggcctatatcgatgagtcacatacgcagcgatgcgatgaggaacccaatcggcacggatatgacgtgtattatgtcggctgcctgcttgccacgtcagctcaagcagctgtcatcgataacggcttagacaacttactggagcaggtgcatcacaaattcggagtacctcgtgacgctgaatttcacggtcagtgcatgttccaatacaaggacgactggaagtgcatgaaaggcatgcacaggcagtcggcaggtatctaccgcgcagcaatgcgaattctggccgacagcggtgccagattggttatacgcggcgtgcatgtcgggcaactacaggaacgctatcgcgagcacgctcacaatcctcatcaggtgtctcttcaacattgtctggaacgtgtcaatatgattgccgaacaggaacgtgatgacgtgtcaatcatggcagataaagtggcagactaagctgctcaagaaggtcagattgctcgttatcagctgatcggcaatactgaaggatatttcccctctgatttggcacgcatcaaaatgcctttccagtgggaggattcgcgcatactgtacgggctacagatgattgacatggctcttttcatgtgtggacgtgcgagcggcatcgatagcgccaagaaattaaatgacggagacaaagccgtgctaaaaatcgttgatgttattcgccctgccattatgccccaatcagcggtctggtatccgttggaaaagagaactgactacggttttctaactaagctgagctagaaatgcataggggccgctgaagcggcccctagcctaacagcgatcataagcctacaagcctacgctcgtcgtattgcaagcttacacatgacgagcaatttaggcaatatccggctgtgtcgtccattacaacgtggagctccatcataaatgtggacacgggttcaaggcttctcatcagatgaagtggctcttccggttttaagcggcatcttcacactctgtgcttgcgaatgcgttgccgggttgcggcggcgcgcgagtcacgcaagtcgtgcaagccacacaacgccgcgctcctcacgcgccgcatccgaatctacagccgcaccttccgcagcagacactgcacgggcttaagcaccacggtatcggcaattaccgcaaatagcagcgccgccagcaacgtagcgccaaacatcaacacgctgatacccgcatacgaccatccatctgtaggcacaggcatcctcgggccgatcagcaccttggacaggggcgaatgcaccagatagatcgtgtaggagtaccccgccagccagataatcgccttgcgcacccgcgccgacgtgatgtgcacgtcgtaccggaagaacaggaacaccgcggccactaccatcgcgaacgcaaccgtgaccgtgcggccgacctgcatctgctggccggcgaacagatatggcgtggcaacggtccaggtcagggcgaacggcgccaacgcatacaagccgcgccgcgcccgcgtggacggcggatagtattccaacacgaatcccaacagatagtagaccagcagtccccgccaggggaacgactgcaggaacgtcaacgggtatccggcaagattgcagatctgctcggcggcggccacggcggcggccagaccgatcagcagccaggcacccgaccggcctatcgcgcgcatcatcgcggccaggaacggcgtcgccagcacgaaaccggcgagcatgaacacgaaccaatagacggaatcgtcatacccggaaaacagatcgaacaacgttccagacacagcgccgccaaccgaacgatgatcgatcaccaggtaggcgacgaatcccatgccgcccgcatacagcagatacggcacaatcagcgagacgaaacgtttgtagtagtagcgcacgtacggcgcgaggctaccgggatcggcttggccggcaccgccgcctgtccgggcatcagagccagagcccggcagacggcccgctgagtgggtgctcaccggccggtcggcatcgaatgtcaggttgaaccggcccgacaccataatgaacagcggattgcagaccatgaacaacgcgaacagcacggatcgcaccgtttccgcgctgccggcgagggtcatcttgacgggcatgtagttgttgatcacgtggacgccgatgaccaggcacatcgccaccacgcgcagcagatcgtagttcacgtcgcgcggcctgccggcgacgccggaaacggtggcgtcggaaacggcgacgccggaaacggaatcgggcatggtcatcacatggatcccgtcagggacttcagatcgaccgggcagctgatctggctcttcagcttgtccaaggtgtccaggccggccgagggatcggaggacgcgcccttatgcgcgtcgttcttgccgccgttcgcaccatcggcgccgttcgcaccatcggcgccgttcgcaccatcggcgccgttcgtatcggccgggcactcatccgtcaccttaccgttggagcccgtctcgacgccatccgcattcaccaccggcgtggttaccacgttcagtggatgtgtggcatcgctgctgacccgaacggtataggcaatcgtcaattcttttccgggctcgatccactgctggttgaacataatgtactgacggtcatacaggctcacggtgttggtaccccatgaatctatatcagcctgcacagcggtgatttcgccaccgtacggggcggtaagcaccacgcggtacagcatgccaccgagcactggattctccgagccgccattaacgaaatcaggcaacgattcggccttagccttagtcagcgtgttcttcatggtgaaggtgaccgtgtattcgtcaccgagctgatcttccgtaaactgacccagctgcgtgttacgcacggctgtcgtgatgcgcttatccagcacgccagaatacagggcgttctggctggccgaggcgtcgccgcaggtttttgtgaccgtggtggaggtcttcagataccaatcctgcttgccttgctgcagctccgaaagatagatgccggtttcaggtacctgactgtcagcagacaactcgccactggccttatcatcgataagtccggtggcaatcagcgcctcctgctcatccggatcagccatccatagcttgaaatgaccgctagcgctggtatctctgattgccttcaacagcggggatgcggtggaagcattcgcgttgccaagcacatggttcataattgcttgagccgcttcggaaacgaagttgttctgctgctcgaagtccgggtaatccgtgtacaggtctgaagcgaagaacggcaccgtggtggtgccatccagcactcggccgtccgaaagcttgaccttgcctgtggctcccagcaatgcctggaggaatacgggatcgaatgacaatacacccgctacgttctcgtcttcgttgcctttctgatacagccacatgtatttgttcatctgtgccacacgctggaattcggggtcgatggtcgtggtggccgggtactggtcaaaagtgtcgccaaatacctggcgctccttcagcaccgtagcatccattggcttctcaggaatgtcccaaccagaagtggtggcgaaatcaccgatggtaatcgtgcccttatctgccgtgattgcggcgatggtgcccaccatgccgcccgccgaacgcagctcggccgggttctgcaccatcaccaaatacgtgcgcttgccgtcctcgccaagcagttgcggtagcaagttaatgaggccatcgtattcgctgagcatcgaatccacggtcttgagcgcagccttttcggattcgagcacggtggccaccttggcgacgctcggagtcggcaccttgttgagcttggtgagctgctgcgagatatccttatgcgcctgcttgacgatatccggcatatccatcagggcgctgacgtccaccgagccattcttcagggagaagccctgcaatcgtttggacaggttcagcagatcagtgaacggaccgttgaccagcgtatccacggaagccagcatttcgcgggcagcggtgatgtcgctgccaaatcgcgaatggtcgcggaagaagtcccactgcgggccgttcagctcctcgttgagatcattggtggcattgaccaactcttgggagatgtccgacagactcttatcgctgccgcagccaagtgccgaattggccagactttcggcggatgtcagcacacgctgcgcatccgtggccattctcgagacggatgccgcgtagagcgtgcccacacaggtgacgctggccagcaacgtcagcagcagtacaaccaccactcgcgcccatatcggtgtacggctgatcagcgaacggccgtcgccacccacgtgctggggagtcttcaggtttacgggacccgtctgctgatttgcagcgctattcgtagatgcggagcgattggatttcccgttaccggcatggcggcttctcctacgccccacagccttatggctcgaatgccctgaagtgaatcgcatacttatcctacccgaaaatctgctcagctcatactcttatccaacggcgcaaggccacgcttccggatgccggactccgggcgaatccggaatcgcagacatgccggagcacacgtgacgccacgcatatctcatgccagtgtaccgatgccaccgaaatagaccgagggtttatcccataccgggtgcaaatcccctcatgaccaccacatcgctgtcagaatgttctcagacttcattgaggggtataacagtattgcgcaagaaaacggtcactaaacgcaacaatagttaaagccgtattgatctgttcggcttaggagaacgggagaggtaattacatgttcgtcctcagcaacgcctggcgggccctgacacgttctaaaggacgtacggccctgaccgcattcatcaccttggcggtcaccttcggcacagtcgccggactggccatcattcaagaagataccaacgcacacaccaccgcatacgatcagcagaaggccacgttggccattcgcccgactgcggctacgtggaagaaggtctccgctacggactcggcttccaccaagcattacatgacgtggacctcatataccgaatacgccacgctcgtccagtcggccaccaactcgttgaactttacggttaccgaaaccgtgccggcccgcgtgagcggtgatttgaaggccctggacggcggatcgctgggctcgacctccgatgatgagaccggcggccagctcatttggcgagccttctggaccgaggatgccgccaaggccagcgacctcggtaccttcgaaatcgtggacggcaaggacctgagctacgacaacaagtcctccaacccgaacaccaccggcgcactggtctctgaagcgtttgcctccgccaacaacctgaaggtgggcgatacgctcaaggtggcggccgcctcggacgcccagaccacggccgagctcaaggtgcgcggcatctacaagtacacatccgaatccgccgtcgccaatccggtgacggccgcccgcaaccgcgagaacgcgatcttcaccaactatcagaccttcgccaaggccggactcgacccacagtccaacgacaagaccgcctccggctgggcggtgccggatctggacgtggtgttcgacaccggtggtcccgctacatacaagtccttggtatccaccctcaagaagtccaagctgcccgccaagggatacgaggtgtcttccccttcgctggaatcctacaacgcttctctggagccgctggatacgctatcctcgcgcgcgaagaccggcaccattgcgttggttgccgtgggcggcgtgctgttgctcatcctcgtgctgtcaggcgtgtgggcgcccaagcgtgatgacgagatcggcatggcactggtgtccggcgtcactcgtgggcgtttgggatggcagttcatgctggaagtgttcatcgtcaccctgcccttctacgtaattggtctggtcggaggcgcgttcgccgccaagccgatcggacctgctctggcatccggccataccatcccggtgacatcggacctgatttggaccatggtctggtatggcctgggttcaatcctgatcctggcgattcttgccgccctgcgccttgcgttcttcagcgcgaacaagctgttcgccgccgatggcgactggggcaccgtgagcgaggctgaggcgattgaaacggccgaaaccactggcgctgctgagaccgatgaagctgctgaggccaccgctcatgatgccggcgaggccaataagacgaccaccacaaccgacgatgcggaggcacaggcatgagcgacaggaacaacgatcaggaactcgagaagaccactgacgcaacggctgacgaagtgacttctgagactgagacgaacgacgccatcgaatccgttccagctgactccgtgcagttcagcgtgaccttcgatgacgttgatgacgaaggcactgttgacgatggtatttacagcgcactggcatctgccgaaaccggagaaaccgacgagaccagtgaggccgaagcagacgccatcgcttcggtcaacgcatccgccgaagtgaccgagcgcaatgccgcccgcgtcaacgaaacactccggctggccaaaaccgatcacaaagacgcattggccgagcatgcggagcctcagggcaaagcggccgaacccaccatgacgctggcctcacgtatcgatcgcgtgttggtgggcggcggttccgacgacattctgctcaagacctacccgacctttgccctgaacaaggtgacggtcgccggccccaagggcaaggtcaacatcctcgatggcgcgaatttcttctgctactccggacacgcatacgcgctgctgatcagcgacgaccccgattcgggtatcaccgccgacgccaaacgtcgcgcgctgatgggcgtgatgagcggtttggccacgccggtgtctggcacggtgatgaacaagagcgccaacattgttgagctcgagcccgtggaactgcgcggccaccgtctgggcatcgtaccgcagctacacgccgtgcagccgaagctcgacgccgaacaaaacgtgctgtacgccatggatgcgtccaaccgcaacttcctgaagcccaagccggtgatcgcccgcgaactgctggccaaggtcggcttctccgaggccaccagcggcgtggccgtcggcacattgcctttggtgcagcagcgtttggtggccatcgcccgtgcaatcagcaccgaggccgaagtgctgatcctcgacgagccgacacgagggctgaacgcggatgacgaggtgaccgtgttcgccgcgctggccaagctggcgcacaccggcgacccgaagcattgcgttatcgtgctcactgcgtcgcgcgagctcgctgaagcagccgacacactcttcaagatctgatctgtccggtagcaatacacaccagacacaccagcacaggctcttgaagctcacgatgttcggatacataccaaacatcgtgagctttttcgatttcgaggggctgatttgcgtgttccgggaggtctacttccgtttcaaggggctggtcatccgccaaaccccgagtataaacggcttcatgccaacgtcattccgccgtttttacgccgcgtatacttgggcaccagccccttgaaacggaagtagacctcaggaggatgccgaatcagccccttgaaacggagataggcatgtcgagatgtccgaatcagctcctgacaatcctgatgcggctcattgccgcgctaatctgaagataaatctgaccgtacgaggcgaaacctgataatcatgaccggatatattcccacactggagcagatcgacgagttgcaccgcaaaatcgcgccgtccaaggcggcgtacgagctggtgcacacgcattgcgtgattgtggcgaccatcggctgccagatcgtgcgccggcagaacgcgctgttcacgcgccgctgcacattaccgaaggacgcggaggtaccgcccaccgcaggcgtcaccggcggccatgtgccgccgcgtctgctcgacgagcatttagtactcatcggcggactgctgcatgacatcggcacctaccgcgtgttcaagcatgacggctctgacgacgaaccgctcaaattcagcaagaaacgctacattctgcacggtcttaagggctacgagtatctgctcgacgagggcgtggacgagtccatcgcccagttctgccgcaaccataccggcgtgggacttacgcgcgaggatgtggtgcgccaggagctgccattgccaccagccgactatgtgccgatgaatctcgagcaggaagtggtgatgtacgccgacaagttccatagcaagtcagtgccgccgaagttcctgcaggtcgaggcgtatacggcccgagccgagcgatttggcggagagaacaaacaacgatggctggatctggtggccaagtatggcgtgccggatattccggcgttggcggagaagtatgggatgcggatgatttgaggctcgaggggccgccccccccccagtcagtctgtcggctgacagcccccctcgtcagagggagcttatgaagctatttcagatggaacggagacggtaggtgccgttgcggttggaggcgatgatcatctggtcgttctccagcacgttccagccttcctgctcatagccggaagaggagaccaccacaccggcggagtcgccgttgtcgtcgcgcagctcacggtagcgcatcacacggtagtcggcggcctgcgcgccacggccatactcgtcgtagatttccacgatgcgcgggctggtcttctcacgaccggcggcgcacagggcgatgagctggtcctcggactgaatcatgcagttgtagctggacttcgggtaggcttggcgcagttcgcgcacggcctgggccacggcctcgtcgagcgggaagccgaagccgatgtagtccagaatcaccgcgaagaagatagcggagtcggaacggccgccggtggagaggagcacgctgtggttcaccgggtatgagcggttggtgacgatgttgcggccattggcgtccgagatatcgccgttgtggatgaagctcaggccgttcgcatagaacgggtgctggttctccatgatgagcggcagattggagcttgccaagcgcaggtgccagatggcaccgcgagacggttcgtcggccagcgtctcaaacgtgctgtcatgacgggccgcgatggtcgacttgtagattcgggtgccggtttccggggtgggtgcgccaccgtcgcgcacgtgcggcgcttcggcgggatcggaaagctgggctacaccccagccatcattgtggatttcagacagttcacggaaatcctcgacattgtcttgccccaacacggcgttgagactcaggttgaaacctgccgtcgcgtatcccagtaatctgcacatggtatttcaacttaccgaaaccgtgcggcgacgtgcggcgaccgttatagccattctttatagagcgcatcagcgccgctgcaaactggtatgttatcgcttctgtttggaggagcgctgaggcttggcggcgggtttgccgttcttggccttgcccttatcgcctttatcgccctgctcagcgaccgcagcggcggcagcggtctcagcgatcttccgctcctcggccgatacggcggcatcgagctcctgtaccaatcgcccgagcccggacgtggtgtccatcgggtcggggacggcggccgggtcggccactgcacgagtcggcgtgggcgtcgtgatggtcttggccgtatcggtgcgcttcagacgcggtgggcggcgggtggagacgaacagcggctgcacctcgaccagcgggttgtaaggtgccagaccgaaccacttaaccggcgagccggccatgcggcggattgcgtacttggcttgcaacgacagggcaccgcgtgcggaaaccttggattccggcatcagggccttgtgaatcagcacgtaacggatggtgccgatgtccggatcggcgtcgaccttggggtaaatcgacttctgcttaggcagttcgccggttttggacaggtcgtgcatgatctggtggatgtacgccgggatggactgcgaaaccttgaagcccaaacggaagcgcacgcggtagatgtagttcgtgccgaagtcctccaccgagtattcacgggtgaacggctcgtcggtggtttccacgctgactgcccaccaagcacgggcacgcttggggtggtcggcgaagatggagaagaagatgtccgtgtcgagtcgcttggtttccgagtcggaggtcaggtacacgatgttgtccgcaaaatacgggatgcggaaatcaccgtgcagcttgtcgagcgcgggtaggaagtcgttgggccgcatgtgacggcgttgcgcacgttcgagcttggtgccctcattccacgtgtacatgacgaacagaatcgcggcggtcagcaacatggtgaaccaaccaccgtgcaggaatttggccatagacgcgatgaagaacatagcctgaatcgccaagaacagcacggtgaacacgatggcaccgacccgcttgccggaatgccataagtagacgccgagcaacacggtggtggtgatcatcgtaatggtcaacgccaggccgtacgcggcggagatgtgttcggaatccttgaagatggcgagcacggcgagcgtggccacgcacaacacgccgttgaccaccggaatgtacagctggccgcgcgtacgggccgggtaacgcacctgcagatggggcatccagttgaggcgggtggcctcggaaaccatggtgaacgcacccgtgatcagggcctgggaggcgatcacgccggccgaaacagacagaatcacggccaggtaccgcacgttcggggtcatcatctggaagaacgggttgagcgacttcatcgcggtgtattgcgggttatcgctattggccaacatccacgcgccttggccgaagtagttgagcaccagcgcaaccttgatgaatggccaggtgaagtagatgttgccgcgccccacgtggcccatgtcggagtacagcgcctcggcaccggtggtcgagaggaacacggtgcccataagggcgatgccggcagcattgtgcgggctgaacaggaatttgatgccgtacaccgggttcagggccgcgaacacagaccagtcgttagagagattcgtgacgcctacgatggcgaggaagctgaaccagaccagcaccatcgagccgaatactttgccgatgctttcggtgccgcgcgactgcacggagaagagaatcacgatgatcacgacggtaatcatcagggtcaggcttgggttttcgtcgaacaacccttccaatggcggcagggtctgcaagccttcgactgcggaactgatggaaaccgccggggtaagtaccgaatccgcaaggaatgccgcgccgccgagcatggcgggaatcgcgagccatgcgccgtacttgcgaatcaacgagtacagtgcgaagatgccgccttcgccattgttgtcgatgcgcatggcgatgagcacatatttgacggtagtgatcagcgtaatcgaccagaagaccagcgacagcatgccgagcacggcctctcggtttacgctgccaagccctccctgaccggcaaggaaggtctgcgcggtgtagaggggcgaggtgccgatgtcgccgtacaccacgccgagcgccacgatcgccatgccccaggtaaccttgtctgggctggattgcaagcgggcccaccatcggccgaggccgcctttcgaccatgcgctggcgattttctcggcttccttggtttcggcttccctctgcttggcgagtgcctcgcgctcctccttggtgagagtgcggcgggacaccttgggagcgttggtaaaggtgtcggccctcagcagtgcttcttcttcctgtcgggccttggctttggcggcgccagcctgggctgtctgggcctttgaggctttttgggcgcgtgcggtcctttggttcgactcagccatacgttcagtcctccattgaggtggagatcatccccctcgcttatgtcaggtacatcatggtagacctcgttcacaattctgacaaattttacaagtcaacacatcgccgcgacggccgcacacccggccctcacagtccgtatacggcgcgggcggtatcgcgggtgccgcgcgccacatccgcgatggacaggtcgagcgtatcggccatggcccgcaaggtgtaggggatcatgtacggcgcattggtgcggccacggtacggcatgggcgtcagatacggcgcgtcggtttcgaccatcgcatggcccagacccacaatccgcagcgattcgcggataccgtcgttgcccttgtagctcacggtgccggagaagctcagataccagccgtgttcgcgcgcaatctcggccatctcacggtcgccggaatacgagtggaatacggtgcgttcgggcgcgccgtcggccagcagggtttcgatgacctcgcgatgggagtcgcggtcgtgaatctgcatgggcaggcccagttccttggccagggcaatatgcgcgcggaaagcctcgcgctgcagttccttggcaccttcgccggtgcggaagaggtccatgccggtctcgccgatagccaccacttgctcggggtatgtggtggcgaggcgatgtacttcggcgagcgcgtcctcgaaagacgtgtcatggtaaggcttgtatttgagaggcagaccatccggccccggcacaccgcgatgcccgtggagcacggactcattggggtgtattgcgagcgccgcgtgcacgttacctggatgatcgagggccatctggacggcggtcatcaggtgcggcagctcgcaaccgcagtcgatgatacccccaatgccgacagattgcgcctgcgccagcaattggtcgacgtcgtacaccgggacttcgggctgccccttctcctgcgcctcatggctcatagcgcgcgcgaaagggattacggaggccacgtgagtgtggttgtcgatggtctgggcgtcgtccggcaatgcttcaggtgccggggcccagctacggtcgcgatggtggtgcttgctcatggtttctcagtgtaggctgtttctcagtgtaggctaccgtcagcaacgctcgtaaggcagtccggtaagacgttcgactacacgacgggtatcgccaatctcggccgcctgaacttgccgtctcttgccacgagcgcaacattcccgggaaagtagcgcaaccggcaagcgagatggccaccatcctgccgccttttctgcctcatcagcccattttctacctcattttgataaaatatgatgcagaaaagttcgtatgatgcagaaaatgaggcagtatgagatcattcgactacatcgaatactgatcgaacgcgcgtgttccgcctacacgcaagcaatccgagatggacataccgatccattgcttgccatcgccatgttcattctcgatttcacctgcatacatccgttcaatgacggcaacggccgcatgagtcggctactcacgctcctgatgctgtaccgcaatggctatatggtcggcaaatacatcagtatcgaacaccttatcgagcaaagtaaaagcacttattatgaggcgctggccgcaagcacccaaggatgggacgacaacgccaatgattatgcgccattcacgaactacctgcttggcatcatactgtccgcgtgcaaggaattcgacgaacgcatcaatctcacggcaggcggcagagcgcagggagcaccgcgagtagccaccaagggaatgcggattgaagcactgcttgatcaatccctagtgccactctccaaggccgatattctcgctcgcatgcccgataccagcaccaccaccattgagcgcacgctgaaatcactgttggactccggtacgatcatcaaaatcggtgccggtcgcagcacccgctatgtgaaacgccgctaaacgcatccttgtgcgcaacatctcgtcactcttccggcgctccgctggccacgcgaatcatcgcgtactgggactcgtagaggcggtagtacgcgcccttggcggcgagcagctgcgcgtgcgagccgtgctcgacgatctggccgtgatcgatgtagaagatctcgtccgcgttctcgatcgtcgacaggcggtgcgcgatgatgaagctcgtgcgccccttgagcagatgctgcaggccggcctgcagcgcctcctcggtgcgcgtgtcgatgttgctcgtcgcctcgtccaggatcaggatacgcgggtcggcgagcagcacgcgcgcgaaggcgatgagctggcgctggccggccgacagggtcgatccgcgctcctccaccaccgtgtcgtacccgtcgggcagttccatgatgaactcgtgcgcgtgcacggccttcgccgccacctcgatttcctcgtcggtggcgtcgagcttgccgtagcggatgttctcgcgcacgttgccggagaagatgaaggtgtcctgtagcatcacgcccatctgccggcgcagcgatgcgagcgtcacgtcgcgcacgtcgtggccgtcgatcgtcaccgagccctcggacacgtcgtagaagcgcgacagcaggttgatgatcgtcgtcttgccggcgcccgtcgggccgaccagcgcgatcgtgcgccccggttcgacgtggaagtccacgaggttgaggatgttacggccgtccttctcgtagcggaacaccacgtcgttgaagtcgacgcgcccgcgaatctgcggcaggtccgccgcgtcgggcttgttgcggatctccggcgtgacgtcgagcgtctcgaagatgcgctcgaggtacgccgagcaggtgatgagctggttgtagaagttgccgatgttgatcaccggattccagaagttgttcgcgtagccgacaaacgcgatgagcacgccggtggtcacgttcacgcccccgaagcccatcacgccgacgaagtagatgaacgagatggtcatcacggagatggtctgcacgcccggccacatgaggaactggatgtgcacggcgtgcatccacgcggaacgcacctcgccctgctgctcctggaaggtcctgaactgggcctgctcctgcgcgaaggtctgcgtggtcttcacgccggcgatcgactcgtggatgtaggcgttcaggttgctctgcttgttggagagcttctggaaggcgcgccgctggaagatctgcagcacgcgcacccagatgatgagcaccgggaacaggatcaagctccacagggccagctgccagtcgatcacgaacatcacgatcagagtgatcacgaaggtgaacacgtcggagatcacgttgatcagaccggagctcagcgtgtccgaaagcgtgttcacatagttgaccacgcggatcaggatcttgccgtgcgggcgcgaatcgaagtagctgaagggcagcgtctggatatgcgtgaagatatcgcggcgcatgtccttgagcatgagctggccgacgcgcgtgatcgccaccgtgcggtagcgcagcccgaactcgtacagcacgatcagcgcggcgaggattacggcgaggatgccgagcttgccgaggtccttgttcgggatcgcctcgtcgatcatgatcttggtcaggtacggcacggcgacgacgatgcagctcatcgagatgacgacgacgagaatgcgcgccacctgtgccatatacggtttgagatatttgccgacgcgagcgatgtcgtggaggttgatggactcctccagctcctcatcctcgcggaatgtattgcgttgtgccataagtcctcttctaaaacccctgtgcggcgccggactggagtccgagctgcttgtggtagatgtcccagtagcggccgtgtgcggccacgagttcggcgtgggtgccgcgttcgacgatacgtccgtgctcgagcaccagaatcaggtcggaatccttgaccgacgagatgcggtgggcgatggcgacgatggtcttgccgccgtccatctccttgaggtgcttctggatctccgcctcggtctccatatcgacggccgaggtcgtatcgtccataatcaggatcgacggattgtccgcgagcgcgcgggccagcgacaggcgctgcttctgcccgccggacaggcccacgccgcgttcgcccacgacggtgtcataaccctgcggcatcgacctgatgaaattgtccgcgccggcgatctgggccattttctggatatatcggtcgtcgctatcatcgctggcaccaaaaccgatgttgccgccgatggtgtcggagaacaggaacgtatcctgcgccacgatgcacacctgcgagcgcaaggtggtcagcggccagtcgcgtgcgtcgatgccgtcgatgagcacatggcccacggtcgggtcgtagaagcgggagataaggctgacgagcgtggacttgcccgcgccggtttcgccgaggatgccgagcttggagccggcgggcacggtgaagtcgaggtccttgaggatcggggtctccgggtcgtccgggaaggcgaagctgacgtggtcgaagcggatgtcgcccttgatgtgcagcgggcaggacttgcgttcggcggactgctgggcaccggatgttccggaagccccgggcgctccggtagccccggtagcctcatcatcgtgcttgacttgctcgacaatcgtgaccgcctgcttgacggcttcgaccgcgtcgggcttctccacgatgcgcggctgttcggtgagcagcttacgaatcttgatgcagctggcgttgaatcgctgccagtcgttgatgagccagccggactggcgcaccgggccgtcgatcatccacaggaaggagttgaaactcaccagattgccgagggtcatgtagcccttgatgaccagaaagccgccgaggccgagcgtgatgagctgcagcgagaagccgaggccgtccagccagggcatgtacctgcgcgagttgtaggccagggccatgttgcgctgcatgtagtcgtcgttgtgctcgtcgaacttttcggtctcgtacggttcgcgcacgaatgccttgaccacacggttgccctcgatgttctcttcgaccatggagttgagggaggccagcgagttgcggatggcgaagaacagcgggtgagcgtgcgtggacaggccgcgcgtgagcacaaaaatgaacggcgtgacgcaggccaggacgagcgcgagtcgccaatcgatagcgaacatcacgcacagggcgcccacgaacatgaccacgcagtcggcgatctgatagctcacccaactcaggcagtggcggatcgcgtcggtgtcggaggtcaggcggctcatgatgtcgccggtgcgtgtgtggttgaagtacgtgaagtcgagctcgtgcagcttctcgtattcgtcggagacgaggcggtagaccgagttctggccgaaacgctccatccacatctggtagccgtatcgcgcgcccacgcggatgatggtcatgaggatcatcagtccacacagacgtggcagttcgtcggcatgtccgccgacgatgacgcggtccacgatgataccggacagaatcggaatggtcagggccatcgtgttgttggcgatgaacagtaggagcgcgcctaccacgcggggcaggtctggtttgcaatatggcagcacccatttgagattgcttgcgctggtatcgattcccggatcgacgtacatgtgaggagatcaccgtttcttggggattgtttgcttgtggtatggtgcggcatgctcctgcgccgcacgcggcaatcgctgccgccgcgattcacgatcagccgtgcttcgcactgcgcctgtcattggtcgcatgaccggagctctccttcatcggtcgaagcacgttcgactttcgcaaacgcgtattagtctagacggcctgcgtccaatcgcaacagcctgcaactctgcgtgttccccgcattagcaacgcggcacgacccaattcgcgacgcattccccggaatgtgtcgctgcgcccccaaacaggcccaattcgcgaagcagtccctggaatgtgtcgcgcgaaacgttgcgcatgcggcaatgcacgctcgagacctgttgcataccagtcgaccaaattatagaatcataattaagtaaattacgattctataatttgcgcgtgtgcaccagggcagacagcaaagcaaggagacaagggccatgttcgtcgggcgagataaggagctttcggcactggaacgccgctggagctcacagcagttcgagtgcgtcgtggtctacggccgtcgccgcgtgggcaagaccacactcatcaaccgcttcctcgaagatcgccccacgattttcttttcggcaatcgaatccagcgcttccaagaatctcgaatcgttaagccgcagcattgctctgtatgaaaagggctcagaggcgttcgagacaacgcccgtataccgcagctttgaatccgcactggaagcggtgttcgcgctggccgcaaagcaacgcatcgccttcgtcatcgacgagtacccatatctggctaaagcagaccggaccatcaattcggtcctgcagcatgccatcgaccgccataaggatgacagtcagctcatgatggtgttatgcggctcttccatgtcgttcatggagcgccaggtgcttgggtatgagagccctctatacggcagacgcaccgctcaaatcaaagtggagccattcggctatgccgatgtccgcaagttcttgccaagatacagcaacgaggacgctgctattgcttacggacttaccgacggtatcccgcagtatcttcggcaactggacgacggcatcagcatccgagacaacatccgttggaacatcctcgacccaagctgctatctgtttgaggagccagacaacttgctgaagcaggagctgcgcagtccggccgagtacaacgccgtaatccaggccattgcctccggggcatctcggtcgaacaccatcgccgccgcatgccatatggaatcgtcctcatgcgccacctatttgcgcaatctcatcgatctgggaatcgttcgcaaggagacacctttcggcgaggacgctcctcgcaagacgatctaccgtatcgaggactcgttcttccgattctggtaccgatatgtgccgaacaacatgtccctcattcaatccggtcatgccgatctcgccgccgaccgtgttatgcgcactatctccgactttatggggcaggtgttcgaagacatctgcgttcagtggatatggtcccataacggtaccgaggcattgcctttcctcatgcttgatgccggacgttggtggggcgccaatccgaccacccgcagtcaggaggaaattgacatcgtggcttcaggagaaaaaccgaaaactctcctattctgcgaatgcaaatggcgcagcgtgtcatccggtctgcagcagttggaagtgctgcgcaatcgcgccagactgctgcaccccgaaaccagccattacatgctgttctccaaatcaggcttcgacgagcatgtcgccgcccgcgcggcgcaagacggtacagtgacgcttgtcgattttgcggatatggattagtcggttcactccattgcggacggtaagggtgaagtaacagggctgggtcaatggaccgaacctctaggacgggcaacagacccaatccgcgacacattcccgggaaagtggtgcgcgttacatcacgctcaaacaacccagcatgtatatgggcaggtattcggctcgtccaacagtctccacgttgccatcatggaacacgtaggcatgggcaaaccgataattgtcggtatccagtaggttgttcatggcccgatgccgcgtatagtccttgcccgatttgatttcaaccagtgaaatatcatccagaccttgctgcactacaaaatcaacttcaccaatacggttctggttgaagtaatgcagttccaatccctgtgcaaacagttcctgagccgctgcattctcgaaaatcgacccgtaattcatactggatcggtgattcacaatctctaagtccacactgcgcatcaaacgggaggtcagcaaaccgacatcgttcatgtacagtttaaacgtgttctcgtcggcatgctccgtcagcgggtattcagggtcctgcacgcgcgaagtaggcaaggcaatacctgcgttcgccaaccaatcgaacgccgtctgcatatgagcgaacctgatattcttgcccaacttggagaacttgaatcgtttgttttccgcattgagctgacttggaatcgcctcgtaaatgctcttgatatgacgacgttccaccaaatcggagacatatttggtgatgtcgtattcataggtatcgaatatggcttgctgagtattgcggaccttgacaatatcggcaaaatccacgaatgactgcactgcgtcgggcatgccaccaatcagcagatacttgtaccacaggtcggtgagccgttcatgtagataatcgggaacctcccgtcgatccacataacattcacgcagcgtatcgaaagcggactgaggcagccggcatgcagcgcagaactcatagaaattgagcggatacatacgcatcgtctgcaggaatcccaccgggatcgagcgcacattgaacacgtcaatgcccagcagggagccagaaacaatgacatccaatcctttggtgccagacaggaatttggtccacgtgagcatgtcctcacacgcttgtatctcgtcaagaaacagcagagtcttgcccggcgtaatttccgtgccggaaagtaccgataaccgcagtatcaggtcttcggcgtccttggccttgcttaccgtttcgaccgcctgaggcatttcgatgaaattcacctcagccacatgctcataatggtctgcaccgaactgctcaatcagcgtggtcttgcccacctgccgggcacccgtgaccaacaagccctgcttggttttacggttcttccaattcagcaactggtcgtatgcatggcgcttgagcatattcccctcctcttttgtggagaatgactgaaaacacgcaggttatcacataatcacatatcgatatcatcttagcattcacgtttttacatatgcaaaacgcactttgagtcacaaaaaacataagaatagtgagtggttcattcacgttttacgtattgtgcgccgggtcctgttcgagcagcacgcgcggtccgcatgacggcgccaccaccaccgatttccgcaccttctccgacccggtcaagtggattgaccgcaagaacagcgtcatcgattcgaccatgctgcgagacgatgacggctggtggtaccgcgcttccaaggacgccgaaatcaccatcgaacgcacgcgcaatccgtacacctccgcctacgaggtgccgcgtaccgacgacgaccagcagtggtcgtacgtggggtcgctgactgacattctcggcaatgaccgttactcctggatgtacctggaaggaccggaattgttccgctacaacgatgccgatgtcaagaccattaacggccgcaagatgcgcttcggtctgatgtgcgatcagtacgccgaggccgccttcaagctgtaagacttaaggcttcaccactacaggccggtcgcggaccatatcccaagtcagcaaccggccgaaccatatctcgcggcttcagtcatccttcatcatcagtattcggtagcggccctaaatcagctccgccatccggctcataatcactcgccaaccacgggcggaagtagctcccgactatccacagtgggacattggtcagccaatcctgctccttgtaattccgcatcgacgtacggtaaccgcaaatcccgtatttgtcgcacagccacttcaagctacgcttatgacgctcggtaccagcttcggcctccaacggaatgattgcgccattacctgcaaagacaaaatcaacttctcccgtactgttcgcattcgaccagtacatcggtgtgatgccggcggccactaattgctggcaaacatactgttccgttaacgcaccacggaattcggtcagcccgtcatcaccaaggaccacgcttgcgggagtcagatccagggccgctgccagcagcccaacatcatggagatacagtttgaacgcggaatcatcacggtatgacggcaatggtgccgcaggtttttcgacgcgatacacccgcaacgcaagaccagaatcgacaatctgctgaatcgcggattcatattgcgccgcccgagcgccacgagcgatgtggccaaaaataaatttatgattctcacgcgccagatgggacggaatcgaggaaaacaccaaacgcattttctcactatccacaccggttctgggatgtttggaaaagtccatgtcgtaattggataacaattctttctgcacggcacgcgcatgctgatagccatcttctacaaatgtctcaacgacttcgggcatgccgccaacaaaacagtactgacgaacccttcgctctaaacgttccgcaaatcccccaagtgtctcaatacgctggttccggatgcgttcggctatcactccatcaccgaccgcttccaagaactccacaaacgtcatcggatacatatcgatggaggtgacactgccaaccgggaatgacaggtcttcgtgctgagccatgcccagataggagcccgctacagcgacatggagatccggcatttcctcatggagcgctttcaacagagtcagtaaatcagggatttcctgtatctcgtcgatgcacagcagcgtcttgccgggccgaacgcgaaccccattaaacgcctccatggaatcaagcaacatgtgcaccgaagccacacctgtcaacgcagcctttgcaccgccatcgaacaagttgacataagaaaatgactcgaacttgtcccgacctagcaccttaagcacatgagtcttgcctacctgtctcgcgccgcacagcactatcggcttgtgctccgtcgcttcagcccatgccgacaacctggtatatatatctcgcctgaactccgccatgccgccctccctatcgcataggaccgtacatcacaaatcactgtcctgtcgctccatcataccgcaatacacacttttcctagggttgcaattcgcgtattctacatttttcctagggttgcgattgtccaaaattacatttttcctagggttaataatgcagaatactgcacttttcccagggttagtaccctgaccttccctaatcacacggtgttgtaaaggcgtcgcggtattggccgggggtgagtccggtgcggcgcttgaagacgcgcataatagaatatctcaagcatcgatgaatacggagatgatcacaatggctgattacatcggaacagtcaacaaccaatcttcaacacagcccaacggtcacagttcacatagcaacaccaccgagtcgctatggcgcggcacggattatggcaaatggttcgtagcggattcatgcacgtcgctgtcatcaagtatccaaggtttcgcaatgccactcatcgcgcagaccgtcacgggctcaccggcacaggcgacgctgctggattcaatcatgaccatgatatcgtcggtattgcggttgccaggtggcgtggtacaagataagtacgaccgcaaaaaacttatgattgcgttcggcctgattggtttcgcactgttcggcatatgcgcggccctaggatgggcgggattactcatatacccggtgctgatggtacttgcgatatgcctcggcatacgctcaggcctcctaggaaccacgagcaacacgatgctacgaggcatcgttcccgatcaattgctgcccaaggcgtcaagcctcaatgatggccgcgatgccgccctcgaactcgccggcgcaccagtaggtggcgtattgatcggcggcggtctatggctgccattcgcagtcagcgcgctgctgaatctattggaaaccgcggcggcgatgcggatcacaaaatactggcatcgtggcgggcggaccaatgcggagggccgcgcccttgccgacgatgaggccgatgagaatggcgatgcggccaacatcactcaggccgctgacgagcaggcaacgaccacgacatcatccgcgtcacagtattggcgtgagatgttttccggattccgctggcttcttagcgagcgattcgaacgtcgcctgattttgtcgagcgcgctggcgttcgcgtgcttcaactcgttcctgctgattacggtgctctcgatcggctccgacccatcacatgtggtgtcagccagtttcatgaacgtttctgtgtctgtgggcgtcatcgttggctcgctcatctcttccgtgctggttcagcatgtgcgcggcggcatagtcgccgtatcgttctacgtgctgatgagcatcggcgcgctcggcgcagcgctggctccgtggattcttgcgcgtatggcgtttctggcaatttcgctgctggccctaccggccggcaatgcggtaatcaacggattccaatcattgctcatcaacaaggagcatatgggccgcgtattcgccggcatgggcatgattgagacgattgctgccccggtgatcacatttctgtccggcatcgccatgcaacactggggttactcagtcacgtccgtggctttgggcttgtgcatcgtggcggccgcgatccctgccgtgacaatgagggaactggtcacactgcctaagccggatggctgggaggaccatatccgcaaatccgggctcaccaagttctgacaacaagtaagggcgactatctcccggatttgtgacgctcggcaaccgtcagcgtcacaaatccgggaagaggaaggtggatacggtttcagccgcgcgggcagcaaggtggacaaatcgttgccggggtggaatcgcggcaagtatgcaaaagcctcccattcgcgcgcgacgcataagcgcgcaaacgggaggcttcccaaccgcagcatcatatgcagaaataaggagagtaaggcatatgctgccgcggtcacaccccgccgggaacctgtcgcaggccgcgtccggcatcgaaagccatgcagtcgatgcgtgcggccggccgttcccggcgcggtggccatgtcagacgtcagtcagacgtcatcacttctgccagccgatgtcctgcggcaggttgccggcgaagccggacgggccgtagttggccagacccttcttcgcaccgaggtacgaagccgggttggagaccgggatggtgccatacagcttgagggcttccttctcggcggcgttcacagccttggtctgctcgtcatagtcggagaggctgccagccttcttgacgagctcgtcgatcttcttgctgcccacgtaggagaagttggacgggccgtcggaggtgtacagctgcggggcggacaccacgaaggtgttggcgctcggagcctgccaagccatcggcagcacctggtagttgccggaagacacggtgtcagagaacttggactcggccacgttcacgaccttgaccttgatgccggccttcttcatcatcgcctggtaggcgttggcgagggcctgctgggtggcgttgtcaccgaagaaagtgaaggagatctcaagggtcttgccgcccttggcgtagtagccgtccttgcccatcttgtagccgtcggcctcaagggttttcttggcgttgtccacgttgtacttggcctcggcgggcaggttgttctcgtagcccttctggaacggcagcagcagctcggagcccggctgctcggccttccagttcaggccctggaactgcacgttgttgtaggtgttcacgtcgaaggcctgagtgatggccttacgcacctgcaggtcgtcaagcggcttggacttgccgttgtactccagcacgcgggtcttggtgctgtagccgatgcgcagctgggcgtccttgacggaacggatggccttgatgtcgtccttggtggaggcctccacggcgtcgatctcgccgttctggaaggcgttgagggaggcggtggcggccatctgcttgtagacgatcttgtccagcttcggcttgttgccccaccacttctcattcggcacgaaggtgacctgggagtcggagaaggagtcgaccttgtacggaccggcggcccactcgttgtgcgggttcttcacccagccctgggtgaaggtcttcgcgtcggcggccttcgggttcaccagagcgccgaagacttcctgccacgggtagtacggggtcttgtaggtcaccttgacctgcttcgggctgtcgccctgctcaacgctggcgatacggtcgaagccgtcggtgctcggcgggttgtagtccgggttggagccgttgttggcttcccacgtagccttgaaggcggtccagtcgatgtcggagccgtcgttccacttggccttcgggttgatgtcgtactgcacgaccatcgggtccttgctcacgagcttcatgtcggtcaggaagtccgggttcaccttaatcggggagccattgacctggtcggtcatgagcaggctgggctggtaccagctccacagctcggacatgtagccggtgttgccgtcggaagacaggtagttccagttcgggccgatttcgacgatggacagggtcagcgtgccgccgtccttgacgttgtcacggctctggtggttgtcgtaacgctcggtgaccttcggcatgggcaggtcgccggtgtacgacgaatcgatgccggccggcggttcggtggcgctcgaggcattgctggaaccgttgccattgcccgcgccgcagccggcaagcagcatggcaagcgccgcagtggccgcggcgagcgcggtcagcttacgtgtcttgttcattgttatttcctcctctatatggttccgaccgtcatgcgaaatggcatgcaacctgatggccgctcggtcgggaagtgtcatacggccgcagcgccgggcgttcgccgcggcagcgggcctgttgttcggcgctcagcttgggcatgagcgggcagcggcccatgaacgggcagccttcgaacgtctcggtggggctgggcacctcgccctgcagcacgatgcgctggcgggtgcgttccgccttcgggtccggcaccggcacggcgctgatgagcgcctgggtgtacgggtgcaacgggtgctcgaacacgtcttcggtgtcgccggattccacgatgcggcccaggtacatcaccgccacgcggctggagatatggcgcaccaccgacaggttatgggccacgaacaggtaggccacgcccagcttgttctgcaggtcctcaagcaggttgatcacgccggcctggatggacacgtccagtgcggagaccggctcgtcgagcagcacgagcttcgggttgaccgacagcgcacgcgcgatggcgatgcgctggcgctgaccgccggagaactgcgtggggaagcggtccacctggtcggggttcagctccaccagacgcatgagttcaccgatgcgttcgcggatctgctctttggagtagtgctggaccttcatcggctcggccaggatgtcgtagatcggcaggcgcgggtcgagcgaactcatcgggtcctggaagacgtactgcacggacgaacgcagctcgcggcgcttctcgcgcgaaatcttgtgttcgagcttggtgccgaacatctcgatctcgccgtcctgcggctgcttgaactccatgatctccatgagcgtggtggacttgcccgagccggactcgcccacgagcgccacggtctcgccttcgcgcacgtccagcgtcacgtcgtccacggccttgacctcgccgatcttacggcgcaggaatccgccggcggtcagcgggaaggtcttgcgcatgtgcttgacgtcgagcaccatcttgcgttcgtcgcgcgggatgccggcgaacttcgacttggcggcctcggccaccgtgtacacgtcgtggaaggtcaggcccttgctcacgatctcctgggtgcggtggcaggccacgaactggcccgggcggcccggcaccggctccatggccggctcggtggtgtggcatatgtcggtggccagcgggcagcgcggcgcgaacgggcagcccttgggcatgttgaccaggttcatcggggagccaggaatcggcaccaggcggctgttgcgttcgcggtcggaacgcggcacggcacccagcaggcccatggtgtacggcatggccgggtggtcgaagatggagtcaacgtccgccttctcgaccgggcgaccggcgtacatgacgacgatgtcgtcggccacgccggcgatcacgcccagatcgtgggtgatgaagatgacggccgcgccggtttcacgctgggccttgcgcagcacttcgagcacctgggcctggatcgtcacgtccagtgcggtggtcggttcgtcggcgatgatcacgtccgggtcgttggcaatggccatggcgatcatcacgcgctggcgcatgccgccggagaactcgtgcgggaaggacttcaggcggtcctccgggtccgggatgccgaccaggttcatgagctcgatggagcggtcgtgaatctgctgttcggtcatcttcggattgtgggtgaccagcgcttccttgatctggtcgccgatggagaacaccggggtcagagcggagagcgggtcctggaagaccatggcgatgcccttgccacggatctcgctcatctcaagatcggacttgctgagcaattcctcgccgtggtaggtgatggagcccttgacgctggcgttcttgtccagcaggcccatgatggccatggaggtcacggacttgccggagccggactcgcccacgatgccgagggtcttgccggggtacaggtcgaagttcatgccgcgcaccgcgtgcacggtgccggcttcggaggcgaagctgacggtgaggtcgcgtactgaaatcaccggttcggatgccatgccttgcgctcctgtggtgttggggttggtgttggttgttacgttgcttgcgttgcgttcgtcgctcatgatgcccgtctcccctctcactcggccttgccgccggaacgggagtacgggtcgatggcgtcacgcagtccgtcgccgatcagctgcacggagaaggtcaggacgaccagcaccacggacgggaagatcagcacccatggcgaggtctgcaccacggactggccggcgttgagcagcgtaccgagcgaggtgtcgggcgccttgatgcccaggcccaggaagctcagcgaggtttcgctgttgaccgcaccgatcacgccgagcacggtgttgatgaccagcaccgaacccaagttcggcaccagatgacgcacgatgatggtgaaggacggcacacccatgaacttcgccgcgcggatgtattcgcgatcgcgcaggctcagggtcagcgtgcgcagcgtacgggcgtagccgatccaaccgaatgcggtcaggccgatggccagccacagccagtcgctgccgccggccgccatgccgacgatcagggcgatgagcaggaaggacggcacgacgagcagcatatccagcagccacatgcccacgcgctcgaaccagccttcgaagaacgccacggccgtgcccaccagggcggcgatgatcgtggtgccgaacgagctgaagataccgatggtcaacgaacggccgaggccgcggatgatcatcgcgtacatatccgagccaccgaccgtggtgcccagccagtgctgggcggacggcggcgaggcgagggcggcgaaatcgggctcatcgtagctccactgggagaatttcgagccgaaaatcgccaaaagaatcagcagaatcagcaccaccagacccaccacggccgaggggcggcgcatgaagcggcgcacgtacagctgcatgcggccggtgcggtggaagtcgtcggcgctggaagcctcctgggcgttcctggcgtcggcggactgcggttcgctgccctgcggatcggtgagttccatatcctgggcggcggcgtcggagaccatgttctcgttgtcgttcatcatgttagatcgtcctttgcgcggggctcagctcagtcggatacgcgggtcaagccaggcggagaagatatccgccagcagcgcgccggacagcgtgcacacgccaccgaacgcggccacggccacggcaccgttgatgtcgttgttggcgatggtctgggtgaagtacatgcccaggccgttgatggcgaacacgttttcggtgatcacggcgccggtgaacacgccggcgatggagaaggccacatccacggcggtcggaatcagcgaggtgcgcagtgcgtggcgtcgaatggccgcgttgagcgtcaggcccttggcgcgggcggtgcgtacgtagtcggcgttcatggtgtcgagcaggtacgtacgctgggtgaggtggtagcccaccatgcccggaatcgtcatcacgatggtgggcaggatc

SEQ ID NO: 444 - DNA, 7500 bp, Unknown
  R48_24m  MAG No. k141_19858
gacccggccggcctggtgcgctacctgttcggcaagggacggcgcaatgaacacaccgaccagcatctcgtgtgcgcgggcggcgacatgtttccctcgtttgacatggatggcaggccagcggcgtcgtatgcagggataggccgcaggttcgaccgacgctaccgcgtcagggaacgcaaggacgatccgttcccgcccgacatgcgaggcaagaacaaccccgaacgagagcatggcaggaagcgcgtgtggcactgctcgctcgccatcaaggccggccagggcatactgaccgatcaggaatgggaggccgtcatccgcgattatctgacgcgcatgaacatcatcgacggcgataaggatcagggcgtcacatggctcgcggtccgtcacggactgtccgccaacggcaatgaccacgtgcgccaaggcgtcgcgcagcgaggacgagttcatacgccgcgtgcgcagggaaggcttctccatcgaccccaggctgcgcaagggaaccgccaaagactcgttcaccgaccccggccaggtggtcggctaccggatcacgtggcatagcacggatgggtggatggaacggttcaacgccttcgaactcggcgacgacatgcgattgaaacgactgcgcgacgactgggcggacgatgccagaagccgcagcctcgccgtccaggaatggcgcgccgcgatggagaaccgcccgcccttcctcgatgacggacgcgaaagacacccggagaatctatccacgcacgacatggaacgcctcgtatccgaagcgttcgccatcgccgccaacctcaacagcgcggcggacgacgacgaataccgggcagcgatgcgcgagggcctgcacacgttcgacatgctgcgcgaacgctacgggcttacgtaggacggcctgtggataacggccacggacatgaacgaaagccctataccagcgcacgtaggaaaaatttgacagcagcctcgaatccctacctccatcgcatgtcggtgcaaactcagaaggaatgtcctcccgagagtacacatccgctctcattcattgaggtatcgcgcgtaacgagttttcattgtaaatgccacggtatggtgacggattttggaggacgataatgacaatacaatatacagcgcagccggctgatccggcgtcgagtgcggtgctgacgcgcgggctggtgaagcggtatggggattttctcgcggtgaacgggttgaatctgaacgtgccggcgcatggcgtgtatggtttgctggggccgaatggtgcgggcaagtccacgacgatgaagctgttgcttgggttggcctcggccacgagcggcgatatgtggatgttgggagagaaggtgggtggccggcacaggttgcaggcgggccgggtcggttcgatgatcgaggggccgagcttctacccggggttgagcggtctagataattgccgtatggtggccgattacctgaatctgccgggttcggccgcgcccgcgattttgcggcaggtcggtctggccggccatgagggcaagaaggcgagggactactcgctggggatgaagcagcggctgggcatcgcgatggcgttgatctcgcagccggagctcctgttgctggacgagccgacgaacgggctggacgcggaggccgtggtcgaggtgcgcgagatgatcatgggtctgagccgcgaacagggcatcacggtgatcatcagctcgcatatcctttccgagatcgagaagatggcgccggtcgtgggcgtcatcgcgtccggccgcctgttgtatcagggttcgctcgacagtctgcgcgaggaggggcacatcgatttgcgtgtctccgacccgaagctcgcggcggcgatgctgggctcggaccggatcgactaccggtggctgccgggcagggatggcggcgtgctgcgcctgccggaactgccggaccagcggatcggcaccctgatcacgcagctcgtcggccagggcgtcgcggtctatcgcgtcgcctccgagcgcaagacgctggagcaggcgttcctcgaactgatcgaaagcccgcagagccgcgagcccacgcctcatcaggcgcaaaatgccatggattccgacgacgcacgcgcatccgcgcacgaatccccgcgtcgtccgttgccgatccggcaggctgcgggtcgggcggcgttcgcggcggcggacggaggcgcacgatgagcggcgcggcagtgttcgcggcgacgggccgccgtccgccgcgcccccgcgcgaagaccggcagcccgttcacgctggcgcgtctggagttgttgaaggtgcggggctcgtcgttctggtggatgctgctgggcatgatgctgctggtttcggcgtgggcgggcatggcgttcatgaaacgcgccggcagtcccgtcccggcgttgaggtcggccgcgttggccgatggcgaggtctatcaggtcgtgagcctgctggccccgattctggcggccctgttgaccagccgcatcgccgtgctggagacctcggagcgcatgaacctcacatggctgtcgttcggccagtcggacgcggcccggttcgtgggcaagctcatcgtcgccggcaccggcgtggggctttgcttcctgatcccgttgctgtgggtgccgatcgcggcgaaggcccttggcttcacggtggccggctcgttcgccgcgctggtgtgggtgccggccctgaccggcttcctgtccgcgacggccacgagcgcggtccagctgatgttctcgatgatgatcgacaagcaggccatcggcctgggtctgggcgtcatcgccggcgtgctgggctccggcctgggtgcgatgaacagacccgcgcttggctggctgttcccggccggcctgagttcggccgcgagcccgttcgtcagatccgtggatgcgggcggcaacgccacgatgctgctcgccgcgcgcccgtggatggccgtggcctccgcggccatggcgttcctcggctggacgctggtcagcatggtcgtggtcaaggtgaaggagtcaagacgatgacacacgcaaacgcagtgaacccggcaaccaatccggcaatcaacccggccgccaatccagctgccggcccgagccatgccgcgatgccccgcgcgcatgcggcgggacgccgcaggccgtccgtgtgggcggcgttccgctgggagacgcgcaaggccggcaacctgtggtactggatcgtgaccgtcttgttcgacgcgatcggcatgttcaacgggtggagccagtacaccggctaccaggcggagttcgccaggcagggcgtgacctgggccgcgatctggggtcaggcgatcctcctgccgagcatggtgttcatgccggtgcttgtggccgcgttcgccgcgcaggtcgaagccaacgagcatcgaggccgcaactggcagcggctgaacgccgccggcaccgtgaacgcggcgatcgccggcaagatgctgcacgggctcgcggcttcggcgctgaccgtcctcgtgttcgaggcagagttcatcctcgtcggacgcttcgccgccggattcgacctcgcgcagctcggcccgttcctgctgcgcggtatcccgctgaccctgtcggtatgggcgatcatgacgctcacgcaggccgtgagcgcgaaggccgaatcgttcgcgggcacgatgagcgtgatgatggtcctgaccatcggcggatgcgcgctgagcctggccgccccgaccatcgccgggccgtatccgctcgccctgatcaccagcgcctccgccgcccgcgacctcgcgaacatcgccagcccggcatccatgctcgcctccacgaccgccgccgccatctggaccgccatcagcgccctgatcttccaccggctcgccaaacaagccgtctgagcaaccgtccacgggctcccctcacctgcgggagcccgccacccaacaccatggaaaggcttcatcatgcacaccaccagccaacacaacgaacgacacgacgaacaacacaacgcgccacacaacagcgaacagtccatacgcctgccgcgccgcgtcatcgccgtgctgatcgccgccctcgccgcgatcatcctcaccggctgctcgaccggcatcggcgtggccggagacaggaacctccaaggcatacgcacccaagacggcgactcctacacgggcggctacaaggccgactacagcaagttcaccggcgaggaggccgtattcggcggcaccggcaagaaggccagcatccacctgaacggcaccatcacaggcacatccggcaccggcagaatcctcgtgaccaacggcagcgacacgaaacgacccgtgcccgccacgaacggcaaaatcgaccagacctacaacgtcacaggcaccagcttctacatctacgtcaccggcgaccaattcaccggcaccgtgaacctcacatccaaggagcaatgaccatggcaaacacatcccaatacccaaaccagcaaccggcatatacgccggcaccgccggacggcgggcggacatggggcggctgcgccagcctcgcattggccgtccttccccttctgtgcacgctcgtgccccagctgctcggcatccacctctacacgacgggctgggtcaggaacatcctcgtcatcatcgacttcgtatgcctcatcgcttcgctcgtcatcgcgatcgtcacctatcccgaacaggcgggaggacacagaatcgtcagtacaatcgcgatactcctatccgcaggcctgactgccgccggcggcatgctcatcttcctcatgttcatcaaccagtaggaatccgactgacaacggaaaacttctttggaagttcatctaaccgcatacacgccatacagcacaggccacatgcgatacgcttcaacacggatggggcagcacccagggaaggagaatcgcatgaccgcaaaaaccggaaacgacaagcgccacgcggttaccggcctgatcggccacgtggccgcgttctggcggtccagcccggtcgcgcgcatggtcgcgccgatactgtgcctatgctacgacgtgatgatgctcaccagaatcgtattcacccatggcgggggcgattcggcagccatgaaactgttggagcatcaatggggaatccctgtactcgccatcctatgtgccttatctgttgtggcgctgttgttccgtatcagaatgccgttcgctattttgtgtgccatatgcggattgtatctatgcgcttgcttgattcaagcggagccatatctgatgttgcctctcttgtttgccgtctacacgtctacagccttggccgcgaccgctgaacgtgccattgcgggaatggttttgtcgggattgtcaatcgtttgcggcctctggattgcgaccttccccgccttgcagactgatatacttctgcccgagtccctccttgcgtcgatgaccgctattttagctctttggtcgcgcaacatcagtcagcggcggaagggagcggccttggtggaagctcaacagcaacgaagcctggaattggaacaggaacgcgatgaagaacgtcggcgggcggacgtcgcagccgaactgcatgacagcgtgggccataatctcaccgctatcattgcacttactgaaggcttggagggattgacacaggagccggtggaaggcgctataaagagtatcaataacttagctcggcaaagtctaggtgatacacgcgaggcggtacggaaactttcatctccggtgacgttacggaaaacaaaaacaggaacggtggaactgtgcagctggaatgatataaacccgattcttcaacatgctcgtgatattggaatcgccgccattctgaccgagacaggaaggcgtccagacgatctagcccaagctgatttatgcttccgagtgagtcgtgaggctgtcacaaacacaatgcgccatgggaaagatataacgcgaattgtggtttcatgggatcatctggataatggggaactccatataacagtgcgtgatgatggtaagccaacgctgaacaaagataaccgcgctaaggggaccggtttcgggcttgctggcctagtgactgaagttacgcgggtcggcgggcaccttcactatggctcatcatcagggcaggggtggactgtttcagccattattccacagcaaaaacgtccatatattcctgtgcaggagggaaacgatgattaacgtaatgatcgtggacgatcagcagccgaccagaatgggtttttcgctcatggtcatgaaagatcctgcgcttcgcatgacgttgcaggcggggaatggacaggatgcccttgatattcttgcggcactgcaattacatgggcagagcctccctgacgtcattcttatggatgttcgcatgcctgttatggatgggctcgatgccacggcaagaatcaaacagttatatccttcaatacgtatcctgattttaaccacatacgatcaggatagctatgcgtttgggggattgagcgccggagcttcgggattcttgcttaaggacgttaagactaaggacctgtgtcgggccattcactcggtgtacgatggagacgccatactcacaccacggattacaaaggaagtgattcgccgaggggttcccaacgtcagcatcaatgctgatactctggccatcagaagtaaattcgattcattgggacctcgcgaattcgaagtctcagcactggtcagcgaaggaatgactaacgctgaaattgctcagcgtctcggaatgcaactggaggcagtcaaaaaggcggttagtaggtctcttgccaagctcgatgtcaaagaacgtgttggtatcgcggtgctctggtataaggccggaatgccgaatctgcagaagtgacagattccgtagaataatgtagggtttctgaatcgtgaagggctcgtagcgggcgaacccgtgacggtccatgactgtcctcgtttgaatggcgatcggcgcgcatcgtggtaccgccgaccggtattttctcacgtgaatatagtgccgcttgtctcacctgacagatgcggcctagcattcaatgtctctgattagcgcggtcaatgttgcccagagcctcgatacaagtattgaaaaactacttgatgacagtgccatgaagatggagatcgaacgccaagcggtcgcactgcgcgttcaactggatcaaataaatcagatgacgggaaacaagaatgccaccggcgacacgccggtggcttcaggtgagctcctgcggctgggcttgaaccagcgaccgtccgattaacagtcggatgctctgccaactgagctacgcaggaataagttgttttgtgcttaagatttctctcgcgcacaagtcacacatcttacatgcttgccacgaaaaagcaaattacatgcgtgtagggcatgtcgcgccgaattccgcagaatcggactcatcgaata

SEQ ID NO: 445 - DNA, 5587 bp, Unknown
  R48_24m  MAG No. k141_19982
attggctggggtgcctggactcgaaccaagaatggctgaaccagaatcagctgtgttgccaattacaccacaccccaatttggcttggcgtagcaactccgaagagttgttcgtcgtacccccaaccggatttgaaccggtgttggcgccgtgagagggcgtagtcctagaccgctagacgatgggggcatattcagtttttcaaccggctgcgaggcgaaccgcgcaacaggtagatatattacgcactaccctgctctcacgcaaatcccggcgtgtcgcgccattttccgccgttctgcgggaacaccccatgcaacgcgaaagcgggcatccgtatgtacggatgcccgccatgcgtcacgctcccatcatccgccggcgtgcggtggacgacgcatcacagatgcgcccgcaggcccttgagacgggcgacggtgatcggcttgccgacgatctccatggactcgaacagcggcggggagacgcggcggccggacatggccacacgcaccgggccgaaggcgaggcgcggcttgtagccgccgtcttcaaccagggccttgttcagggtctcatgcaggttgtcggtcttccagtcagcttcatccacagcctcaagtgcggcgatggcggcggtcagcacctcgccggcggaatccttgagctgcttcttggcgtcgtccgcgggctccagatactcctcggtggacagcagggagccgaccatgccggcgacctcgcccagcaggcgcacgcgcggctggaccagcggggcggcggcggtcagcacctcacgctcacggtcggtcagggcatcccagttgtcggcggaaaccacaccatcgcggtgcaggtacggcaccgagcggcgcaggaagtcctcgggctcgagcatacggatgtgctcggcgttgatggagatggccttgtcgatgtcgaagcgggccgggttggccttgacgtcgcgcacgtcgaacttctcgatcatctcgtccatggagaacacgtcgcggtccggtgcaatggaccagccgagcagggccaggtagttgagcaggccctcgcggatgaagccgttgtcgcggtggttgaacaggttggactccgggtcgcgcttggagagcttcttgttgccctggcccatcacgtacggcatgtggccgaacagcggcatctccttggcgatgccgagttccataaggtaacggtaaagcacgatctggcgcggggtggagctcaggaggtcctcgccacgcagcacgacgttgacttccatcatcgcgtcgtcgaccgggttggtcagcgtgtacagcgggtcgccgttcgggcgcacgatcacgtagtccggcacggagccggccttgaactcgatggcgccacgaatcagatcgtcgaaggcgatgtcttcatcaggcatgcgcaaacgcagtgcgggcttgcggccctcggcgcggaaggcggccttctgttcatcggtcaggttgcggtcgtagccatcgtagccgaactcggccggacggccggcggcaaggttgcgctccttgatttcctcgggagtggagaaggactcgtaggcgtagccggcttcgagcagcttggcggcaacatccttgtagatggcggtacgctcggactggcggtacgggccgtgagggccacccacatcgatgccctcgtcccagtcgatacccagccaacgcagggattcgaggatctggttgtagctttcttcggagtcgcgcacggcgtcggtgtcttcgatacggaagatcagcgtaccgccggtggcgcgagcttccgcccagttgaacagggcggtacgaatcatgccgacatgcggggtgccggtcggcgacgggcagaagcgaacacgaacgttcttgggcagttcgggtttggtgttttcagcatcagtcataatcccctattgtgccgcgcgcgccggacgcggagagcagcgctcctcgctcttttgcttcgttattgacatttcgggccaacaccatcccaaaacggccattttccaacgaaatctcttttgcctgtctttggtagtgcccgatatcttgatgcctgtcttcacacctgttttgacacctactttggcgccatccacacgcccgcacgcaaggcttcgacaccatttggcgcaattgttgagttttttacccaaacgatggaagaataggagtcgacgcaatcgtcttatgaaaggggaatcaatgaccgatcccaacaacgtgccgttgccgcagatgcccgcgcccaacggtaccccggcccagcaggatcccagcacgccgcaatacggcgcacctgctccagcccccgcacagccagattatgggcaattcaacgctccggcccccgcacagccggcctacggccagcccgcatacgggcagcccgctcccgattcttccgcacccggcgcagcgcccggtgcaactcccgcctatggtcagcccgccgccgacccgtacgcggcgaatgcggctccgcaattccccgctcccggcgcggctcctacctacggccagcccggaccggacgccaacgcttacggtcaggtgccacccgcatacaaccagtacgccgctcccactgccacagcagccgtgccgttgaacaagccgtattacgactgccccttccctgaggcattcctccgtttctggaagaagtatgtggtcttcaagggacgtgcctcccgcagcgagttctggtggtggacgttggcctctgtcggcatcagcgtcctgctgagcctcctcagcagtgccacggacgacaagctcgggttcctttccagcatttggagtctggccatcctgattcccagtctggcgctcgccgttcgccgtctgcatgacacggacaagcccggctggtgggtcgccatcttctatggcgcgatggccctcggcatgatcatcatggttgccggcggtggcgcagcactgtatggcgccttcggcagccttagcaactccagctatggagccatggcaaccggcggcctcggtgccatggccattggcggactgattacgctcgctggttcaatcgtctacatcgtgttcatggctatgcccagcaagccggaaggcgcacgtttcgacgatgacgcagtagctgccccgatgcctcagggcgcttacggcgcaccgtacggcgctcccgcaaccccggacttcaaccaggccgctccgggcaccgctccgaacgcacccgctcctgacttcaaccagccagccccagcctatggtcagccgaccgcaccggctcctgactacggccagcccgctgtgcctacgcccgattacggtcaggtaccggttccgcagtacggccagccggagaccccggccccgcagtacggccagcccgacgctcaggccccacagtacggccaggttccgccgattcccgaaaacgttgatgatgggtccaccgtgctgtctccgcacacggctcccaccgatgacaacgcacagaaaccctggcaaggccagtgactgacgccggcgaagttcgcttaagaagttcgcctcatcactcatgaagcccaacaatgaggccccactcatcaagcggcggtagtattccccgccgttcagtaagccaatgccctgtgtactggatcattccagcacacagggcattgtgcgttattgcggcccctctcttcgcgcaacattccccggaatgcgttacggtggaggatggacgctgcgccgagctactcctacaagctgcctacggagagcgtttgggagatcacatgggattctcccgggcccagcgtcacgatgcggtcgcggcataccgccgcttcaaccgccacgaaaccgcgccattcgcccggcttggtgtagctcatattgtcgccgtccgctcccggattccacaccacggtttgcggcgacccggtacggctgatatgaatcgcacgccccaacatgtcatcgcgcagttccagacgcgcatccgagtaatacacacgattcaccggctgctcgccaaacgtcaccacttgcgcgtcctgtgttttcggcggaaacccttcttcggtggcatccagatacgtcgctccctgcaatccgaccagctgagcaccggacacatcgccgacatgcagataggaatgcaacgcggcctcgtacgacataggcgccgcgccggtgttgatcacggtcaggctcatggtcagcgcattgcccgtttgcacgtcatacacggcatgaaactgagcacccggctcgtcatcgaaccaaggcacttcattgtcgttcagctgctgcgaatccaacacataccgtatgtggctgtcgtcgaatgaaccctcgtccaacgcccaccgacgcagacgtgcaaaaccgtgggatggattgagtgccagctgcttgccatgcgcaaaacccgggccgaaccacgggaagcagatcggcactcccccgccgagcgacttaccggcctcgatatgccacgtactcggcgtccacaccacatccgcctgcccggccggggcccagcgcaacagatgcgctccgtaatcgctgattaccacgctgccgccattgttggcgagcatacgcaaatcgacaccattgcccataagtttcccattcccattgtgcgaacgatacttttcactaaataggatacttccttaacaaaaaagaatcgcaaagtatggccgcaggatgcacaaaggccgtgccaccccattcgccgacgaccgccacgcgccaatcgtgcgcaagatcatcggatgcgactggcaatagatgctggtcacgcgggccagtgcccggctcaagcacgacttccccctcgcgcaccagttcgccgtgctcccaatggtgcacataaacgcgatccgcacccaaatcgctggtcagcacgcggccgtccggcactggctgcacccagtgggcgacggcgcgtccgacagcagccgttcgcggcgtagcaccttggcgtcgccactgttatcgccgccggcatccaataccaattgttcgatgccggggcaagccacatgatgcagtttgccgaatccaccaaccagaatatccatgaggatgttccgttttactacgaactacgaaactcttttcgccacacaatacgccgtcgccggcgaggcaaaatatgccaaaattagccaattgcagaaaaagggcgatccccgtataggaatcgccctttgcgcaaacactcaggcggagggaagtgcctcaggccgtcaaaccggcgaagagcgccgaccagtcctgagactcatcctcaaggtcgaatcgttcggtgttcatcagtgcctccttcaccggcccgggagccctcccctcaagtttgtgtattgagtaatcggtgagatcactcgtcgtggcccccaatgcccatccggaatgcggcaaatacacgtggaattggattgagcagacgaagacgccgacagtgatcatcgaacgtgatctgccgctgctgggttcccgctacgtcgattcagtgcgcaccaaccatccctatggcgtgcgtaaggcggcggtgcgcttcctgcaacacggtcacacccgtg

SEQ ID NO: 446 - DNA, 14538 bp, Unknown
  R48_24m  MAG No. k141_20190
cctcgaggcctacctgctgaccggtcgtcacggtatctggagctcctacgagtccttcgtccacgtgatcgactccatgctcaaccagcacgccaagtggcttgaggctaccgtccgcgagattccgtggcgcaagccgatcgcctccatgaacctgctggtctcctcccacgtttggcgtcaggaccacaacggcttctcccaccaggacccgggtgtcacctccgtcctgctgaacaagtgcttccacaacgaccacgtcatcggcatctacttcgccaccgatgcgaacatgctgctggccatcgccgagaagtgctacaagtccaccaacaagatcaacgccatcatcgccggcaagcagcctgctgccacctggctgaccctggacgaggctcgtgccgagctcgagaagggtgccgccgcttgggattgggcttccaccgccaagaacaacgatgaggccgaggtcgtgcttgccgccgccggcgatgttccgactcaggagatcatggctgcttccgacaagctgaaggaactgggcgtcaagttcaaggttgtgaacgttgccgacctgctctccctgcagtccgccaaggagaacgacgaggctctgaccgacgaggagttcgccgacatcttcaccgccgacaagccggtgctgttcgcgtaccactcctacgctcacgacgtgcgcggcctgatctacgaccgtccgaaccacgacaacttcaacgtccacggctacgaggaggagggctccaccaccaccccgtacgacatggttcgtgtcaaccgcatcgaccgctacgagctgaccgctgaggccctgcgcatgatcgacgccgacaagtacgccgacaagatcgacgagctcgagaagttccgtgatgaggccttccagttcgccgtcgacaagggctacgaccacccggactacaccgactgggtgtactccggcgtgaacaccgacaagaagggtgccgtcaccgctaccgccgctaccgctggcgacaacgagtgataacacctccacggtgttgttagttcgctaacgccaaagggctcgggattcgtcccgagccctttgcttattcataagccccctctgacgaggaggctgtcatgcgaagcatgactgggggagagaaaagcggaagcgaaggcgagagccaagactgaaaacagcccataaattccccaccccaactaatccttaaggatgacaactccccatcaattcaatcctgcgcatgatggaaaccacgccattcctccataggcttggaaccagtatccgggcgcgaggctcggagccagccatgggggagagcacatgcagaaggatcagcagcagaccgcaatcatacaatcgttggacgctaccgacaccgtggaatcaagtgtcgacgcccttgcccaaggcgaggcggagaacgaggaagtcgccgaattcaaccgattaatgcgcgaacgtgagacgcgcaagaaaaagcgcgtggtgcatcgcatcatcgccgtcgccgtcgtggcggtactgattatcggctttatggtggtgcacgcgattattaccccgtcagatgggggcgtgtctccggtatccacggcaacggtggaacgtggccatttcgtcgaccaagtcagctccaccggttccatagaacccatcaactccaccgtcgtcaccccgcagatcgacggcaccatcggcgaagtcaaggtgcaggaaggcgcaaccgtcaacgccggcgacgtactgtttaccatcaacaacgacaagctcgatagcgacgtgaatcaggctgatctggctctgcgagcagcgaactcaaaccttaatgccgcccagcagcaggtgaaccaaatcaatgcgaccataggtcaggcacgtaatcaggatggtgaggaaggccaagccgctgccgatgatgcggccggacagctgcccgctgcacaaagcggcgtggagagcgcgcaggtcgccgttcagcaagcacaagccacctatgacgaggcggtcgcccaagccaacaagcgtacagtcactgctccggtctcgggcacggtgctgaccatgagcgcggtgcccggtgccgccatcggagcttcctccgatggctcatccacttccgccggcgcagacggtaaaccattgtgtcagatcgccgacctgagtcagatgaaggtcaatgtcaacatcaatgagctggatatcactaaagtggccaaggaccagagcgccaaagtcacgttctccgcggtgccgggactgacgctcgatgccaaggtggataccatcgccagcaccacgtcgcagttggctgattcctcggcaggcgggcagagtggcaacggcggcgtgggatacgccgtgcgtctcatcattcccgcccctgatccgaaactgaagccgggcatgacggccagtgtgaaaatcaccatgcagagcattgacaacgctttgatggtgccgctcgccgccatcgtggatgagggtaaggagagcagcgcggtcatgctcgagaccaacgccgaaacccatgagttcaagcgggtgcgagtcacggtcaaagccaagaacaacaccaaagccgttgtggaaggcaatgtgagcaagggcgatgtcatcatgcttgatggcgcttcggctgccgacaatactggcgatgctgcttcttccacctcgcaaaccgcggcttcggacgaaagggcacgctgatatgttcccgtttcgttccgacgcgagccgggcaaatcgcggcaaacggcgtaatgagaccattgccgtgcccaccgccacagccaacgtcatcgaggttgaaaacatcaaccgcatcttcgagacaggcgacacctacacccatgtgctcaaaggcatcaccatgaacgtgcgccaaggcgagttcctcgccatcatgggaccatccggttccggcaaatccacgctgatgaacacgctgggcctgctcgaccgcccatcatccggcacctaccgcctgtgcggcatggacgtgcagaatctgagtgatgacgaacgctccgaactgcgcgggtggctcatcggcttcgtgttccaatccttcaatctgctgccgcgcaccagcgtgctgcgcaacgtgatgctgcccctggcctattccgactgcccggtgcgtgaacgggaagggcgtgccatcaaagcactccaatcagtggcgttgagtccggaactgttcgaccgcaaaaccaatgaactctccggtggtcagatgcagcgcgtggccatcgccagagcgttggtacaggacccgccgctgattctcggcgacgagccgaccggcaacctggactccaaaaccggcgatgcggtgatgcacacgttcgaacagctcaagcagcaaggcaaaaccatcgtgctcatcacccacagccccgaagtggccgaacgcgccgaccgatgcctgcacatgcgtgacggcgtactgcgtgaagggatgtaccgatgagaacacgggatctgctggcggaaaccggctccgcactgagggcgaacaaaggcaaaagcgcactgaccattctcggcatcgtcatcggcattgccgcggtgattaccatgacctcactgatcggtggcattcgagactctctggtcggcgaactgggtatgaacgcggcgcgcacgatttcgatttacacggacgtcggcacccttgacgacgaacagatcactgcgatgcgcgaggaactgaccgactacgagtacttctcgccgacgaactatggtgccgcctcgtcaatcgccgcgcccggtaccaccgacaaggtgtcggcgagcatcaccggtgtcgacgagcatttcttcgatgtatccggagtgacgattggtcgtggacgggccttcacatcgagtgaagcaacgagtggtgcaatggtggtgattctcgacgggcagggcgtgcagaagctgttcggcagcgcggacattgacgccatcggcagaaccgtcacgcttgacggcaatgaagcaaccgttgtgggtgtggtcgagtcgtctggattgatgggcggcatgggcggcgacagcgtgaatatctatatgcctgccaccactgtggcgctgcggtttgcgtcctcgaacatgggatacatgcagatctacggactggccaaggacggggttgatatcgaccagctcacggaacagacgaagaccgttgtcgctcgcatcatgcgtatcccaaccgaacagatcgaccagaatctgtcggtcgtaagcgcccaatcctccatcgaccagctttccagcttcatgagcgcattccaggtgctggcgggttcggtggccggggtctcgttgctggtgggcggcatcggcattatgaacatgatgctcaccaacgttaccgaacgcatccgcgaaattggcctgcgccgggcattgggtgccactcggcgtgacgtgaccgcgcagttcctcgccgaatccattgcaatcacagtgcttggaggtcttatcggcacgttgatcggctacttgctgtcgttgggcgccgctggattggtgtccggcatcgccggtggcatgagtatcgcgccagcagtttccgtgcagtccatcggactggcagtgggcatctgcatcgctgtcggcgtgattttcggctactatccagctaggcgcgcggcaaagctcgacccggtcgaggcgctacggcatcaataatcgcgtagcaccccgaaatgcagtagggcattgcgcacaccgtcgtggtccacgtcgtcggtgatgtaatcggcggcggcctttggctcggcggtcgcattgcccatcgcgaccccgatgccggcgtaggcgagcatatccgtgtcattgccgccatcgccgaaggccatggtctgcccgcgcgtgatgccgtaatgcgccatgaaccgctggatgccgcgcggcttgccgccatcggccggaatcagatccgtgaaatccggatgccaacgcaccccgcgcacattgctgcacagtcccaccagttcggcctccaactcgggtccgacaaagggactgatctggaaagtctcatgatccagcgcgcgggtgcgcgggtcctcaaaataccgggtcggtgcggttttgcccagtttgctccacgtggcgcgaagcagatcattggactggttgaagtacacgtaatccttctcgccgaaattgcacaccacatcggggtgacggtccagccagtcgagaatcacctcaatatcagcagtatccaaggcctgcgaggcaaagaagccggtgtcatcaaagcaatactgcccattgaacgccaccacgccatcgaacgtcaccggcatggtatccagcaccacgtgcatctgtgaaggcgcgcggcccgtgcaaatcagcaccttgacgcctgcggcctgcagccggtgaatcgcctcgattgtggaatccggcaccgtatgggtcgtgaaactggtgagcgtgccatcgatatcgaagaatacggctcggatatcggcattggcagtatcggtagtcatagcttccattgtcaaagcccctctcgacgtgctttccggcgtgttcggcacgcctatagcgggttatcaaacgcacgaatcccggccattgcatgcgcgccataaaagacacctatacggcaatcggccattttccgtcactttcgcggttcaagcgcgttatggtgttacccgacatcaattttggagagaggaaatccaatgacagcagcaacccagtcggcaactccggccgctcctaacaataacgagccggtgcgtgtgaaccacaccgtccgcaacgtcatcatcaccatcgtggtcgtggcgattatcgccgtggccgcgttcttcggctaccgcgcgtttgccggtgccaacgagtcgtccgccaagggcagcaagggcaacccggtcaagatcggcgtggtcggcgctaccaaccccgaatgggtcaagttcaagcaggacgccgagaaggccggcatctacgtcgacatcgtcgacttccaggactacacctccgaaaacccggcccttgactccggcgagctggacctcaacgaattccagcacctgctctacttggccaactacaacgtgagcaacaagaaggacctgcagcccatcggcggcaccgccatctacccgctcggcgtgtactccaccaaggtcaaggacatcaaggacctgaagcagggcgacaccgtcaccattccgaacgacgaaaccaaccaggcccgcgctatcggcgtgctcaaggccgccggtctcgtgacgctcaagggcgactggaccgccttctccactccggccgacatcgacgaagccaagagcaaggtcaaggtcaccccgctcaaggccgaacaggtggccaccaccctgaaggacccgaccatcgccgctggtgtgatcaacaacgactacgtggccgacgccggtctcaacccgaaggacgccatctaccaggatgacgccgaatccgaagaagctcgcccctacatcaacgtgtgggtggcccgcaaggcggacgtgaacaacgagacctacaagaagctcgtttccatctaccagcagaaggatgtgctcgacgccctgcaggagaactccggcggtaccgcggtgttcgccgacaagttcagcgccagcgagctgcaaggcttcctgtccgacattgagaaggacgccaaagcccagcagtgagccgtggctgatacgagtgcacgactaacctgtccatagccattaccaccaagcggagcgagtacccgagccaacaatcgggattcgctccgcttccgtgaccggacatcaacaaccagcatcagggagcactatgagcgaccccatcatcaccttcgaccatgtcgtgaaggaattcaaaacacgcggacgcggcgcgaacatcgcacgagccgtggatgacgtcagcctgaccatcgatcgcggcgacatcttcggcatcatcggctattccggtgcaggcaaatccacactggttcggcttatcaacgcgctcgaacgacccacctccggcaccgtgaccgtgctcggcaccgatatcacctctttgagtgagaccaagctgcggcccatccgccagaaaatcggcatgattttccagcagttcaacctgttctccaccaaaaccgtggcgcagaacatcgcctacccgctgcaactcgatcactggcgcaaggactatcaggatcgtcgcgtcaacgaacttctcgaattcgtgggccttagtgagcacgcaaacaaatacccctcgcagctgtccggcggccagaagcagcgcgtcggcatcgcccgcgcactggccactaatccggagattctgctcgccgacgaagccaccagcgcgctcgacccggaaaccaccaccgaagtgctggccttgctcaagcgtgtgaacgaggaattcggcatcaccattgtgcttatcacccatcagatgaacgtggtccagcagattgccggccgcgtggccgtaatgagcgccggacgcgtggtcgaatccggcgacgtatacgacgtgttcgccgcgccccagcagccggtgaccaagcgattcatcgccaccgccctgtccggcctgcccgaggaagaccgggtcgagcgattgcaccacgaatggtcgggccgcatcgtcaccgtgctcatccgccaaaaggacgtttccggcagccatggccacgaactcaaggcatccggacagaacatctccgaactcatcgccaaatacggcgtcgaatccagcctgctctacggcggcatcgacacggtcaaggggaccgccatcggtgccatcacctacgaattcaacgggcccggctggcacgtggacgaattcctgcgcgagctcgccgccaatagcgacgtcattgacttcggcaccgccgcaaagcccgtggcttacgccgacgcagttgccggacatgcctcctacgccgaagaccgcgcccatgacccactggcggccgatactgccaccgcgcccgctgtatccgccgccgcacatgaaggagacaacgcatgatcatcctcgccaactcgcgtagcgactggaacgtgctgcgcccactattgttcgaatccatcggccagaccctgaccatggtgctcgtcacccttgtcatcggcggattcctcggcctgatcctcggcgtggtgctctatggcacccgccccggcaacctgttcgagaacgcggtcgtctaccgcatccttgacatcatcgtcaacatcgtgcgcccgattccgttcatcattttcctggcagccatgcagccgctcaccatcgtcgtggtcggcacgtccatcggcaccgtggccgccatcttcccgatggtggtcatgtgcaccttcgccacttctcgtctggtcgaacagaatctcgtgccggtcgacccgggagtaatcgaggccgcgcgttcgatgggtgccggcaagctcaccatcatccgcaccgtactcatccccgaagccctggcaccgctgatcctggcctacgccttcctgttcatcggcgtgcttgacatgtctgccatggccggctacatcggcggtggcggtctcggtaacttcgccatcgcctacggctaccagaagttcgaccagaccgtcacctggacggccgtgatcatcatgatcgtactggtccaggtggtgcagggcatcgccaacgccatcgccaaacgactgctcaaacgccagcaataacaaggcatactgaccccatagatcgcggccctcgccaatatgaagcgagggccgcaatatattcttcgcgctactagaatcgggaaccatgagtgaacatatcgacatcgaccacgaactcatcaccatccgccactacctgcacgcccatccggagcgtagtttccgtgaattcgacaccagcatctatctgaccgaccagctcaaggcgcacggcatcgagatcctgcacaacccgctggagactggtgttgtggggctcattcagggcgaggccggtcccgggccgcgtatcgggctgcgcgccgacatcgacggcctgcccatcgtggaagactccggactggagttcagctccgtcaatgaaggcgtgatgcacggctgcggccacgacctgcacatgaccggtctgctcggtgccgccttctggctcgccgagcaccgtgacaagttcgccggctcaatcaagattctgttccagccgagtgaggagaccggccaaggcgctcgcgccatgatcgacgccggactcgtggatgacgtcgaagccattatcggcacgcacaacaaccccaactatgcgtccggccagctggccatcggcgttgagccgatgatggccggctgcgtgaaattccgcgtgaccctccacgcccaaggcacccacgccggctacccgtacaagggcaccgggcccatcgaagcgctcgccagtattattctgagcctgcagaccatcgtgagccgcaacgtcacgcccttccacccgctggtgctgtccgttaccgaagtgcacggcggccatgtgtggaacgtggtgcccgccgaagccggattccaagggactgtgcgctatttccacaagtcggatggcaatctggtcggccgccgattcaaggaagtggtggaacacaccgccgaggcatacggtatcagcgccgatgtggtctgggatgatttccaagacccgctggtctccgatccaggtcttgccaaggccgtggcggcggatgtcaacgactacgcgcagctcgaaccgatacgtcagtcgatggcgggggaggacttctgcgaattcgccaaggtgacgttgccggtgttcgcgttcgtcgggtcaaacggccaggaaggttgcgccgactggcatagcccgcatttcgtgggtctcgacgaatccattcccaccttcgtcaacttctacgtcaacgccgccctgcgcgtgctcaacgagctgaggtaaatccttttttggctcccctctggaggctgaggcgttaggcagacagcccaatgggctgtctgcagccgaaggtgaggcgacagccgaaccagatatgcgcgggcctcgcccgtccataagtgcaggacgagctatcagcgaagctgactgagggggagtggcattcgttcattaggtcgattcatcgtccattaggtcggtgaacgacgatactggttgttggaatcgcgccattgcaacgactgatatcgcattgcagtgacctaatgaacgcaaaaacgacctaatgaatgacgccaagccggaagaacaggcaatccgacgccatacgcggctacactaagaagctatgacacagcttcgcttcgcactcgcccagatcgacacctgcgtcggcgcgctcgatgccaacgccgccaaagtgctcgactactcccgtaaagccgccgcagggaatgcccaagtggttgttttcccggaaatgaccctcaccggataccccatcgaagatctggccctgcgccgcaccttccgccaagccgcatgggacaaggccaacgaactcgccgcccagctcaacgacgacggcctcggcaatctgttcgtggtggttggcaccgtgggcactgatcgtaagacctccaagccgcgcaaccgactggtggtattgcatcagggcgtggtctgggccggctacgacaagcacttcctgcccaactacggcgtgttcgacgaattccgtatcttctccgccggcgaccgttccgtgaccctcgacgtggatggtgccaccatcggcgtggccatctgcgaggacatctggcaggatggtggcccggtggccgacctggccaccaagaacatcgacctgctgctcaccatcaacggctcgccgtatgaggaaggcaagaccaacacccgtttcgagctcgcccagcgtcgtgccgccgaagtcaacgccccggtcatctacctgaatcaggtcggcggtcaggacgacctggtcttcgacggtggcagcttcgtggtcgatgccgacggcacgcttatcgaacgcggcccgatgttcatggaaaacctgacgttctgggacttcgattccaccgccgaacatcaggtcaaggccgagatcgttccggaactcgacccggacgaagaggtatacactgcctgcgtgctcggcctcaaggactacatggccaagaaccacttcaccggcgtgacgctgggcctctcaggaggcatcgactccgcactggtagccgccatggcggccgacgcatgcggcggcgagaacgtctggggcatctccatgccctccatgtactcctccgatggttccaaagacgacgccgctgacctggcctccaacatcggtgcccattacgaggtccagcctattgagccattgttcaacgcctaccaacagcaacttgaccttgatggcgtctccgccgagaacctgcaggcccgcatccgcggtgtgatcgtgatggccagttccaattctcgcggcctgctcgccgtggccaccggcaacaagtcagagctcgcctgcggctactcaaccatctacggcgatgcggtcggcggctacgcacccatcaaggacctgctcaagacccgtgtctgggagatcagccgttggcgtaacaaggccgcggccgcaggcgtcggtatcggcgggctcaagatcgtgggcaacgaggacggcaacgccggcatcccgttgaaggacggcgtgatgattccggtctcatccatcgagaaggctccctcggccgagttgcgccccgggcagaaggactccgactccctgcccgaatacgcgctgctcgacaaggtgctcgctgcatacatcgagcacgcgcacggccgcgccgacctgttggccgacggcttcgaccaggacaccgtggacactgtgatgcgattggtggaccgcgccgaatggaagcgccgccaatacccgttgggaccgaaggtcacggccctcgcgttcggccgcgaccgccgactgcccgtcaccaacgcgttcagggaataaacatatattgctcccgccagcgggagcaagtaataccgttgaggaggtaccaatgacagacgataacaagaagcagtggtatttcaacaccgtcaagaagcaggccgagctgggcatggtctcaccgattgaacagcgcatgggcccgtacaagaccaaggaagatgccgaacacgcctgggacatcgtggtggaccgcaacgccagatgggaggaggagaactggcgctggaagaactacggtgtgaaatccgcgcaagcgaacgatgaagactgacggccaaaacagacggatacggttctgctgtcaatctcaagaccgaaccgctcaccaagccgctcatacgaacatcacagtatgagcggtttcccatatctggagacgtgcaatagccccatcaatacctagaaaccattggaatggtagcgttcacaaaaaacaatgtgagatagctcactcccaatttcggcttttcccaagcaagtgccaactacactgttgaaccaagggttccgtgaagatgcgaaacctacaaccccatttaaggagtgacatgaccgcagtggaaaatgcagctgtctcccaggaggagctcgacgccaaggcgtgggccggcttcaccgagggcaactggcagaaggagattgacgtccgcgacttcattcagaagaactacaccccgtacgagggcgacgagacattcctggctcctgccaccgagaagaccaagcacctgtggaagtacctcgacgacaactacctggccgtggagcgcaagcagcgcgtctacgacgtggacacccacaccccggctggcatcgatgccttcccggccggctacatcgactccccggaagtcgacaacgtgatcgtcggcttgcagaccgacgtgccctgcaagcgcgccatgatgccgaacggcggctggcgtatggtcgagcaggccatcaaggaagccggcaaggagccggatccggagatcaagaagatcttcaccaagtaccgcaagacccacaatgacggcgtgttcggcgtctacaccaagaacatcaaggtcgcccgccacaacaagatcctcaccggtctgccggatgcctacggccgtggccgcatcatcggcgactaccgtcgtgttgccctgtacggtgtcaacaagctgatcgccttcaagaagcgcgacaaggactccatcccgtaccgcaacgacttcaccgagccggagatcgagcactggatccgcttccgcgaggagcacgacgagcagatcaaggctctgaagcagctcatcaacctcggcaacgagtacggcctggacctgtcccgccctgctcagaccgcccaggaagccgtgcagtggacctacatgggctacctggcctccatcaagtcccaggacggcgccgccatgtccttcggccgtaactccgccttcctcgactgcttcatcgagcgcgacctcgaggccggcaagatcaccgagaccgacgcccaggagctcatcgacaacatcgtcatgaagctgcgtatcgtccgcttcctgcgcaccaaggactacgacaacatcttctccggcgacccgtactgggcgacctggtccgacgccggcttcggcgacgatggccgtccgatggtcaccaagacctccttccgtctgctcaacaccctgacccttgagcacctcggacctggccctgagccgaacatcaccatcttctgggatccgaagctgccggaaggctacaagcgcttctgcgccaagatctccatcgacacctcggccatccagtacgagtccgacaaggaaatccgttcccactggggcgacgacgccgccatcgcatgctgcgtctccccgatgcgcgtgggcaagcagatgcagttcttcgccgcccgagtgaactccgccaaggccctgctgtacgccatcaacggtggccgcgatgagatgaccggcatgcaggtcatcgacaagggcgtcatcgacccgatcgccccggaggccgacggcaccttggactacgagaaggtcaagaacaactacgagaaggcgctcgagtggctgtccgaaacctacgtcgaagcgctgaacatcatccactacatgcacgataagtacgcctacgagtccatcgagatggccctacacgacaaggaggtgtaccgcaccctcggttgcggcatgtccggtctgtcgatcgccgccgactccctgtccgccatcaagtacgccaaggtgtacccgatcaccaacaaggaagccaagaacctcgaaggccacgagtacgagtacgtcgaaggcgccgacgacgatctggtcgtcggctaccgcaccgagggcgagttcccggtctacggcaacgacgacgaccgcgccgacgacatcgccaagtgggtcgtctccaccgtgatgggccaggtcaagcgcctgcccgtctaccgtggcgccgtcccgacccagtccatcctgaccatcacctccaacgtggagtacggcaagaacaccggttccttcccgtcccgcca

SEQ ID NO: 447 - DNA, 5706 bp, Unknown
  R48_24m  MAG No. k141_20294
cgcatcagaccgtagttgaagcaggcgcgggcaaagccgcgaatggaatcgttaacgttgtactgtacctgggccacgccgccgtcttcgccgtagttgtgcaccacgtgctgaatcggttcgctgccatcgtccggggtgaaggtcacggtaagctggccggcgcccggtaccttgaaatcggtggccttgtactggtcgccgaatgcgtgacgggccacgacgatcggcttggtccagccgggcaccagacgaggcacgttgctcatcacgataggctcgcggaagatcgtgccgcccaggatgttgcggatggtgccgttgggggacttccacatcttcttgagaccgaattccttgactcgggcctcatcgggggtgatggtggcgcacttgacgccgacatggtgcttctggatggcgtgggcggcgtcgatggtcacctggtcatcggtctcgtcgcggtgctcgatgcccagatcgtagtagtcgaggttcacgtcgaggtacggcaggatcaggcgatccttgatgtccttccagatcacgcgggtcatctcgtcgccgtcgagttcgacgacagtgccttcgaccttgattttggccatgcttcctcctgatagatggtgtgaagatgatttagtcatagcgcatgtttgtaacgacttgaagcaatcgtccggtccgtgggaaacgaccttgttggcgtcccacccgggcaataggcttacaaccatgtctcaggaaattgaaatcggtttgggcaaaaagggccgtctcggctacgcactcgacgatgtggcgatcgtcccctcccgtcgcacccgcgaccccgaggacgtctccacctcttggcagatcgacgcctatgagttcgatgtgccggtgatcggcgcccccatggattcggtgaccagcccggccaccgccatcgccatgggcaagatgggcgcgctcggcgtgctcgatttggaaggtctgtggacccgttacgaggacccgaccccgctgttggacgaaatcgccgggctgccggccgatcaggccaccgagcgtatccagcagatctatgccgagccggtcaagccggagctcatcgcgcagcgtctgcgcgagattcgcgccgccggtgtcaccgtggccggcgcgctctccccgcagcgcacccagcagttctactccaccgtggtggacgcgggcgtggacctgttcgtgatccgcggcactgtggtctccgccgagcacgtctcctctggccaggaaccgctgaacctcaagaagttcatctacgaccttgacgtgcccgtcatcgtcggcggcgcatccaactacaccgccgccctgcacctgatgcgcaccggcgcggccggcgtgctcgtcggcttcggcggcggcgcggtctccgccacccgccagaccatcggcgtgcaggccccgatggccaccgccatcgccgacgtggccgaggcccgccgcgactacatggacgaatccggcggccgctacgtgcaggtcatcgccgacggcggcatgggcgactccggcagcttcgtcaaggccctggccctcggcgccgacgcggtcatgctcggcgcgccgctggcccgcgccaccgaggcccccggcaagggcacccactggggttccgaagcccgccaccagacgctgccgcgcggctaccgcaccacggtcggcacggtcggcccgctcgaacaggtgctgttcggaccgagccaccaggcggacggcaagaccaacttcatcggcgccctcaagcgcgcgatggcctccaccggctacgtcgacgtgaagaacttccagcgttgcggcatggtggtcaacccgtattccgcacgataatcccgattaccccccctgaaaatgggggtttgccctccatgcaggaggcttagcttgccctaaggcgcgctcaagtcgtttgacttggcgcgcctttcgtgatgttgtagtacaaacgctcgccgatgatggtgagttgcaagggggcttgaaggggtcatcatggagtattcgggatttttccacggcacatatcagtacgggccgttgccgagttatgacggattcatcgttgtggagctgtcggatcgcccggtgcggtatcatatccaacccacattcataggcgggctgaatgcgaaggaatgtcattccatggccatggctgcatgccgcatcgcctgcacatcggcggacgcgatacgtggcagactcagcgtcgcacatctcaacagagccatgacaaaaccatgcctggaacggctgcaaaccatgcaatacctgctcggcacccacatggtcactcatccggagctcaaagcgaaattctgctatctgcccactgtccccacattgatcgacggcatgatcaccggcaaggacacgctggaaatggcggtattcatgaccatcggccaggaaaatctgcgagtcaacctcaaactgaagttcatcggttctcgatggatgtgcatctatgccgatctgggctgaccagacggccccgcccgcacaccgattcctacgctggcagcggaagacggttctgccgtgtcataggctggttcgcctatagtagtgaccatgcgtgaacatgtagaagaacccagatatgtcaccaccgatgacgacaccgtctactcgctgctggccaaacgagcagctcgcacgccggatgacgtcatcgcggaatggcaggatgacaacacccaccaatggcgcggcgccacagctactgaaatgctgtcccgcgtacgcgaggtggccaagggcctgttgggacttggcgtcaaagccggcaccatggtgctgatttactcgcctacctgctatgagtggggtgtggctgatttcgcttgcgcggcaatcggcgctgtggttgtgcccgtctatgagaccgattccgcccgtcagaccgcgggcatcgtcgaggaagtcgatcccgccatcgcctttgccggcgacttccagcgcgcacagacgcttgagcagatccgtgtcaatcatccgggcatgaaatacgtgttcaatttcaaggccgatggccttgacgctgtcgctgacttcgggcatggcgtatccgatgagacgttggatgcggctatcgctcgtatcaaagccgatgatctgcttaccgtggtctacacctccggttccaccggcaagcccaagggcgcgatgctctccaaccgcaattacacgcacatcgtgcttaacggctacgagattctgcgtggcatgctgtacgacgacaaccgtctgctgctgttcctgccactggcgcactgcttcgcccgctacatccagtacgtgtgcatcggtggctgcggcgtggtcggatacattcccgacgccaagcgactgctcgccgatatccgcagcttcaagcccacctacctgctgggcgtgccacgtgtgttcgagaaggtgtataacgcggcctcgcagaaggctggtgccggcatccaggggcatatcttcgcccagtcgttcaagcacttcgtcaagtggagcaaggatgagcaggccggccgcggccattcgttcatcgagcgcatgcgccattcgttctacatggccacggtgggcaaatccattcgttccgctctcggaccgaacctcaaatggctggcctgcggtggtgcgccgctcaacgtggatttggcccacttcttcaacggcatggatgacatcaccttcatccagggttatggcatgaccgaaaccgccgctccgatgctcgtcaattgggaggacgacaacgaggtcggttcggtcggcaagcctgggcctggcatgggcgtgcgtcttggcgaagacgatgaaattgagctgaccggcccgaacgtgttccttggctactacaagcagcccgaactcaccgcacagacgatgactgccgacggctggatcaaaaccggcgatctgggtcgtatcgacgaccgcggcttcaccttcattaccggacgcaagaaggacatcatcatcaccgccggcggcaagaacatcagccccgccccgatggaggatgtcatcgacacctgcccgatcgtggctcatgcagtagtagtcggcgacggcaagccgttcgtgtccgcacttatcgagctcgaccctgaaatgctgcattcctggctggaaggtcagggcctcaatgccgacatgacactcgccgaggccagcgacaacgacgcggtgcgtgcctttatccagcagtacatcgaccaggccaacgccaatgtctcccgcgctgagtccgtgcgcaaattcgcggtgctggatgaggaattcagtcaggagcacggcacgctcaccccgagcatgaaagtggtgcgtcccaaggtattgcagcgctacgccaccgtcatcgaagaggatctgtatgcgcccaagccatccaacaaaccgctgcctgccacagccaagatcatcgacagcacgctggagaccgtcaagaaatcctccgaatcggtcaagcaggcgtccgaacaggtcaaacaggcctcggaacagatgaaaaccagcgtgtctgattcgattgctagcgtgtcggagaagatcaagaagtcgaaggccgaacccgaagagggcgagaccggcgattccgccgacaatgccgacaatgccgctgacaccggcagcaagccggaccggccggctgacgagaagaacgaggagtaacgagaagtggccatccgtgagatcagggtcgtgcccgacccagtcctgcgcaccccctgcgatgagatcaaggaaatcaccccggccgtgcgccgcctggttgacgacctgctggaaaccgtggacgatccgggccgagcgggcctgtccgccaaccagatcggcgtgagcctgagggccttctcctacaacatcgacggcaaggtcggctacgttctgaaccccgtactcgaggagaagtccggcgagcagtatggcgatgaaggttgtctgtccgtgcccggcttgtggtacaagacccgtcgggccgactacgctcgcgtgcgtggcatcgacctggacggcaacgaggtcgtgctcgagggctccgggctgatgggccgtatgcttcagcacgaatgcgaccatctcgacggccacgtgtatttggatcgcctggaaaaggaagaacgccgcgaagccctgcgctacatgcgcaatcgtcaggcgaagtagtccatactcggctcccgctggcgggagccgtcgaacgtagtgagactgagggtggttctgccggtaccgcccgtaactcccctcagtcgcctatggcgacaggttcccctcaaggaggggaacctgtcttcttagtactggctccgtgctattctcgaaacttgtgtgccacccggcaacggacgcagtcgctggcgtccggaaccacccaatattgtcaaccggcacacaacaaattcgcgtcatgctcgcgacggcctgtgtcggtcggctgcacaactcgtgaaaccgggggagcagctgcacgcaggtgcgcatggccaggcaagaaccgacaatgaaaggtagtaataccatggctcagatcactatgagcgatatgctgaaggctggcctgcacttcggccaccagacccgtcgttggaacccgaagatgaagcagttcatcctcacccagcgcaacggcatccacatcatcaacctgttcaagtcgctcgacatgatcgacaa

SEQ ID NO: 448 - DNA, 4406 bp, Unknown
  R48_24m  MAG No. k141_20415
cctcgactcctacgatcagtggggcgtcgagctcggcaagcagctggccaagcagatcaccccggccctctcccaggacgacgacgccctcgccgcccaggacgcctccacccagagcctgatcaagttctaccgcgccaaccgcgagttctgattcgctttgctcggtcagaattcgtgattcgcgcgaccgcggctgtgctgtctggtgggcagcctggcgactgcccacgtcgcgagttctgattcgctttgctcggtcagaattcgtgattcgcgcgaccgcggctgtgctgtctggtgggcagtctggcgactgcccacgtcgcgaattctgattcgctctgctcggtcagaattcgtgattcgcgcgaccgcggctgtgctgtctggtgggcagtctggcgactgcccacgtcgcgagttctgattcgttcctctggtgccccctcgggtgagaggagctgtcagtgtagctgactgagggagtctctctcacgactagtgcccgacatcttcggatgccgggcactttgcatatacggattgctgtcagtcagatgagtcgaacatggtcatattccgcttcggcatctgtttgcaggcataaaggcactatctagccaactcacgtggctgattcgcttattcgcccttattcgcctcatccaggctcagcagatcgtcatcggcatcgtaatcgaagagttcgccgtaacggccccactccacggcgatggcgaactgctgatgcgcctcgtcgttggcgtaacgggcgcgcagcaggtccagcatgagctcgccgcggagcttgccttccgcagacttccgcagtgcatgctcaatgttgtgcaccagcggcgcgtgttccatcgccagtgaggcgaacacctgcttggcccgcagaatgtccgccttatgccaggagtcgcccgcctcggtgatctgcacatggccgtcgcgtaccacgatgacgcgcagcatcgtaccggcatccaccagcgggaacaggtcgtccacctcgaacgaaagagccgaggccaaatctgccaagtcgatgccgtgaggatgctcggcaaccacatccagcagaccggcaagcccgcccggcgtggcgttgggcagcggatgctccttgattttctcgatggtcttggcgggctgaaggtctgatgcgtccgtgacagatgcgtccgtgacgggtgcgttcgtgagcgatgccgatggcgatagagcctcggcttgttgcgtaggctgcgaggcctgtccggtcaaaatcgcgtacagtcggtccaccatcgcctcgaattcgacactgcgacggtcgcgcgggcgctgcagatcaacccgcacatcggcaatcagatgccccgggtgcgagcccaacaccaccactcggtcggccatctccacggcttcctcgatgttatgcgtgaccataagcaccgacttgatgctgcgctgttcgctcgaccacagcttgagcacttcctgacgcaggttttcggcggtcagcacgtccagggcggagaacggctcatccatgaacagcgcgtccggccgcagcaccaaggcgcgtgcaatgcccacgcgctgcctcatgccgccggacagttccttcggatacgccgattcgaagccgtccaggccgatcatgtcgatggcatccagagccagtttggtgcgttccgcacgtggtacgccgcgcgccttcagaccgagttccacattgtcttgcacggtgagccacggcatcagcgcgaaggtctggaacacgagtgcgatgccgggattcgggccggtcagggcctcgccgcgatacttgaccgtgccgctggtcggcttgaccagtccggccagcgcacgcaggaatgtggacttgccggcacccgaacggcccagaatggccacgatctcgccctcgtacaggttgaacgagatgttgtcgaacacggtgagttcggtgccgttgtcggccgtgaagcgctggccgacgtgctgggcttcgatgatggtgttctgcggggtcaccgcccgcagcgaacgaatggtttccattgcaacagtcatattattctccttaagtctttagttcagtgcgaaacggcgctcggccatgcgctgcagcgggttccagaacaggcggttgacggccaccacgaacacgctcatcacggtcacgccgatgatggtcctcacggtgttgccgctttcggtggcctcggcgatatacgcgcccaagccggaggcggtcagcgtatgccgtccataacttacgatttccgagacaatcgaggcattccacgccccaccggccgccgtaatgccgcccgtgacccacgagccgaataccgccggcaaaatcaaatcgcgccaccgctgccagcgccccagctggaagctgcgcgtcatctcacgcagatcgtcgggaatctggctggccccggcgatcacattgaacaggatgtaccactgtgtgcccaacgccatcagcagaatactgccccagttgatatccacgctgcatgccacgaaccagagcgtgacgaacgggaacgtgaagttcgaggggaagctggccagcacctgcacaatcggctgcataaaccgcgaaacgcgcggattcatgccgatcatcgcgccaatcggcacccaaatcaccgagcagacgagcgtaagcagcgccacgcgcaggaacgtcaccatgcccaacacgaacgcctgcccgagctcgccgaatcccgcatcgcgatgaatcaccagcataagctgcaccagtccgaacgcacacgctgccaacaccagcactgtgaataccacgtcaagcgcgcggctgcgtgcggacttcacgtccgccgcccaacgtccaccggtccgacccaacgggcgggccagcgtgtcgaacaggtcgccgagaggcctgaacagccaggccaccatctcatcgatatgtgactgacgaatgatggtcagcaccacactggtcttgcgcaccgccgactcgctttgcgtaatgcggaacttctccgcccacgcggtcagcggcttccacagcagtacgtcgataagcagcaccaccagcaccatcgtcacgatggcccagcagatggccgcgagattctcctcggccgccgcctgtgccacgaagctgccgatgccgggcaacgcataggtgcgattgttcaccgagatcatctcggaggcggtcaggaagaaccatccgccgcccacgctcatcatgcagttccacagcagcggaatcatcgcgttcggcacgtccagtgtccagaatcgttgccagcgtgtgagctgtagtgagcgggccgcctcgtcgagttcagttggttcgctggtcagggaccgggtgaacgagaacgccatgttccaggcctgactggtgaagattgcgaaaatcgacgcggcctccacgcccagcatcgagccggggaacagcaccatccagatggtgatggtggccgaaagaaagcccagaatcggtaccgactgcagaatatccaacagaggaatcagcacgcggctcaggcggcggcagcgcgcggccgccgtgccgtagatgaacgtgaacaccagtgagaagaacagtgccacgagcatgcggaacaccgagcgcagcgcgtaatacggcaggtcggcgagatgcgtactgacttgtgacggcacgcctttcgggccgatcggttcgccgatcgccggcagaatccaagcgatcagaccgaacagcgccagaataccggccgcgaccagtacgtcggaggccaggcgcacggcgaatggctggcggtcggacgcggcggtggaagggttgcgggccgacgcatttggacgcgcgccgacgcgattgaatgaaaacatggtcatgaaaagacctccctatgcataggaaagacgaattatgcaagggttatccggggagccaaggaacactacaggcgagagcccgacttccggataacggaatacaagaaaacatggtcatcaccaccgcaactatgactgttgccggcggcggaactactggaataatcaccgtccatcggactctcacctccttcaagccgtgcgctgaaacgccagatcaataccatcgtcggtatccatgcgaccagcaggaggggcggaaagtattcgaatccgccgattcgagccatcgttcaagcttcagcatcgcagggcggtggaattgcgttagttcatgccttgatccgacaagaactgctgacctgcgtgcagtgtctccactgttagcggcagcaacccatatccctgcggtagcctcgcctaccgacgctcccaagataaagcccgcctgcaggtctgtcaactacgtcgcagtgccttggtgttggaatgccatcaggcagccattctgtccgcaataatccgta

SEQ ID NO: 449 - DNA, 8718 bp, Unknown
  R48_24m  MAG No. k141_20418
cggctcgttgatcacgccgtcgatggtcttggtgaccacctgcggacggccgacggtcaactcatagccttcgcgacgcatctgctcggcaagcacggccagcgcaagttcaccacggccctgaacctcccaagcatccggacgctcggtcggcagcaccttgatggacacgttgccgatgagctcgcggtcgaggcgatccttgatcatgcgggcggtaagcttgtggtctttgccttcagtgcctgcaagcggggaatcgttgataccgaaggtcatggagatggccgggtcatcaacgtgaatcagcggcagcggacgcggatcagacgggtcgacgatggtctcgccgatcatgatgtcgttcacacctgcgactgcgacgatgtcgccagggcctgcggaatcgaccggagtacgctcaaggccctgcgtacgcaacagttcggaaacacggaagttttcaatggaaccgtccacacgggacagtccgtaggtcttacccttctcaagggtgccattgtagatgcgcaccaagccgagtcgtccaaggaagtcggaggaatcgatgttggcgacgtgtgcctgaagaggcgcgccttcctcatattccggagccggaatgttcttgatgatggcctcgaacaacggttcgagatcttcattgtctggcagaccgccattttccggctggttttcggaagcatagccagcctttgccgcacagtaaatgaccggaaggtcgaacagtgcgtcttcatcgaggtcgacgccttcctcgataacatcctgggccaagccgagcaacaggtcggaggattcacccacgacttcttcaatacgggcgtccgggcgatcggtcttattcacgcacaggataaccggcagtttggcttccagagccttgcgcagcacgaagcgggtctgcggcagcgggccttcggaagcgtcgacaaggagcacaacgccgtccaccatggagataccgcgctcgacctcaccaccgaaatcggcgtggccaggggtgtcgatgatgttcagggtgatgccttccggatgcccgtacttggctgccagcggaccggtgtactgcacagcggtgttcttggcgagaatggtaatgcccttctcacgctccagatcattggaatccatcacacgatccggaacttcctcacgctcgttgaacacgtgggactgtgccagcatggcatttaccagcgtggtcttgccatgatcgacgtgtgccacaatcgctacatttcgaatatcgccgcgaaccgccatcgaaacctctcttagtattactgttcttgttgcgtaatgttcggtacgtgattgattatctgcacttacacataaaccgagccaatactagcgaggtaatgcgacagcgtccgtgtgggtgagtaaacggcaggattcctcaatggccgcagcaacgcggttgatctgttcggacgtaagcggcgtgcggaaggtcatacgcaacgccgatttcgcaaccggcgcggtgaatcccatggccaacagcgttgcgggcgcctcatggcggccaagcgcgcacgccgaaccggatgagcaggcgatgccacgcgcatccagatcgaccagcagagcctcgcccgacaggccggggaacacgaacgacgcgtgaccgggaagcctgcgtttcgggtcaccggtcacctgcgccctcggttcgacgcgcagcacggcatccatcagcctgtcgcgcgattcggtcaacgcctgatattgcccggccatgcgcgtgttcgattcatgcaacgcgatggcgagcgccacggcaccggccacgttttgcgtgccggatcgcaatccccgctcctgcccgccgccggacagcaccggttcggccggcgtgcgaccgcgcagcagcaaggcgccgagccctttcggggtgccgaacttatgcccggatacgctcagcgcgtccacatcccagtcgcgcatacgaatcgggatctgtccggccgcctgcactgcgtcgacatgtatgggtacgccgtgggcgtgcgcgatgtgcgcgatctcatcgacgggttcgatggtgccgacctcgttgttggcgagcatgacggacaccagcagcgtacggttggtcagggcgagcgtacttccactcccctgcccggccatttcgtgttcgccgttgtcgatgccggtcatatcgccttgcgcgagttcacgctccaacgccgccatatcgatatgggcctgttcgtcgacggggatgcgtacgacttccacgccgaaccagcgttccatccaagctgccgactgcagtacggcaggatgttcaatcgcggagacgatgatacgcggtttcaccgattcgccgtacttgtcgcgcaacatgcgcatccgggccatgccgatgcctttgacggcgagattgtcggattcagtgccacccgaagtgaagatcacatcatccggacgtgcccccaaatcggcggccagcgaggcgcgggccgcgtcgagcgcacgcgccgcggttttgcccggctgatgcacgctcagcggattcgcgtatgcctcggtgaggaacggcatcatcgcttcaattacatcgcgtgacaccggttcggtggacgccgcgtccaaatacagttcgtcccctgctccgttcccgctcatcgcacccaatccaatcccaagtcgatgctgcgcacgctgtgcgtcaacgcgcccacggagatcacgtccacgcccgtggacgccacttcgggtacgcgttccaccgtcatggtgccgctggcttccacaatcgcacggccatcgatcatatccacgccggcgcgcgtatcctccagcgtgaaattgtcgagcatgatggtgtctgcgccgccgtcgagcgccgccggaatctgttcgagccggtcgacttccacctcgatatgcgtggtatgccccacctgttcgcggatatgcctgatcgcgccggccatgtcgatgccttgttcggcaagcgcggccaagtggttgtccttgaccatcaccgcgtcggacagcccgtacctgtggttgtgcccaccgccgcagacgaccgcgtatttctcgaacggacgcagtccgggcgtggttttgcgcgtgtcgacgatgcgcgtggcggcgtaggtgcgcgggacgcgatacccgggcagggttctcgcctgatcggccgcggccacgaacgtgtcggtcatggtggcgatgccgcacatgcgctgggtgaagttcaatgccacgcgttccgcggtgagcaggtcacgcaccgggccgctcacggtggcgagcatccgccccggttcgaaacgctcaccatcggcgattgccggcgtgaccacgatttcgggattctgcatcttgaatgccgcggcaaacacgtcgacgccgctcatcacgccacgctcgcgggcgacgagacgcacctctccccatgcctgcagcggaatcgtagtggcgcaggtgatgtcgccgttgggcgcatcctcttcaagggcggcctccacggccttgcggatgacctgacgggtcagcatgacgttcctttcagacggtaggcgatggaatgcgcgatggtcggattgaccgtcgcatagtcggtgcgggtgtgcgcgccacgcgattcgcaacggttcagcgcggcgacggcctcgacgtatccgacggtgagcagattacggttctccagcacggcgatgcaatcggcatacgaaccagcacctgacatgccgggtaccgcggcgttcgctccggcgagcgcgtcggcaagatccgtcaccgcagcggcaagcccgtcatggtcgcgcagcacaccgacatgcttccacatctcgtcctcgatgtgcttgcggtcccatacacccgtgttcgcgttgccatcatcatggctgggcatgtccagcaccatcggctcttgggcgaccggcaggcttgcaatcgcactgttgttaagagtttgcggctgccatacggcatcgtccgtatcacgcaccgcggcgagtcccgcgcggtatccgtaaacgagtccttcaagcagtgagttggaggcgagacggttcgcaccttgcacgccggttcgcgcacattcgcccgcggcatacaggccggggatgctggaccgtccgaacaggtcggtgcggatgccgcccatccagtaatgcgcggctggggcgaccggaatcggctccttgctccagtcgaagccgagggagcgcgtgtatgcgtcgatggtcgggaaccggtgacgtaggaacgccgccaaatcagggttctctttggccatgggtgaaacgtcaagcatgaccggcttgccgccctgcgcctgcatggtgcggaagttggcacgtgccaccacgtcgcgcggtgcgagttcggccttgtggtccacgtcggtcatgaaccggtgcccatgctcgtcgagcagtatcgcgccttctcctcggacggcttcggagacgaggaagtgttcgccaatagccatggccgtggggtggaactgatagaactcaagatcggcgacctgcgctccggcacgcagtgcggcggccagtccatcgccggtggccacggcgggattggtggtgtacgggtagagtcggcccgcaccgcccgtggcgaggatcacgcgcgtcgcgtcgattgtgcgggattcggcttcgccgtccacgccccgcacgatgagccgcacgccggagacatgcccgtcgcgcacaatcagatcgttcaggaacgcgtgctcaagcacgtggatgcgccgattctcacgaaccatggcgctcacatcgagttcgagcaccttgccggtggcgtcccctccggcgtgcaccacgcgggaacggcagtgcgcggcttcgagcccgcgcagcaccgaaccgtcctcgccgcgatccacatgccatccggcggcgatgagttcgcgcacgcggcgcgccccctcatcggtgagcacgtccactgcggtgcggtcgcataggccatgccctgcggccatggtgtccccggcatgcagctgcgggttgtcgtcgctgaagatggcacatgccacgccaccttgggcatggtaggtgttggactccacgaattcatccttgcagacgagcagcacgtcatccgaggagttgttcccggcgatgttcgcgttcccgtatgtggtgaggccttccgcgcctacgcgcttgtcccccgcggccgcgagcgccgcggacagtccggcgatgccggcgccgatcacgacgatcacgggtgcacctccagcatgcgctgcagggcgattttggcgtcgcgggctgtggcgtcgtccacggtgatgcggttgacgatattgccttgttcgatgttttccaacgcccaggcgaggtatgccgggtggatgcggtacatggtggagcacgggcagaccacggggtcgaggcagaacacggtcttgtcggggtattgcgcggcgagacggttcacgaggttgatttcagtgccgacagccacggcggatccggacggggcgttggcgatttccttgacgatgtaggcggtggaaccggtgccgtccgccgcatcgaccacgtccatcgcacattcggggtgcacgatgaccttcacgccggggtatgccttgcgggcccgttcgatttgttcgacggtgaaacgctgatgcacggagcagaaccccttccacaggatcatcttggcattggcgtacacggacgggtcttcggcgccgccggcgggtttgaacggatcccatagtggcatttcttccagcgggatgcccatggcgcgggcggtgttgcggcccaaatgctgatcggggaagaacaggacgcgcttgccgcgggcgaatgcccattcgagtacggcgtgcgcgttggatgaggtgcatacgatgccgccgttgcgtccgcagaacgccttcagcgcggcggacgagttcatgtaggtaacgggcacgatctgctggcgaccatctgaaccgggctgggtgccgcagatttcgccgagctgctgccagcattcctcgacctggtcgatgttggccatgtcggccatggagcagccggcggagagattcggcagggtcacggtctgttcgggcgtggagagaatgtcggcggtttcggccatgaaatgcacgccgcagaagacgatatggtcggcgtcgggacgttcggtggcgttcttggcgagttggaaggagtcgcccacgaagttggcatggcagatgatttcatcgcgctggtagaagtggccgaggatcagcagtttcttgccaaggcgggatttggctgcgcggatgcgttcctgcagttcctcgtcggaggcgttacggtattcctccgggagcacctgctgtctgggggcgttgctcggcagcgggtcgaacatggatgcgccgggtccgtagctcggcttggtggtgtcgaaatgccatggatcctgggtaagtccggcgtcgcaggtgctttgtgcgccgagcttggcgatgatttcgtcgacggacggcgaggagagtgttgcagtcatgctgcgttcctttcatatggtgtgttcacgatgatgccgacatggcgctgtgatgtgccgatgccgaaagatttccgatgtggctcgccgtgccctgtcacgacggcatgagcgcggatagcgcgtcgtcggcaagggtttccggtttgccgtgttccaccgttgtgggaaacgtgaattcggcgcgtggctcgccgtcatgccggtaccggtatatggccgctgggcggctgcgccccacgtggagtttcctgccagtatcttccaaatgtccggatgcgagcatttttctgcggaagttcgccaggtcgatcggctggccggtgacagcctcgtatacgtcgtgcagctggctgagggtaaattcctcgccgacgagtttggtggcgatgtcggggtattcgaatttgctgcgcgagcgccacagggcgtagtcgatgatgcgtcgatggtcgaaggcgagatccggcagatcgtcgaccgggaaccatttgacgttgtccttttcggcgaaatccttggtttcggcttcgccgacgagcgcccaatacacgatggagaccatgggaagcccaccgctcgaccgtgaggggtcgccgaacgtgtacagctgttcgagatatttcggatgcagttcggtggtggattccagagccttgaacgctgattcctccagggaatgtcctacacgcaggtcaccgcccggtaacgcccaggaacccatgaagggttgtctgacgcggcggaccagcggcagccatagacggctgcttccgttggccgcgctgtcgccatgcgggccgagcgcgagaatcaccacggagatgccgatgctcggttgcgccaaacgcctttccgagacatttccgatgcccatggccgttcctttcacggcagggtatttccctgctatgagacatagcgtaacaccatttatagtcaagccgaccataaatggtgtcatcatggaatcatcgacttcccgcagccggcccaccgggcatcaacacctcttggcatacccgaacaactggctttgcagaacgaacgcacccgccatcacggcagccgtcgccattgcctgtttacgccgttccgaggcattccccatgatccttgcgacttcactccttcaaattcccgtcaatacgaattgtttcgaaatcacaacgtatcacttatagtcaatatgactataagttgggtgttccaccaatcaatcatcacaattcagcacacatccagccaacgaaaaaggccccgcaagggagccttgaacatctatgcgataacgccttggaaaatcagctcccgggcaacctcacggtattccttcgccgtcttgtgattcggcgcatagatggtgatcggcgcagcagcgaccgttgaatccggcaacttgatggatcgcgagatcaccgagtggaagaccttgccttgaaacgcctcataaatgcgctgcaacacctcatcgcaatgcagagtatgcgtgaacatggtgacgagcactccatacacttccagactcggattgatacgggactgcaccttttctatggattgcatcagcaaagccacgccacgcaacgcaaagaactcggcagccacagggatgatcacgccatccgccgcggtcagcgcattcaccgtaagcaagcccaacgaaggctggcagtcaatgatgatcacgtcatattcatccttgacctgtcgcagcacgccagccagcacctgttcacgtccaacttcggtgaccagctgcacctcggcggccgatagatcgatattggccggcatgatgtcgaggttctcgaaatcggtatgttgaatcacggtatgtacatccatgcgcggattgaacagcgccgtgtacaccgtatcttccacggcattggcgttgatgcccagtcccaccgtggaagcaccctgcgggtcgaaatcgacgataagcacacgacgaccgtactggctcaacgcaccggcgatattgatggaactggtggtcttgccaacgccacctttctggttgcacatggcgatgaccctcgccggaccgtgcgtctgcagcggttccggagcgggaaacgtctcataatctcgtccaagcaaatccgtaggcataccgtttaccttaccaacatccttgtgtcaactttcactgtaatccatgctagtccattgccgccgttc

SEQ ID NO: 450 - DNA, 13845 bp, Unknown
  R48_24m  MAG No. k141_20920
aaaaattaccgaacgtgattggcgatgggatgataggttctccggtgaaattcgctggtgaacaactcggcaaggaggtgtgcgatgtgatgctgcatcattcgggagcataggctgtggccatgcgacgcccggcatcatagagtttgcgcttgagcgaatcgggctcaagaatcactacgcggccatcccaggaatactgcaatgcccaccagaacacggcgcgttcgggagcatcgacgatgacttcgaactgtgtgccgtccggcgaatgtttgatctgagggtcgtcgaaccattcgaacacattgttgagcatggattcgtctcgtacggccatgcggatgcgaatcggggcatcggctacgggatacgggcggtgacgcatgaagttcactgcgtcaaaatcagccggcgctggtttttccagtggaactgtgccgttcctgcctttggcgctgacgttggcgattcggttgaccacgaaaatgcggagattatcctcgccatgtagatggcagatgaggtaataccgtccgttcttgtacaccatctggtaagggtcggcggtgtaggtaattcgacctgcgcccgtacggcttttatgcggtatcagggtgccgtccgggccgtaatcacggtattggaaggttacgccgtggccttcttcaatggcctgattcagttggtcgatggtggataggaactcgccgttgatatgcgtgtaggtggccacgtgctcaaggtaacctactgcttgcccagcggcacctgcgagttcgcggattttaccgatgagatcgtccatggtgtcgaggctgatgcgagacaaggtgaggctgtcgagtagcagtcgcatttcggcggtggataggaatgcgtcaagataccagccgggttgtggattcttgcattcgatgccggcaaggtcgctttcggtgagatgcccgatatgtctgccgagaaattccgtggcggtaagctttttgagctgatttcgtatggttttctcggtcggcagctcgcttggatcttccagctggtgtttacgggcaagttcatcgagtatttgccgcacggtcaggccatgtccaaagtagctgtgacgccacagcacctcgaagatttcgagggtggtgttccctgcataggatttgcgttgcgccggcttgtctgcatccatacattaaggctaccgcgcgcctcgtctaggatagaagtgttggactgaaatgcattcgctggaaaggaggctcgcccatgagcaaagggtatggtgtatttggccatgttcccgataatgcggatgacgatgacctcctgccttatgaggatgatgattccggcgtttcctggggccatgcgttgcgccgtcgcaatccttggaaaaggggaggcgacgaaggtgccgattacgacgatgatcggtatggcgcagatgacacagatgacactaatgaggacaggggtctctttgccggcaagagcagcggtataggcggtatctctggcgaggcagatggaatgcttggtggcgcaggcgctgccggcagtagagccgtaacgtttggtggaacggacagtttgtccgccgccgatgcggtgatgccctatcgtttcaggcaaggacgttccgtatggttcgacgatgaggacgaaggccatttcgccgggtctgcgaagcgtgccgaagcccatgccgtccctatccttgcgttacgcaacgatgtggaatcgtcatcgtcgaataccgtgctcgctcgtgcccgtagcattgcgcgcaaagcggccaccatggttatcaatccggtatacagcgaaaatcatcgaaccgggtatgccgagcttgacggtattctacgtggcaccaccagcccatcgagtaggtatcgtaccagcgtgcaattcgacctcgatacgggagaagccgtcggtggcaagtgctcatgcccggcttacggccgtggctatggcatgtgcaagcacatgattgcgctcgccttcatattctgcgatgatccgcagcgttttgaagggtaccgtgccggggctgtgaggccgtctcggacgctgatcgactatatggagcacgtcgataggcaagatgctcaagccaaagcgcgtcgccgcaatgcgctcatgcgccgattcgatactgcaaaaagacgaaatggcgcaggtggacgacgtacgaatagcggatacggctctcgtgccggcacccgaggcggcgggtatcagggcgatagtgagactgtgggcttggggcaggtgcagcttgttccgatattgagtttcatcgatggcgtgtggagcgtggagttcaagatcggatcgacttccaatgggtccagctatgtactgaaatcgattccgcaatttgtgcttaccatggcgaacggcgactatacggattatgggcagaagcttgcctttacccatacgccggatatgttcgacgatgattcgcgcccactgctgggcttccttgacgacgcgatggccgtgcgtcgtgcggccgagcagcaggaccggtattacgggcatatcgccatcgatcgtcacctgacactttcagcaccggaagtggcccggttgctgtccgtacgtgagggcagaggcgtacagctcgtgttgaacacatggttctccgggcagcctgcatcggtgccggttgatggtggcgagccagattttcttatgcgcattgcgcggcgtgatttcaatacgtatggtccggatgccggatacctgcttgccggagtgccggcggtggaaaccgtgattgatggtggcaaggatgtatggctgttgctcgcctccactaatccggccggtgcggtatccgccatgatggcgggctctcagcgtaaaagcgcagcgggatgccgattcgtccgttgcccgaaacgattgattccgttgcgaggactattgggagacctgtttgaacccgatggcgaggggcaggtcattgccggtgatgacatcgccctgttcgcacgcacgctattgcctcagctggttggtgccggactgttggaggccagtgagattcctcgcgagctggctgaattaagtcctacggaatgcagcctccagttttatctggatcgtgatgagcatggtgtgcaatgcgaggtcaaggcacactacggcgatgccattgtcccgttgctacccgatggcccgacggtgcatgctagggatgagcgttccgtccccttgtctcggggcgtgattgggcgtgatttcgacgctgagcatcttgcgattgatgtagtgcgtgaattctttaccatgcctgaccagcgcaagcgcgttgcggccgccactcatcagacggtgaatgggttccgaacgccggccgcgcgaaagaccgccaaacaattcgtgtctgatgcggccactatcgatcgcgatgacaccacgcagattgttcgtctttttgacgagggattgcccgcactgaaggaagtaggggaggtcttcaccacaccggcttttgaccggctgatcgcgcccaagccgccaagcgtcaaagtcggattgtccatcaaaggcaatttggtggagatatcacccctcgctgatgaagtaccgccggacgaagtgggtgccttgctgtcttcgtatcgtcggcgtcaacgattccatcatttgaaggacggcacgctggtcaaactcagcggcgcgaatctcagcacgttggaccgattggccagcgaccttgatctgagcgagcagcagctcaactccgggctgatcgagttgccgggcggtcgagcattcctactggatggtgagttgccggatgacggctccgatgtagtcaaggacgcttcgttcaccgaatacatcgacgatctcaagatcatcgaccctaagtcgtatgaagtgccggatagtctcaagcatattctgcgcccttatcaggtcgaaggcttccaatggctgaacacgttgtgcgacaagggttttggcggcattttggccgacgagatgggtttgggcaaatccgtgcagcttatcgccctgttgctgtcgcgataccacaacgaatctagtggcatgccgaccgctcaaggcatggatgccggtaatgctgttaatagtgaatcagccgtaaccggtcatattactttcgattccgaagatggcgggccgcatccatcattgatcgtgtgcccggcgtccttggtgtacaactggggtgccgaattcgccaagttcgccccgagcttcaacgccgtggtggtggccggtaccaaagccgagcgccgcaccgccatcggccgcgcgttccgggcggatgaccccaccgtgctcatcacctcatacgacctgctgcgccgggatgtcgatgattacaccgccaatgagcaacgtttcaatgtcatggcgctggatgaagcccagtacatcaagaatcacaccacgaagatagccaaagcggtcaaggccgtggccgccgaccatcgtttcgccttgaccggcacgccgatcgagaaccgactctccgaactgtggagcatcttcgacttcctgatgccgggactattgggctcatacaagcgattccatgagcgctacgagttgcccatctccaacgcccgggctgcagatggcagcacggccgaaggtcgggccgccgcacaggtcaatcctgaggccgcccgggtgtctcgccaattgcagtcgttggtgggcgtgttcatcaagcgcaggttgaagtcccaagtgctgaccgatttgccggacaagttggagaccacgctgaccgtgcagcttgccggcgaacagcgcaaactgtatgcggcccacgagcagcggctcagaatgcagctcgaacacagcgaagaagccgatttcaacacgtcgaagattcgcatcctcgccgagctgaccaagttgcgccagatctgctgtgatccaaggctgctgtatgccgatgccaaggatcagtcggccaagcttgccgccatcaccgaactggtggaaacctgcgtgaatgaaggcaagaaggcgctgatcttctcccagttcaccagcttccttgatctgatcgccgaacgtttcgacgcgcaaggactacgctactacaccatcaccggatccacgcctaaaaagaagcgtctcgaactcgtcgaccagttcaatgcggacgatacgcccgccttcctgatttcattgaaggccggcaacaccggactgaacctgaccggtgccagcgtggtcatccacgccgatccatggtggaacgctgccgcgcaggatcaggccaccgaccgagcacatcgtatcggccagaccgaagacgtcaacgtgtatcaggtggtggccaaggacaccatcgaagaacgcatcttggagcttcagcataccaagagcgagctcgcccgccagttcaccgatgcttccttgcttgccgacgaagctggcaccggtgccagcgccctcaccgaagcccccgcctccatcgccaccctcaccaaggacgatctcctcaatctgctgggatgagaaggtcctgctcggtgctcttgagcttggtgatggaaacagtctgggctttgtggacccgttcgctaagccgagaccggagtcgatagcggtgtggcatggtgcgtgcgtggggagcgtgattcagttgttggctgaggcgattcggacgctgtcgttttgtgctttgttttgccgttgaccaattgaaatgctcgttggtaggagacccccaataaagctccgatttgtcgatacgtgagtccctcgttgcgtagggcccgtgcggcgagtcgggattcggcagccgcttgtgcgttggctttttttgctatttcgcgctgccggaacatttctgttacgtgttgtttggcttgtttcggcaacacaaacgtcaccttgagctccggattgtcgtcgtcgttcatgacagtgatgagatctttagccattggctcgatatcgtcaagtcctttggcctgggtcgaccgttcgatagctggtacctgaacgtaccaatatcggccatcgggttgcacaagcacgtcatagttgctcattgccaccacccctttccgagtttctgctcgctctcgttgatgatatccagcgtggttcgttctgagacttcattatggcgggggatgggtatcccaacccgtccaggcagtaaacctcatgtctgctgccttgccgtaacaaatagaaatcgagccctcgctgctttgccgcttgccgaagtttcttgatgatgagttttcttcgtgtcatcataactctcaatctcgcactagacaaaatgcgtatgccgaattgccgggtgggagttgtgggtaaacgtagagatgttcattggtccttctttctgttgtctgacgcgtcgttgcgtgcgggtgcatctgacggtatgggatgaggtttctgattggcgagctgaacgggggtatgtggttctagcttccgagttatccacattgataaagtgcttttttaaagtgactttcccgtgttggtcgtggatgctgcgagcaaggcaagaacggtcgatcgcgtcgcggtgtgtgtgggtgaatggtgaaagtgattttcgatatctttatattgatattcgatatattatgatggtgacatacggggcagtgcaggttcatccattgatattggattaaggagcatagccatgaacgctggtatcgcattcatctctcgcaaatctcgcaaagcagacgtcgcttggcgctatgccattgcacttggtcggtggcaggggagtcggcgttatgttcgacgtcagtgccgtcattggcagatggcgcaaccgccacgaacacaggggtctgatcgttggccagaatcgccttcaattcctcgtccgtgtatttcttgacaccgcctttgaacagatccggtcggccggcatgatgcacttcgagcacctgccgcagcagttcgtcgatttggggaatatcggccgccgtggccctacgaatcatcatgtcatccatttgattcagtctaatcgtgcagtctcgaccggcagatgatcattgcccgcgataagagacacggacgggcaagatgggtgattgttcgttcaggctttcatcctcgccgcaacgtcacggtagtctggagtgcgtgaatcgcaagaaacagccagtggagaagtatgagcggggcacccgttcgtacacgatgtcgcatattcgtggcaaagacaccaaaatcgaggtgctggtacgcagctatctgtttcgcaagggtttgcgattccgcaagaacgacaagcgttaccccggccacccggatgtagtactgccgaaataccacaccatcgtgttcatcaacggctgtttctggcacatgcatgaaggctgttccaaacattcgatgccgaaatcgaatgtggaattctggcagacgaagctactgcgcaatcacaatcgagacatcgcgcagcgggctgaactggaggccgccggctggcgtgtaattaccgtatgggagtgcgaattaacgaaagccgtgcgtgacgaacgcctcgcacggctgtatgagcagattgttgaaggagatgcagattcagcggaataatttcagctcccctctggaggggagctgaaatcagacctcaaacgggaacttcaggccccaacggtcgcgaatcgcatccatcagctccatgatgcggatggtgtcggcgtgcggcatcgcctcgcattcgatcttgccatccagcagcgcgttggctgcatcggccacctcatactcataaccggtcaactgcgacggcaccgcaacactgcgcacgggcttgtgatcgttgttgtagatatcgatggactcgggattgttgatattggtgaccaccaaatacccttcggtgccccacacgtagccgccgcgatcggaggaaaccagcatcgaactggtggacacggccatcgtgccatcatcgtaatacaacgtggtggaattctgtgcatccacaccggtttcggcggccatcatcgacgtatcgaaatgatccagcgtgcggccatggtcggcaccgatcgccatatccaggaagttcagcggatacacgcccacatcgagcagcgcgccaccggcacaggccggatcggtcatacgtgccttgccggacaccggatagcacaggttggcgctcgccgctttcacctcgccgatctcgccggactcgataacttcgttgatgagcttgcggctgggcatgtagcgcgtccagatggcctccgtgcacagcatgccggtttcctcggccacggccagcgcctcacgtgcctgcccggcgttcgcggtgaacgacttctccaccagcacgttcttgccggctttcatacacaggatcgcctgttcggcgtgcagactgtgcggggtggcgatatacaccagatccacatccgggtccgccgtcaactcctcatacgatccataagccttgtcaaaatgccattggtcggcaaaagcctgcgcgcgcgtaatatcacgggccgctaccgcatacgggtgaatccatgaggaatacagtgaaccttcagccatctgggtcagggtgtcggccatggtgtgagctatgcggcccgcacccagaatcgcgacgttgatcttttcgccgctggcctcgaactcggcgcgtttgccattgaatcgactcattattcctccttgaatacgggttggtacactcaatcgacctacagtgattatagaagaagaaaccttgtcccgtgaggcggatagaaccgaaatatggaaaacgaagcagcgcagcagccccaatctccggccgcgtctccagtcatgtcccgccgagcgcgtgaggccaatcccttccgtgccatggtattcggcgaacaagcagacaagatgatcgcccaaggtatcagcgtcatcaaattaagccttggcgagcccgatttcggcgcgccgcccgccgtacgcgacgccatgcgcgaacagtacgacggccgggccctgccgtacaccgccgccatgggcctacctgaactgcgccaagccatcgccgacttctaccgcgagcgtcatgaccttgacatcgaccccaagcgtatctgcgtgaccgccggcggttcggccgccctgctgttggccaccgcgctgaccgtggaccccggtgacgatgtgattgtggccgacccctcctacccgtgcaaccgcgaacttgtgcgctcctttgaggggcgggtcatcgacgttccgacctcggccgccacccgcttccacctgaccgccgacctgtgcagccagtactggacaagcaagaccaaggccgtaatgatcacgtcgccgtccaaccccaccggcaccaccatcgacttcaacgtattggacgaggtgtgcaagctggccgccagccgcggcgcatggcgcatcgtggacgaaacctaccttgatttggccgaccgtgagccggacggcaccgaagtcaagtccgtactggcctgcgatcccggtgccatcgtgtgcaacagcttctccaagttcttcggcatgaccggctggcgtctcggctgggctattctgcccgacgaccccaccgtgctggaagcggtcgacgacctggccaccaactactacctgtgcgcccacacgcccacccagcatgcggcgctcgcctgttttacgccggagagtttggccgaatgtgaagctcgtcgtcaggaattgcttgcccgtcgtcgcattgtgattgacgggctcaagcgcatcggtttgccggttgaggtggagccgaatggcgcgttctacgcctacttcaacatttcccgtactggtctggatgcctggacgttctgcgaacgcgcgctggatgaagcccatgtggctctgactcctggccgcgacttcggtgcggccacagcggatacgcatgtgcgcctgagctatgccgcctcacgtgaggccctgaccgaggggctggaacgtctcggaacgttcgtcgaatcgttgtgaacggcgcggcatccggtgtgattgttgtacggtagtcgagtttgtgtgatgttcggctggcctcgcggtgttggttgccggccgaacgactcgccatggtggcgcacggctggctgattgcgatggtcggcccgttgttcggccatcacgggttgggtaaggtcaggaatagggatcatggtcaatctgcgttcgcgcaccacgcgacttggtgtgcttgatatcggttcgaacactatccacatgcttatcgtcgacgccgctcccggcgctcgccctgaccccgaggccagcaccaaatccacagtgcgcctgatgaagtatttaaaggatgacggctcaatcaagaagtccggcatcgaggcgattctggaagccgtgcccagtgtatgcggctggccgaggaatacgaaatcacccaaccgccacggtagccaacaacgccgcatgatcggagccctcgactttgaccaccttgcattgcccggccttcatgccctgatcaagcaccacgtggtcaataccggcgaacatcggcatatacacgcggttcgtaggccacgaaaacgtaaacccatgtccggattcacgtgcggcatccacgaaccggtcgccaagaaaatcacggaatggcgtgtgatcgtaagtggcattgaaatcgcccatgaaaatataccgtgtatccgtatgcccgcgcatcggacccaactcatccagcgatcgcttccactgccgccaatagccgggtacgggagcggtggtgtgcacggatacgaatcgaatctgctgaccgcccatatccaccgtgccgccgggcatgaatgaggcgctggaattcacgtcatcgtcggccggatcggcaagtggcgtggccgaccagaggccgttaccgaatacgccgtcagacgatgagacctgcgcatacggcagatagtgctcaatgccagcctcgttgagttttttgacgaaatcctcggtggtctcctgcaaagcgagcacttcgacgcgctgatcgcggactagttcgacgatggcttgtgggtcggcctgccccttgtatacattgaaggtcatgacgcgcgcgtaggcatcgctggtgttgggggaggccgcagccacggcgttctgcgcggcttgggggagtgggtcggtcgagtagaagaacggatattgccaatagccattgcatgcgattgcggcgatggcgattagtgcggcaaggatacgccgcgacacgatggccaacagtagggcaatcaggccaagcaacgtgaaccagggcgttgccgataccacaatcggcacaaatggcagttcctgtaaatcggcaggcagcgcgcgggcggcagtgccggcaagggcaagaagcgcgaacatcgtggcgagaaaaccaagcagacgatgccgtttgtgtggcttcacggcagacttggatactgggcgtgccgtggctttggcagagcgtggcttggcagcggcgcgagctcgtacgcttgcacctgtggtagtacttcgtgcctttgccatgctgccctttcctccggcttgtttactgttaccttgcttttcgtgcgatttgccactgtaccgtgtgcggcttgtctttcggtgtcttttcgccatgcgcaagagcagttcgcaccaaaccggcacgaaaaccggccatgccttggtgccgggttctgccaggtggcttgcatagactgccatgcggcttacgcaggctgccacgcgaacatgatgcgactgggcgtgtggccgtgtacaataaaacgtcgttgcccgagtagctcagtggatagagcaccgctctcctaaagcgggtgtcgtcggttcgaatccgatctcgggcacttggcttcggaaacatgacggtatctcagcctctattcatcggtgatgagccataggcattaggcatgtgtaaacgtataggttccaccatccatcatcccgtcatgtgaaactatgcaaagacatgtggggcttcacggttatcgtgagggtccatggctatcgaatacacggaagagaagcggtttactgtcgaacaggttgaggcgctgttcaagtcggttggttgggaatcggcgcagtggcccgaacggttgttcaaggcattgcagcattcggatacggtaatcagcgcatgggatggcggctatttggtcggcttggttcgcgtgctcgacgatacgggagggggcgaaagtggcggagtgtgctgatcgggggcaacgtacgtagtcattgacggttatcccgtagtaatgttcacgatacgaccccttgtccatacagtgaaaataacggctggcgtccgacgttgctgcgctatgactagagaccatgagtgaagacaaacagtatgacttctatgtggccggtccgttctttgatcctgaacaaacgtcaagtatggaacgtttggaaaagatattggaagaccatggcaaggtactgttcaagccgcggtttgtcagccagatcgaagaagtaggccctgaaggatgctttgcggacgatatccatggcattaatgctgctaaagccgtggtcgccaatcttatggacgaggacccgggcacgatgttcgaaatcggatatgcgcatgcgctgggaatcccggtgtacggctatttcgaaaaccttacgccaatggatcgtgtcaatctgatgattgcgcaagcggtcgaactggtgttcgtcggtcctgatgatgtggcgaaatacttggaaaccggcgaacatacggaagtcgattacattcagttctaagcagctctaacaggttctcagcaaacaggggtggcggcgttctcgtacatagtcatgtacgggaacgccgcagtggtatagggatattccaacaagcggcataatggagtcgtgggaaaaccagtcggatacaagtgaagtgtctgaatttcgtaaggagtgccgttatgagtaaccacaatcccatgaatattgccaccgactttgccaaggccacgggaggaaccgctcgcaaagttgttgctttgaccgataaaggtccgttgaatggctttaagaaattcctgtcgcgcggatcgatgattgatatggcggtaggtgtggtgatgggctctgccgttaccgctgtggtcaattccatcgtcgacaatctcatcagtccattaatcggcatgattggcggcgtaccggatctttccggactgctgaccatcacgttcaacaactcgactgtttcatttggtgcgattcttaacgcgctgattagcttcctgcttgttggcgtggcggtgtatttttgtgtgattttgccgattaataagcttcgtgatctcactgctgcccaggatgaggctgacgctgaagaacaggggcctagcgttgaagagcagactctcgccacgctgcaggagattcgcgacgagctgaaaaaggccaatgactccgccgagtaatctgctgaatgtacggtgcgacagatttacctggtttgcccgaaataacggattgccggggccatttggtctggacaatccgttgtttcgcgcgtgttttgtagcatccgtggagttacatggggagtatgactgaaaacatcgctgataaggccataaacgatactcgtatcgtcaagcagttcaccaatcccgtcaaggagccgattgacagcgacatcaacctgttcgatttgctcgatgagcgagccaagcgcgatcccgatggcgccatgatcgaatataaaactgaggatggcacctggcagccgtacagcgcccaggtcttccgcgacatggtcatcgatctggccaaaggcctgattggtctgggcgtcaacaagggcgactccgt

SEQ ID NO: 451 - DNA, 45663 bp, Unknown
  R48_24m  MAG No. k141_21276
ccgacctcgcccttgagcgagacgatggcctgctgctgctgggattcgatcgagcgctgtgcggatgcggtgatttgagccgcatcggactcggcgcgggaacgagcgtcggcgatgatgtgggacgcttctgcgcgggcgtcgtcgcgaatcttggcggcgtccacacgggcggtgctcagctgggcctcatacttggccttggcctcgtcggcgtccttcttagcctgctccgccttggcgatgttgccttcaatcttggcggcgcgctcgtcgaagatcgcattgaacttcggcatgaagaacttgtagaagaacaccgcaacgatgacaagaatgatcagggaccacacaatgtcataggtctcgggaatgaacagatcaattccgccttctgcgagcgtcattatgaagtcctcctttcactggtggattcgttttgccttctgtattcgactgagaaaacgttcgatcagtggaacatcagggcggtaacgaagccgatcagtgccagcacctcgatcagagccaggccgatgaacatgatggtctgaatcttgccggacatctcaggctgacgagcggtggattccatggccttgccgaagaggatgcccagaccgatgccagggccaaccgcaccgagaccgtaaccgatgacggacaggttgccggcgaccgctgcgagggtgatgatatccattgtgtttcctttctaacgtacttggcgacgttataaatcttatttcgttcggtcctgcctacctaggcgaggccgggttccgaaagagggggttgaacctcactcctccgggaagcttaggttgatgtacacggtggaaagaatggcgaagacgtaagcctgcaggaaggcgacgaacgcctcgaagcacgtcatggcaagaccgctgacgaaccacatcgcgccgactgggatgccttgcagcttgttggctgcatcgacgatccagtactgtgcgaatgccaggcaggtggcgaccatcaggtggccggaaatcatgttggcgaacagacggatggtcagggaggccggacggatgaccagcaactcaaggatgttaatcggggtcaacaggatgtagaccggccacggcacaccgggggtgaacagctcgtgacgcagataatggccaagaccttgcgaacgtgcggcggcgatccaatactggaccatggtccagatggcgaacaccagcggcatgaccacagtggcggtggccgccatgttcatacccgggatgatgccacacaggttgaagatgaaaatcgtgaagaagatggtggtgatcatcggcacgtagcgcttgccgcgaacctcgcccatcacgtcatagacgaccttgtcacgcacgaagtcaagaccgtattccaccacgccctgccaacggccggggatgagcttggcgcgctttgcggtcacgccgagcaccaccaacagcacgatggttgccacgatacgaatcaaaataatgcggttgatagcaaacggagttccctggaacagaatctccgggggaaggaagtcaccaaccgagggcagatgagcgcctgcctcgtcagccaacagcaatcctgcgccgagcgaaccgaccatatcacgcctcctgcttcttcaatgtcaggtgtcagtttaaacccaccgggcaggcaaatgtgacgtgctcgttactttcgtctcctcggtgtggagtctgccgggcgcggacacggagtctgcgctgggcattcggctccgaatgactgaagagtgattatttgcctgcgtctagacaatgtcaatactacaccggcgcgtcttctggaatcggcggcggcgcaaggtttttcggatgttgcgcaagcgttgtgcgctattagtcataatacgaggatgtgcggcatttgcgctaccctctgatcactccgtatccgtcgtgggcgaacggcttgaaatcatcctggcgcggcccgcccggctcatgccgaatcgaacgatcagtaccgagcttcttctcagccctgagctgcggcacctcggtcaggtcgtacggcgtggtctggtacacccagttgagccagttgcgccacagcagattggcgtgggcacgccagacgaacaacggttccagcttcggatcgtcatgcgggaagtagttcttcgggaagggcacgttggtcatgcccttggccatatcgcgctcgtattcctcggcgagcgtgtacttgccgtactcccaatggccgagcgcgaacacttcggagaagtcacgtgtggcgattaggcccgggccggactgcggcccccaagtcaagatctgaaggtcatggttggcacgtacctcgttttcgttcacgccggcgaggcgggagtgcggctgcagatcaatctcgtcgaagccattggtcaggaagcagtattcgtcctgcaggtactgcgggaatacgccgaaaatcttctcggggtaatccaccttgtggatgccgtagcggtagtacagtgcgcccatcgcaccccagcacaggtacatggtggagaacacatgggtggaggcccagtcgagaatcgtcttgaactcgtcccagtagtccacatcttcgaacggcatatgttctacaggcgcgccggtgaccacaaaaccgtcgtaatagttgtctttgaacgcatcgaggttttcgtagaacttgacgagatgatcggcggaaacgtgcgtggcctcatgcgtggaggtcttcatgaagtcgatttcgacctgcagcggcgacttggaaatcagacgcagcagctgcgtttcagtctcgattttcttaggcatcaagttcaggaccaccagtttgagcgggcggacgcgctgacgctccgcctcgggcttctccagagcgaagatgcgctccgaatcgaggatatctctggccggcaggccactggggatcttgataggcatgttcctattatgtcaatattcgggataacggttcagggcattcctataacggccatttatggcgcgttatcaccccgactccggctccgccccaaacccctcgctgcgtgagccgattcacgttttaaaaccgtgggaaaatgacacgacacgccgatgttgactttctggaatctgcacctattgtagatagagctgtctgagagacaagccgacgcggggtggagcagctcggtagctcgctgggctcataacccagaggtccatggttcaaatccatgccccgctactgcgggcgaggccgtcacgattattcgtgacggcttttcgtttatccgccgtcgtgccctacggggccgcatatccgatcggggcgatgatgtcctgtgaaaaaacaacatccaagcccgctctgggcagaatcaatcaatctatggctcgactccctcaaggcggcgggctactcccccaacacgatcggcagcgccgatgccagatgtccgcattgtcgagggcgcttaagggcgatctagggacgtggagggcgacgacctcgccctgctgatccgatccgccaacggctatctgttccccggccggtggagcggccacgcctcggtcgagaccacgcaacggtacatcgccatgcccgacgaccagctgcgcgccgccgtggaagccacgcgcctcgccgcctaggaggatcacgatgttccgtttccccgacttgattgtggtactaaattgattgtggtactaaattatggtaccataataagcatgatcgaatgcgagccgtcagccttcaagcactggttcacacagccacagatcgactacatattccggcatccggtggccgtgttcgaggtgcagtcgagacacgccggcgacagggtcatggcgatcctcggacacccggacgagttcagggaacgccccgtggagctgctggtatcccagcgcacccgcaaggtgttccacgcgatggactgccgccgcgaatggctctacaagttcgacgactaaaaaacaccaaggaggacatcatgagcaacgaaacagactgggacgagctctcggacgaatacaccgagcacacccccgccatcatcggcgagaccatccgcccgcaaagggcgatcacgatggatgacatcgacgacatcttcgccggccgccccctcgccgaccagccccgccggaaggccgacgtgctctacaaggcatacctcacgcccgacatggacgcacaggtgcgggcacaggccgaacgagagcacatcggcaagagcgctctgatccgcaaggcactggccgcatacctgaccgccaatcaggcacagcccgcgatggcctgacccatatacggcgaaaagcccccgaacctgccgcgtgatacggttcaggttcgggggcttcttgttattcggccttggatgccttggccttgagggcgctggcgccgatgacgacgccgatggtcagggcgacggcgctgatggtcgtcgcggccggatcggcccacgtccagccccatacggggccgagggtctgcacggacggtcacggtacgggacggtggggcgttgctgccggtggcgacgctgccgccgttgtaggtgacgacctgaccggggcgatatggatgaaaggcgatcaggcagctacggtgcccagggaagtcggcgatcataaacgtctcgtcgttttcatcgcggaccttcagttgtctaatccacgggaggcgacaggcgtgaagtttctcaacgaagcggaagccgggcacaagtcgtatgtcacaatcgacttcgtgcccagctcccgtccttctgctcagaagcggagtgcggttcaccatccagccgacatcatcggcatcatgccgcagcgggtcaacgtatcggccagcgcatcgtccagtgcttggatcggtcatagcaacgacgccaccgaacgacgatggacagtatggcgcctatcgccagagctgacacggccagaaccgaggcaagcgacacatcgccacccgtgacgggcagtgacgggcgagtgttgggcgtggttgcctccgccggcgccggtggcgtctcgggtttctccggttcgcacggtttctccggctcgcatgggggcaacacccgcacacgctcccaggcatcgtcataccggctggacgccggggaaacacggtcatccccctcgaaccgccaaacgaacacgtaccacccatgccgttcggcggtcagatgcatgggagcgccatgcgcgtccaacgccccggcgccgattttgaacgtgccgttcatcgcgggaatctcccaggtggccagcagtcggtggttgtcgtcttccgtgggagtctctcccccggatggcttgtacgcctcatcgttggaggggttgtcgggatcgccggaccaccatacgctcaccgtcgcatacggctgatccgccgcgaaaccataggtttcatcgcccatgaactggccgtggtccgccgggaaccccgatacggtgatggtgtcgctgagttcggcgccgatatccgccgaatgttcggtaaccgtcgacatgacttcgaccttcccgcgccccacgttgctttccgaagcctccatgaacgggctcacccagtcgccggtaaggtattcctgcgcccgtttgctttgctcgctccgccggaacacccacacccaggtgccaaagccgccggtcttcggagtcagataggcggcgtcaccgtccggcttggccatggcccgcacacgaacccgctgccccacaccggtgaaggacgccttgccataagcactcggctcataacccgaggacgccagccgggcgagaaaagcgtccgcgctctcccgtgcgttcggcgcgatgaccttgcccagatcgtccttgccgagcccgtcgaaatagtatccacgcgcctgcagcttcagaccgggcacccaatgactgccctcgtcccccacgccgctggtcacatcatcgaacaccggcgaagccgcatcaagcaccttatcggacacctgcgtggacaccgacggaacgaaatccttgcgcacctggaacgtcgacgacgaaccgccggcggaagccatcgaatcgaaggccagcatgtcctgagtgctgtccatgacgtgcatccgcccatactcgtatgtggtgttcgccgtcacctcgccggcgccggtcgcctcccacgcgatcgaggatccggcgctcgtcgacacccccgagaacgtgttgccgccttggatgaaccgcgccggcccctgcaaggtgacggtgaacggcactcccgcgatcgcgtcaccgtcgcggttcaccactttcaccgagatggaaccgctgcgcaaagcctcggcatcggtgcgttccaccgtcgtgcccgcaggcgtcttgccggccgattgatcccatatccgggccgccttcgccacgatctcgggataccggccttgaatgaccgccatctgtctcgcccactcgtcccgatcgcgcccgaagtgatcctgcacgatgatgccgatcgccgcatgggtggcggcatccgtgtcgcggtaccggtcaaggatccatgccatacgccgggcgttctcatcggaggcaagcaccgtggtggggcctatcacatagtcgctcagtttccccgcttcgatgcagtagtatttgttgcccgaagcgtccagccccgcgacaccgacgtaatattccatatcgttgtatggaaacgtcacgtgatatctttcgtcggcgggcgtcaacgtcgcggcatacgccgtattcgccgagccgaacaccactcccaccattattatcagaccggtcagcatcgctacgatggccatgccccgttgccgccatgtcgttatcatcattcgtcctttcctggtacgttccccgcatactgcactgtgtgcgggtaggccacgatcatggcagattttcattcgctacagccgatttttcggcctatgtggtccgagcttgccgtttgtcggcgagttgtggataactcttccgccgagttatccacctcatgcggttgaccgaacgtttacctgcaagttatccacaatgtgcaacatatgttcaaaagcctctagaatagggccttatggcagcagtacaacatcgcgcgaccacgcgcactagtaataccgataacaacaccacgaagacgaagtcaaagacgacttctgcccgaaagagccccgcaaccaagcgcaagagagtcagcgccgaaacggcacgcgccgcagcagcgctgaaaggcctggctgtcgaagcccccgcaccgtccatcgaagcaaacgagcccggccagttcggccgcatcaatgtcatggacatcactcccaccgaggagcgtggcatcttccccgcccgtgtggaactcggcgaaccgtttgagatgaccgcccaagtgttcatcgaaggccgtaccaaggtgggtgccaccgccatcgtgcgcaacccgcgcggcaaggaaaccatgcgccgggccatgacctgcgtaaatcccggcctcgatcgttggaccgtgatggtcaagtgcggcgaacacagcgatctgaagccttgggaggatggctacgcggccgtcaagcgtcagctcggcgaatggaccgtgaccatcgaaggttgggaagacacgtacgtctcctggctgcatgacgcccgtatcaaggtgcgtgtgatggacgacgtggacaacgcgctcaattccggcgccgagctgctggcccgttgggccgcaaccccggacgccggcctgaccgcacgcgatcgcaagaccttggagaaggccgctgagaccatggccgatcagacgctgagcgccgaggatcgcctcgccgccggcgacaaccctaccatcgccgccctgcacgagactcacccgctgcgcgatggcatctcccccagccagccccagcgtttcaaggtggaacgcccgaagtccagcttcgcggcttggtaccagttcttcccacgttccgaaggcgccaccatcgatccgaacaccggcaagatcattcagggtacgctgaagacctcgatggccggcctcgaacgcgccgctgccgaaggcttcgacatcgtctatctgccgccggtcttcccgattggcgtgaccaaccgcaagggccgcaacaacacgctggtcgccggccccgatgacccgggctcgccgttcggcatcggctccgagctgggcggccacgacaccgtggatccgctgctcggcaccatggacgatttcaaggccctgtgccagcgtgcacatgaactgggtctggaaatcgcgcttgatttcgcactgcagtgctcgcccgatcacccgtgggtcaaggcccacccgaactggttccgtcacaagccagacggctccatcgccttcgccgagaacccgccgaagaagtatcaggacatctacccgatcgacttcaacgccgacatgcccggcatcgaaaaagaagtcgaacgcatcatgaatctgtggatcgaggcgggcgtcaccatcttccgcatcgataacccgcacaccaagccggtgcgtttctggcaggacgtgattgccgccgtgaccaagaagcacccggagatcctgttcctggctgaggcattcacccgcccgggcatgatgcgtgccctgagctacgtgggcttcacccagtcccactgctacttcccgtggcgcaacaccaaggacgaactggaagagtatctgccgatcaccaatggcgacgacggctactaccagcacaacaccttctggcccaccacgccggatattctcaccgcttacgtgcgagacaacggcgtagccggccactgcgtgcgtgcggtgctggcagccatgggctcgccgtcctggggtatctacaacggttacgaactcatcgagaacaagcagcgccccggcttcgaagagcagatcgacaacgagaagtacgaggtcaaggttcgcgattggagcaaggccaagcagtacggcgtggccgagatgctcaccgcgctcaacaagattcgtcgcgcccacccggccgcgttgagctatcacaacctcaccgtgctgcctacgtccgacccgaatattctggctttcgcacgccacacgccggccgaactgaccggtaccggccaagcggacacgctgattgtggtcgtgaacctcgatggacacaacgcacaccagtcgatgattcacctggaactcggcgagctgggtctgcccaccgaccgcccgctcaacgtgcgcgacgagctgaccggccgcgaattccagtggggttgggacaactacgtgtctctggcgccttgggcggatgtggcccacatcctgtccgtgcagtgatgcggtagtgcaacggtaatgcaacagtgatgccgttgacgtgcatgggtttatcgtgtgcgtaaaccgctagaaatcctccccttgaggggaggatttcgtctgtttagacatagtgtcggcataatctcagcacggtttcttgagttccgcacctgttttgcaggcgcaaacagggtattgtggtgagacgataacgtaactgtcgattttcaaggagaaatgacatggcagaaaccttcaacgtcgttgtggaaattccgcgcggctccaagaacaagtacgaagtcgatcacgagaccggtcgcgtcttcctggaccgtaccctgttcaccgcaatgggttacccggatgactacggctacatcgacggaaccctgggcgaggacggcgatccgctggacgctctcgtgatgattccgaactccgtgttcccgggctgcgtggtcgagtgccgcgccgtgggcctgtaccacatggtcgacgaggccggcggcgacgacaaggtgctgtgcgtgcccgccgacgttcgtttcgatgacatcaaggacatcgacgacgtcaacgagtaccacaaggctgaaatcaagcacttcttcgagcagtacaaggctctggagccgggcaaggaagtcctgccgggcgactactggaccggtgctgacgccgccgagaaggaaatcatcgcggcacgcgaacgcctcgccaacgaaggcaagtgattcgattccgaatcgtcggcgggagacctctccggaggcctcccgcctttttgattcgacgtgcatcgcgtgatatagtgctggtgtatttttcagctaggcgtaggcggcgtgtaggaacgctggtcgaggcccatcgcacggtaatccggcgatgaaccttctgtcgcaccatgattccgataatcattcaaatcctgcttatttctgtttccgtagctatggatgcattcgccgtatccattggcaaaggtctggccgtatcccgcgtacgagtgcaagacgccgcgaaaagcgccctctggctcggcggattccagatgctgttccccattctcggctatttcgcggcatctacattcagcaaatacgtaacccgattcgatcattggatcatcttcgccctgttggtgttcatcggcggtaacatggttcacgaagccttcgaagaagatgaggaaaactccaaggagaccgcccagttcgattggaagcatatgcttcccctggccgtggcctgcagcatcgatgcgttcgccgtgggcgtgagcctgaccttcatgttcaccaaagcccatatggcattcgccatcctcagcatcggtgtggtcaccggactgttctccgctgcgggcctgtacattggccgcgcgttcggctcccgctggcaggagccggcgcagatcgccggcggcgtggtgctgattctacttggcgtcaaagtgctgttggagcatttgggcgttatctcgttctgatttagtgtcataagccccttcaccagaaagggctattttgtttgatttcaccgttccaatgcccgacgtaggattgggatggaaattcgattatctgagaggcgtatcatgaccgagatcacccaggagggttggaagaacaaagccctgagcatgttgttggcccaactgacgtcctatgtactgctcatcgcagccacggtcattccctcccctggcaccgtccccatcatccctttgattatcgccgctctgacgttggccgcatttgtcgtgttctggccgttccgcggcagcatgctggatcgtatcgtcactttggtgtttggcgcgatttctctgattttcgtcatcgtacctttcccgaccagcgaggttccgccggatcagaccgctgcggatggctcggtacttccttggtattcatgggcactggccatgggcctgctgctggtggtgctggtggtcttctccttcgggcgccagatggctcgtgagaagcgcgaacatcttatccgcgcactctctcacgccgtgacttcaggtgtggcggctctcgccgtggccggctggtgcttcctgcctgatttgggcgcgatgcttgccaagggcaccgttgcgggaaccgttgccctgatcatcctcatcgttttgggactggccttggccgtggcctccacgttgtgggtgcgtgacgccgatccggacccggatatccgctatccgtggatcggtaccggtctgatgccggtaatgctgatgggcgtgaccatcgccgcaaccgcactggtgctcggccgtgtcatcggttgatggacgtctgccgttccatattccgcaaacttgtaacctatgtgtccactacaagcgcgtagaataatgaaaaaccgcgcgaaagcggcataacgccgctgacgactcgtacagccacaccaagcaattgcgtaacacattgcaggataaagggggattagcgtgacggatcttacgttgatgactttcgccagcgaccccgccaccgttttgccatcactcgccctgctttctcatcgcgtccgcgtgctgccgatggatgcagccagcttggtgaagatgccggagaacaccattctgtttctggatgcacgcgatgatctggcgaccgccaaaaccttgtgccgtctcatccacgcttccggcctgtccacgccaatcgtgctggtgctgaccgaaggcggcttcaccgtggtcaactcccagtggggcattgcggatgtggtggtcgccaccgcttccccggctgaagtcgagggccgattgcgattggtctccgagcgcggcaacgctcccgcagccgcagcagccggttctcccgccgaatccaccaccacggtggaagatggccagattcgctccggcgacctcattgtggacaccaacggctataccgcctccctgcatggacgccccatcgatctggcatacaaggagttcgaactcctcaagtacttggtccagcaccccggccgcgtgttcacgcgcgcccagttgctgcaggaagtatggggctacgactactacggtggcacccgtacggtcgacgtgcatatccgtcgtctgcgcgccaagcttggcggcgaatacgaacacctcatcggcaccgtgcgcaacgtgggctaccgattcgacccgccggagacggataaggaaactgccgccgcacagcaggccgccaaagcatcctctgccgccatcggcaccgatgacgatacccccgatctcaacaccgccgcctgacagaccagcagcgctacaaaccatcaatcatcgacattacgccgcttaggtccatacgatgagagaaaccaaatccgcgcgtctcacgcgcatgcatgacgaatacgacattctgcgccaggtgattccggcacccgcttgcgcactgcatttctcgaatccgctcgaattgctgatcgccaccgtactcagcgcccagaccaccgacaagcgtgtcaacacggtcaccccggaactgttcgccacctaccccaccgcccgtgacttggcggccgcgaacccggcccaagtcgaagacatcattcatctgctggggttctaccgttcgaaaacccagcatctcatcggactggccacggcactggacgaacggttcggcggcgtggtgccgcgcacgatggatgaactgaccagcttgccgggggtcggccgcaaaaccgcgaacgtcgtgctcggcaacgcgttcgatatccccggattcccggtcgatacgcatgtgatgcgcgtaaccggacgactgcgttggcggtcggattggcggtccgcacaccctgatcccgtgaaaatcgagaaggaaatcaccgcctgttttccgcccgaagagtggacgaatctcagccaccgactgattttgttcggccgggccacctgccacgcacgtacccccgactgcgccaactgcccgctgtccgacacctgccctagctatgcgccgcccgccggcaagagcacgtccaagcgctaactcatacctcatcatggtgaattgcggattctaggctgaatccaccgctagactgaaaaccatgcagcacagcaagcggaacaatacatggtccaagtgggggatttttctcggagtcgccgtggcactcggcgcactcgtggttgcgggatggacgttcatgcaaaaccggttccagccgggatcatccctcgatgccgatgtgaccattggcatcgacgatatgccgcaatccttggatattcggtccgattcctctgcggcagccgagcgcctgctcgtcgacaatgtgtatgagacattagtgaccgtcgatcaagacaacaagattcagccgggactggcgacaagctggaagacttccgatgacggactgaccgtcaccctgacactgcaatcgggcgtcaccttctcgaacggtcatacgttggacgcctcggacgccgtgtggtcgttgcaacagaacgtgaccaacaaggtggcggacgtcgacgaattgggcgatctgacgtcggtcgccaatccgaacgccaccacggtggtcattacgcttgccaagcccaatccgacgctgctgcgagcgctgtccggcaaactcggcattgtctacgattccgagtcgtccagtgccgattatcaacgcaaggccataggttccggaccattcaccgtggccgatttccagcctggccattccctgaagctggcgcgcagcgatacctaccatggcaccaaagcggccagcaatatcgttgaatttatgcaatactccgacgccgatgcgctcagcaaggccctgaccgacggcagtctcgatatggcggcaccggtttcggcttcgacggccaccggtttgaacggcaaggatggcttgaccgtcaaggagggggccactacggataaggtgctgctggcctacaacaacggcatcgattcgctgctctccgacgaacaggcgcgtaaagccttccgctatcaaatcgacgcagccggcatcgcctccgcccaacccgacgcagccggagcattgggcggccccatcagcccgctggaacccggatacgaagatttgaccggactgtatccgcatgacgaaaaccaagctgggcagatgttctcctacttcggtgcgcaatatctgactacggtgaatctggtggttcccgaagaataccggtcgttggccgaaaccatcaagcagcagatcgagcggcagccgcgccccacggtgaaccttgaagtgctctccgatgaggattatgccaaacgaatcaaggacggcaaatgggaactgaccgtgatgagcatggacggcacggatgatgccggcatattcgccgaccccgattccatgttccattacgaccataccgaagcgcaacaggcctatgcggatgctcgcgccgccactaatgacgccgattatgaggcacgaatgaaggcgtacgcccggctgatcagcgaggatgcggccagtgattggctgtatacccgcaaatgcttcactgtggcgtccaccaaggtctccggctacccgacctcgatgatcaatcgtcgcatgccgctggccgggttgacggtgaagtaggcaaccttcagtcacggacgggctacgcccgatagtccttggctcactatcgttcgatcgttcgtatctcgcctgcgaacagcctactgggctgtttactgtacagttcggcttgtcatgcaacgtgcataaactttggctttatgactgaaggcaaatccatcatcaacgccaacctcaccccgctgcccgacaaggtcggtgtggacggacttgaggacaagtggcgcgccgtctgggatgaagacggcacctacaaattccgcaatacccgcgaccgcaaggccgtctactccatcgacaccccgccgcccaccgtctccggttcgctgcacgtgggtcacgtgttctcctacacgcacaccgatgtgattgcgcgttacaagcgcatgcgcggctacgacgtgttctacccgatgggctgggacgacaacggcctgcccaccgagcgccgcgtgcagaactactacggcgtgcgcgtggacgtgtccctcccctacgacccggacttcaagccgccgttcgagggcaccgatggcaagaagatcgacgccaaggatcaggtgccgatttcccgcaagaacttcatcgagctgtgcgagcgtctgactgctcaggatgagaagctgttcgaggccctgtggcgcaagctgggcctgtccatcgactggtcgcagacctaccacaccatcggccagcacccgcggcgcgtggctcagaaggccttcctgcgcaacctcgctcgtggcgaggcctaccagcaggacgcccccggcctgtgggacgtgaccttccagaccgcagtggctcaggccgagcttgagtcccgcgaatacccgggcttctaccacaaggtggctttccgctttgaggacggcaccccaatctacatcgagaccacccgccccgagctgctggccgcttgcacctcgctgatcgccaacccgaatgacgaacgttacaagcagtacttcggccaggaagtctactccccgctgttcaaggtcaaggtgccgattctggctcacccggccgccgaaatggacaagggtgccggcatcgccatgtgctgtacgttcggtgatgtgaccgacgttgagtggtggcgcgatctgaagctgcccacccgcccgatcattcagcgcaacggccgtatcgtgatggacaccccggattggatcaccgacccggccggccgtgaggtctttgccgaaaccgctggcaagaccacgttctccgcccgcaagatcatcgtcgacaagctgcgcgagtccggcgatctggacggcgagccgaccccgaccaagcgtatgacgaacttctacgagaagggcgacaagccgctcgagatcgtcacctcccgccagtggtatttgaagaacggcggtaccgacgccaagctgaacgccgagcttatcgagcgcggcaaggaactcgagttccaccccgacttcatgcgcgtgcgctacgagaactgggtgcacggcctgaacggcgactggctgatttcccgccagcgcttcttcggtgtaccgttcccgctgtggtacccggtgaacgcttccggcgagccggattacgatcgcccgatcaccccgagcgaggatcgtctgccgatcgacccgaccatcgatgtgccggaaggctacgacgagtcccagcgtgatgtgcccggcggcttcaccgccgaaaaggacatcatggacacctgggccacctcttcggtgaccccgcagatcgtgacccactgggccgagccggacgaggcctccaaggccctgttcgcttccaccttcccgatggaccttcgcccgcagggtcaggacatcatccgcacctggctgttctcgactgtggaccgcgcgcacttggagaacaagtgtctgccgtgggcccatgccacgctgtccggctggattctggaccccgaccacaagaagatgtcgaagtccaagggcaacgtcgtggtgccgaacgagccgatcgagaagttcggcgcggacgccgtgcgttactgggccgccgccgctcgcctgggcctcgatgccacgtacgacatcggccagatgaagattggccgtcgactggccatcaagctgctgaacgccaccaagttcgcgctggccatcggccgtgaggacgagaaccatcacgtgggcgctgccgccgagacctcgtggaacccggccgatgtgaccgaaccgctggatcgcgccgctatggccaagctggctttggtggtgcgtcaggccaccgaggcgctggaatcctacgagcattccaaggcgctggaagtcatcgaatcctacttctggcagttctgcgacgactacatcgagctggtcaagaaccgcgcctatggcactccggacgagcacggcaatgtgccgtccgagaaggctgtgaagtccgcccgcaccgctctgggtctgggcttggacgccttcgcacgtctgctggccccgtacctgccgtacgccaccgaggaagtgtggagctggatgcacgccggttccggttccgtgcatcgcgccgcctggccggtcgtggacccgtatgtcgaggccgccaccggtgcttcccccgagctgctgacttgggccggcaaggccgtggagcagctgcgtaagatcaagtccgaggccaaggtctccatgaagaccccaatcctgtctgtggcactgtccgctgcttcggaaggtgtgaacgcgattcacgccgccttgggcgatatcgcgcaggccggtcgcgtggtcggcaagttcgacttggtggccaagcacgccgaggaatccgccgccgaagacgcgcccgaaaccgaggtcgccgtcgaagccagcgagctcggtgagccgccagccaagaagccaaagcactgagcgttgcgcacaacaacagtaggtctcacggcaatgccgctcgttccgagcctacgggaagcccaccgggcttcccgcttaacggctcggccagccaagaagccaaagcactgagcgttgcgcacaacaacaaaagaggggaacctcctattgaggttcccctcttttgttttttgacgttcggatgacacgactgtgggacggcacgcaaatatcccgcattgtaagctggcggcccacaatagcgtgggccaccacgcgtgtcaaacgttttatatacgcggcgtcccacagaccgaatcaacaaatccttggaatttagccattcttcaaactatagttagctctgacttacaagagggtgtgggacgccgcatcgaaaaagccagtttttgatgcggcgtcccacaccgataacgcactttacgcgtattgggcacctgtcgcatgcggattttcccgcatacaccatcacaccgtcggaatcacgatgaggtatcgggtttcggcggttttttgttgcgtattggggctatcgagctgcgcgacggcctgcgccaagagcgtgccagcatcgctgatctccacggtctcattgatcagcgcgctcatgtcatgcttgagcagcgtgccgccagtgccaaagccgaacagtactggagcggtgtcaagattgttgccggaatcgccagtatcgctcgacttggctgagtcgttcgttcccgaaccatcgctcttggacgaatcgaacttacctccaccaccgatggccgaagtaagaccacccgcatagttcatcacatcgccagcagacatggacatggtgtcatcgaccagtgaggccttggaatgctgcgactgctgctgttgcgcggctttggcctgcttacgggcggcatcggccttacgcttggcttgggcggcccgggtcttgccgtagaacgattgcgattgcgaatcgaccaggccagtcagtgcctgagcctcggtcaccggaccggaagagacatcaccggacgagccatcgccatcgctgccggaagccgaggacgcgactccttcgaactgatcggagaatcgcaatacaatctggcgcaaggccgtggctttgcccgtatgctcggaggcggtggcaagcgtgctcatcgcggcatcgaccttggattgagcgtcggcgagttcatcgctaccgttggtttcggcgatggcttggctctcgtaagcggtggcgcccgaagacgtgccgccggtcagggcgctcaaattggccgtgtagacgtccgtgtatttcatcgaatacggaatcattgcggcggagagctggctctggccatcggcgtattgcttggagcctcgagtggcttcctccgaagcctcggcggtcagatcatccaccagtccggtggtgccttgctgctggatgcggcgaatcacctcatccaacgcatcgaccgcaccggcatgctgatgtgcggcactgacgttgttcaccgcgttggccaagtcgagtacggcttgcgccaaaggcgtatccccggacagttcgccggccgtgcccatcaacgccggcaactgggtggaggtaccaatcgatccagacaggtgcgtggtatatgagcccacatacgcggccatatagtcttcaaacgtccgcttatgggcggtttcgcgttcggccactacggacttgtccagcgcacgctcattatcgcgcagggtttgaagctgctcgatgagctgttgatgctccccggaaccggcgtcggtcagtgaatcgaccagtatggcggcagaggcgacgagttgggcgacatccgtatcggcagcaggctgtgcggcggcattcgcggcatcgggattagcaccaaccaccggactgctggaattggaaggcaatacggcgagcgccacggaactcatggagaagtctttggcgttcatatagcagctgaattccaagccggttgcggcttttccagctgcggcgactacggtattggaaccttgcgtggttaccgtaatggagttgtcagcggaaacatcatcggctacctgcgtaggcacggtaaaggcgacaaccgggatcgtacggttggcctccttggtttgcggcttaatatcgatatacacgccgatcagtccagatgcgccggcaacctcgtttgcctcgacgtttggaccgtcaagcgagtaggtgacgctgactttccatggcagggtggcggcggaagcggggatacgagaaaccttggacgtgccggaatcactattggcggaatcggtatcagtggaaccgctattgccggaatcggcactggcgccattgccggcaccgcccttccctaccacataccaacggaccggctccccttcggcatcggcgacggcgtacatatcacttgccgtagcgagcaccggaccgtaatcaaccggagtcggacgagacatccaagcaccgccgagaatcgaagccacgcacaatgcgcaactgaccagtgcggcaccacatctcatctacgtatcccattcatacagtcggccactatgggcattccattcccgtattaatgtagtcgctgccggcaacttgccctatagacgaatatccgaaaggtgcccattcgctgcgggcgaatcaggcgaatacgtcgagtacgcccgggtcaccaccggcatcggcgatgcgctggtggcgcttcttggcttcggtaaccacgaattcacggtacatttcggcaatttccggatcaagcccggcatcgatggcgatgcggtggaggcgttcgatctgatagtcctcacgcttggtgtcttcgggcgcgaatccggcgttggctttgagcacgccgacctgcgaggtggccttgaaccgctcggccagtaatgcgatggccgccgaatcgatgttatcgatggtttggcgcagcgttttgatgcgcgccaccgcttgtgcggtttccgggtgggccgccgcctgggcggagtcgatggtggtcctttgccagccgctgctcgtttcgctcatagattcgaggatactcccgattgcggctttgcacgatgcgcaaagtcagatatctcagatgtcatagtcgccgtaggggatatggctggcatccgcatcgccgaacatggccgcaccattgcccactcccaaaacaatcgaacccattgatacatctttcatctcatatatcgtcagcgtgcatgtgaacgttgacggcaatactacaactgcaatgtgatagttgatgtatttgcatcatatacggcaagggctgcgccccgtatcaatcggggtgcagcccttacactattgttcagcggtctggtcagttgccgttgaccgcgttgccggtgttggcctgctgcacgatggcggcgaggaagtcgcggttggtggcggtcttcttgaggcgcggcaccaacgtctggtaggcctgctcgggctccatgccgcccagcagtcgacgcagacggtagataatcggcagttcctgcgggttggtgatgagctcctcgcggcgggtgccggaagcgttgatgtcgatggccgggaacagtcgcttgtccgccagctcgcgggacaggcgcagttccatgttgccggtgcccttgaattcctcgaaaatcacctcgtccatcttggagccggtttccaccagcgcagaggagatgatggtcagggagccgccgttttcgatgttgcgggccgcgccgaagaacttcttcggcgggtagagggcctgcgcgtccacaccaccggacaggatgcggccggaggcgggggcggcgatgttgtaagcgcgagccagtcgggtcatggaatcgagcagtacgaccacgtcctggccgagctccacaagacgcttggcgcgttcgatggccagttcggcaaccgtggtgtgatcggaggccggacggtcgaaggtggaggagatgacctcgccctggaccgtgcgctccatatcggtgacctcttcggggcgctcgtccacgagcaccaccataaggtggacctcggggttgttggcggcgatggagttggcgatgttctgcagggtgatggtcttaccggccttcggcggggagacaatcagaccacgctggcccttgccgatcggggaaacgatgtccatgatacggccggtgagcttgttcggggcggtttcctgcttcaaacgctcctgcgggtacagcggcgtgagcttggagaactgcggacggttgagcgcttcttcaacgctttggccgttgatggaatcgatggcctgcagtggcacgaacttctggcgttggttgcgacgatcgccttcgcgcggggcgcgaatcgaaccatggacggcatcgcccttgcgcaggccgtacttcttgacctggcccatggaaacgtacacgtcgttcgggccgggcaggtagccggaagtgcgcacaaaagcgtaggagtcgagcacatcgacgatgccggccaccggcaccagatcctcctgcggctcttcgcggcggctatcacggtcattgcgatcgctacgattatcgcgatcatcatagcgacgatcatcatcggcgttgtcgcgatcacggccacgcatgcggcggttacggcgatcgttgcgatcattacggttatcgcgatcgttgcgatcgctacggtcgcggcggttacgacgcacaaactcgtgatcgtcgttctgctcgccgtcttcggacgtttcctcgtgcttctgcgtgggcagcgtggccaggatatcgtcgaggtcacgcacggtttcttcgctgttttccgcagtgcgacgacggcggcgaggctgctcgtcctcatcatcacggactcggcgaatcagcggaacttccacgtcctcatggcgctcgcggcgacgctcggtaggcgctgcatctcccaaatcgagcgtggccagcagatcgccggcctcatcggccttcttgcgcggcttgcggcgagcgaaatcggactggtcgtcatcgcgacgatggcgggccgcacgcggttcggatgcggcatcatcggcggccttacgacgggtgcgtcgcggttcggtctcgtccttcttgacatcgtcggccacgggaagcggcaaatcgagctgcggttccgtggcggccggagccggagccggcgactgggtggccacgtcagcattgtctgtggtattggcctcagcggcatcggactgcggagccttgacgaccttggcggttttggcggccttgggagcgcgcacggtcacaccggccggcggctctccaccattgcgcgccgcctgcagggtggcgagcagctcgggcttgcgcatggtcgacgtgccgcgcaggcccatctgtttagcgagctctttgagctcaggcagcttcatatcctcaagattctggctatttgccactggttgccctttccataccgaacagacccatgcctatccaggcgttaagagtgattattgcggttgcaccgctcatgaatgttcgctgcgtctctgagttttcacgaacttcgtttactgtacaacgccaactcgaccaacgcaaaacggcccgccgaaaaccaaaaaagctccctctgtgacgagggagctcaacaaggtttattcacttttcttcgtggtaggacttttcggtgttgacggaccacacgttcttcttggacgtcttgccggtcttgatgttgccgacggcctccatggcggtggccatggagtggtccatgttgttgtagcggtgctggccgttgcggcccacgcagtagaggttgccgaagccgtcgaggtactcgatgagctcgtccatgtgctcgtaggtgtcgaagtaggcggggtacgccttcttgacgcgctcacgatgggagtcgatgacctcgtccgggccgttgatcacacgcatgcgggtgagctcggagatcgcgaacttggtgacgtcctcctcgctcatgttccagaacgagtcgccctcctcgcagaagtactcgaggccgacccacacggtgtcgtccacgttcttgaccaggtacggactccagttgttgaagatctgcagacggccgaccttgtagcccgggtcctgcacgtagatccagcagtccggcacgatcggcggattgccgagggtggggatgttggtggtgttcttgagcttcaggtgcttgaccagcaggcccacggtcacgaagtcgcggtacggcaggccgttggccacctcggtcatatcggccggggcgggcttggaatcagcggcctcgggatcgtcgccggccgcgtcgatggcgttgaccaggtccttgaccggcatcgaggagatgaactggtcgccggaaagctcggtgcggttgccctcggaatcctcgtacaccacggaagacacggcgccatcggtctggcggacctcgaccaccctggcgtcggtcagcaccttgacgccggcggcctcgcaattggactcgacggtctcccacagctggccgggaccgtacttcggataccagaactcctcgatcagcgaggtctcgacctccgcgttggagcgcttcctggggctaagcttctggaaggcgttcttgagcacgcccatgatggacaggcccttgacgcgctgggcgccccagtcggcggagatctgggaggggtggcggccccacagcttctccgtgtagccctcgaagaacatcgaatacagcttgcggccgaaacgattgatgtagaagttctccaggttgtcttccggcagcttgtggaacatggacttcaggtagctgaagccggccaccatggtgagcttgaagcccatggccttcaacgtgttggggctcagcgaaatcgggtaatcgaagaagtggcggttccagaagatacgggacacgcggtggcgcttgagcatcaccttgtcctccgtctccggatcggggccgcccggctccatgtcgtggtcgcggccgagcttcttgtcatcataggagggtgcgccctgcaacggcagaacggtcttccaccaatccatgatgcgttcgtctttggagaagaaacggtggccgccgatatccatgcggttgccgttgtgcttcacggtgcgcgagataccgccgaattcgcgggtcccctccagcacggtcacgtcatagttttccgcgccgccgtccttgatgagttcccatgcggcggtaagtccagccggaccgccgccgataatcactacggattgcttgtcggtcattatgctccttataaacgcaaaatcagagacagtttactagaagccccggaatcgcacaccgaaagatgagcgaatgcttacagaattctcccgatatacgaccgatgcgccgtcttccatcagcagaaaggcgacgcatccaatcgtgaggtaggggtattcggcaacgctgcgtcacgcacagcgcggcgaatccggtttggtcttgggctaattcgtcagcgacgaaccttccatagattcagcgagattcctgcaagtgcaagcagcatcataatccccgtaataccagtaacggcaacaccggtacgactcaactcgttttccgtaccattagcctgagtgttactgggctgatgagttcccacaccattgttattcggagtggtactcgttccttcgccagtgttaggtcctgcgcccggctgcgttgtggaatcatcagtcagacgcgcatcgtcgcctagggtttggtggctggaagccaagcaacttttgagctcagtgagcttataccacgtggaaccatcggcaatcggcgtgcactcggagcggaaagcgatttcctgctcgttgtagagcatacgaacgagcggcgtgtaggcacggccggtcttcgggtcgttgccggatttgacggcaacatcccactgcacattggcagccatcggagtcaccgattcaccacgccattcattgttggcgtaggtgtacacgtcggtggtgctggcggccgcctgctgggtggaaccgggaaggccaagcagcgcggcgaacggcatcatcgtttcggcgtgggcaaagcggaaagtagcaacggtggatccgccgtttacgcgctcatcaatcgacgaaaagaaatcgtcaagcagcggctgtgcgattgtgtaggtctcgtcttggccggcatagctcgggcccttctcatagaagtcctcggcgtcaagcgcccaggcgaacaacttggcgtcgtctgcctgctcaccttggaagtactggttgaagtcgaaggtatggctgccgatgttctcgttctccatatcagcggcgatgatgtacaggttgcacagatccatcgcggcatcgtattcggaggcgatcttcttcttggcttcgccgcaggcgtcggcatccttgctggggtcggctcccggcgcgcagttggcctcgccgcccttggtgccatcggcagtgttgtaccaagtgtatgtgccgtcggccagtttggcgaggaagtcgtcggtgaagatctgcgcaagcaggtcgtgcgaggccgttttcacgtcgccgttctcggcgatggtcttttccgcgcccgcgatggtctcgtcgttctcgacgaagttctggtagttgtcggcgagctgtttggcctcgccggttttctcggtgccgtccgggttctcggacttgtgggaatacagcgtattcggcgttttgtcgaaggccgccgcctcaccggtgccggcagggtcggcgggcgttacggtgctgttcgccagctcattgttcgaggccgcgttgaagccgcgtgcgaagttttcgccggactcggtggcgcgggcttcgccagaggactgataggcaatcttgccaccgtccttggctgcgttgtcgaacagcgtcttgttgcgctcgtaggcacgtgcgccaatgccctgatgttggtcagcaccctgaccggtgagcataccgtagccattctccacatttgcggcggtgatggctttgagattcttcatgaattcggacttgatggcatcagacttaaaaccgttatccgcttcggcggcttcggccatcttcgcaagcaatgcgtcgtatttgtagctggacaggccgcgtgaaccgtggcgagccatcgactcggtgtataccgtttcgtagccttccggtgcctggctatagctggcagtggtcgcttcgctaggggccacatatggctgcttgctgctgtaatactggccatcggcctccaaagccatggcgtgcggaacggtcagaatgccaccggccagcaatgtggtggcaacaaccacgcctgcaatggagcccttaatgccctgctgcatatggtgtgtattcatgcagcatcttctatcaaccgcaagcaaacaagacacacgatggcaaggttacgaatctgaacttttgctatgcgttgtatgaacaatgcgcgacgccccgccgtaagatgacggaatgccgcgcattgtcaatacaggctgtatcagacgattgcctgtcagtgaatatcgtcgggaatgtcgatatcggttttctggacttcctcgacgttcacgtccttgaaggtcacgatgcgcacggacttgacgaaacggctggaacggtagacatcccatacccatgcgtcagtcagctgcacatcgaaatacacgtcctgaccagcggaacgcacgttgaaatcgaccttattcgccaagtagaagcgacgctcagtctccaccacataggtgaacagcttgatgacgtcacgatattccctatacagcgcgagttcggcgtcggtttcgtaattgtcgagatcctcggcactcatgcttgtttactcactcactttccgtatcgcgtttgcggccgcggcccagcgtacgccaccatgcttcctttgagggcttgcgttccgcctggccgtacggccagttgctttcctcttcgagactgtggcgcgtgttcttctgcgtatcatcgtggtgcccggcctgtggctcgactggctgtgcggccgccggcgtctgggcctgggactgcacgtcactcgtcgtgacggcggctgcctcaccacgctgtgccggctcgggttccggcttgttctgctggatggcgatggaatgctcacgcgcggacagcgcttccttgacacccgggttgtcctcaatcaagtgcatgccaaaagcgtcaagcgaacgaatcggatcgtactcgtcgaccaacgtgtccatgacgataaggtcctggtatttgttgttttcgacatcccacaacgcgtcgcgcgaggtgccggacggcacgaagccgagcgactggtagaccgaaatcgaacggctgttcttttccggcacgctcacccagatgcggtgcatgcccaggccggccggttcgggcgcaaagccgtaagtcatcacacgcggcatggcgtcacgggagtagccgcggccacggtactcacggcccaagatgatctggatgcgggcggacttggaccagccgtcgatgtcgataaggaaaatcatgccgatgacattatcggtgctggccgcatcgagctgaccgtcatcgtcatggtcggcgtcagtcaatacggcccatgcgatggtacggcgggattccgggtcgcccacgccggattcggcgggtgcctgaccggcttcccaggcttgggagcggcggacccatgtgtgtacgatggcgcgttcggtgaccgcatccttgccggtgatcttggatgcgccatagaaggcatcaagttcatccaaacgagccaggtcctcgacggtggcggggcgcaggtgcaccatttcgccacggattggcggaatgacgatgctctgtggcagatcgcgcttcagttgcgcttcggtagccatgctcagcgtctcgttggttgcggtcatcggtatacatcccccggttcggcttgtttcggctcacggtccagtgccgaacatatcttactcgactgggtgaacgctggaaatgctctgagacgactttcttacagaatcaataaaggctcccgctggcgggagctgtccaacgaatttgaactggaggatttccctacaaataagtgctcccgctggcgggagctgtccgcgaagcggactgagggtggtcatccgtacatggcgaccaccctcagtctcactccgttcgacagctcccgccagcgggagccagtgaatctaatcagcccttgatcttgcccatgacgaccttggtgacggccttggcgtcggcctgaccgcgcgtggccttcatcacggcaccgatgatcacgcccatcggcttcatgttgccgctcttgagcttctcgacgacatccgggttggattcgaacgccgcgtcgacggccgcctcgatggcaccgttgtcttcgacgatcttgtagtcgtgcttcttgacgacttcatccggagtgccttcgcccttaagcacgccttcgacggtctgcttggcgagcttgtcgttgagcttgccggaggcgatgagcttctcgacctcggccacatcggccggggtgatcggcagctcttcgagggacacacccttggcgttggcttcgcgggagagctcgcccagccaccacttgcgggcaccggcagccttggcaccggccttgacggtttcctcaatcaggtcgagggcgtcggcgttgaggatgtcgcgcatctgcagatcactcaggccccactcagacttgaggcggttgcggcgctcacgcggcatttccggcatctgggccttcatctcctcgatgtgctccttggtgatgtggagcatgacgaggtcggggtccgggaagtaacggtagtcgtcggcatcggacttcagacggccgccagcggtggtctgcgaagcctcatcccagtggcgggtctcctgcagaatctccttgccgtcgtccagacgagcggcctgacggcgaatctcgtactggatggtcttctcgatgccgcggaacgagttcacgttcttggtttcggaacgggtgccgtagggggcgtccgggctcggacgcagcgagacgttcacgtcggcgcgcatgttgccctgctccatgcgggcgtgggagatgttcaacgcacgcacaatgtcgcggatggcgcgcacataggcaccggcgatttcgggagcgcggtcgcccgcgccctcgatcggcttggtgacgatctcaatcagcggcacaccggcacggttgtagtcgaccagcgagtggtcagcgccctcgatacggccgtcggcgccacccacgtgggtgttcttgccggcgtcgtcctcgatgtgggcgcgctcgatcggcacacggaacacggtgccgtcttccagttcgacgtccaggtagccattgccgttggtgggcttgtcgtactgcgagatctggtagtcacgcggcatgtccgggtagaagtagttcttgcgggcgaactggctccactcggcgatttcgcagtgcagggccaggcccagcttgatcgcgtaatcgacggcggtcttgttgatcaccggcagggagcccggcaggccaaggctcaccggggtcagctcggtgttcggctcgccgccgaactcgatgtgggccgggcagaacagcttggtgttcgtggacagctccacatgggtttccagaccgaagaccacatcgtacttcttggtggcatcggcgtacttcatcagtttttcagccatgatgttgtttctttccttccgatgctcacttgcctagaccgtcaagccacggggtcttgaggtctttccagatcgggccgttccagctgtcttccagcgcggcttcgagggccgcagccggcttgtacatgacttcgtcgcgctgctgcggggcgatgaactggaagccgacgggcaggccgtcgtcggacaggccggccgggatggacatggcaggcacgccggcgaggttggccggaatggtggcgatgtcgttcatgtacatggccagcgggtcgtccatcttctcgccgaacttgaaggcggtggacgggctggtgggggccacgagtacgtcggccttctcgaaggcgttgtggaagtcccggatgatcagcgtgcggaccttctgggccgaaccgtaccaggcgtcgtagtagccggcggacagggcgtaggtgccgaggatgatgcggcgcttgacctcgtcgccgaagccggcttcacgggtgtaggccatcatgttggcggcggtctgcggcacgccggtcggcggcatcacgcgcaggccgtagcgcatgccatcgtaacgggccaggttggagctgacctcggacggcatgatgatgtagtaggcgcccagcgagtagccgatgtgcggaaccgagacctcaacgacctcggcacccatctccttgagcttgtcgacggcctcgttgaagcgggcctcgacgccgggctggaagccgtcgccgccgagttccttgatgaggccgaccttcatacccttcagatcgcgcttggcgccttcgcgggcggcggcgaccatcgggcgcgggccttcggggatggaggtggagtcacgcttgtcgtggccaccgatgatctcctgcagcagtgcggagtcgagcacggtgcgggagaccgggccgatctggtcgagcgaggaggccatggcgatggcgccgtaacgggagacgccgccgtaggtgggtttgacgcccacggtgccggtcagggcgccgggctggcgaatcgagccaccggtgtcggtgccgagggcgatcggtacctcgaatgcggcgactgcggaggcggagccgccaccggaaccgccgggcacgcgctcggtatcccacgggttgtgggtggtctggtaggcggagtgctcggtggaggagccctgggcgaattcgtcgaggttggtcttgccgagaatcggcatgccggcggccttgagcttttcgatgacggtggcgtcgtacggcggcacccagccttcgaggatcttggaggcggcggtggtctcaatgcccttggtgacgatcatgtccttgatggcgatcggcacaccagccagctcaggcagggcggccttgtcttcggcggacttggcgtcgaaggcgtcggcctgctcgagagccagatcgccggaaaccttcaggaaggccttgatggacggctcggcggcttcgatcaccttgaggtgggcttcgacgagctcacgagaggtgacgtcgcccttcttgatggcagcggcctgctcggcagcagacagtttgacgagagttgcggtttcgttgctcatcgattactcctcgcttcccaggattcgcggtgccacgaacatgccggcctcggtcttcgggccaccggcgagcgcctcttcctgcgtgagcggggtttcggcgacgtccgggcgcaggtaggcttccagaggaaccgggttggcggtcggcggcacatcgtcggaggcgacttcctggaccttgttgatggagtctgcgatgacgttcagttcgccctgcagacgggtgatttcctcatcggtgagcgcgattcgggccagatcgcccaaatgcacgatttcttcacgtgaaaatgttggcatggccataactatatgagccgtatgtgacacgcagttgtcgggaagcctcattttcccgcctactggagcccttcagcgaatcagaagctcaagccggtcgagcatttgccccgctgctggcttcttcggcggggcaaaaccgttgccggaccgcaagttcaccttactgagacgactcgcagcagagcagaaccgcgagctgaccgatgaaacgccccgctcagccatcccagcaaaacaaaaccgcggtccaaccaataaaacgccccgctgagacgccccgcagcgaggcaacgccacggcccaacctcaaatgtgccccactgaagtatctgcatggccaccctaataagctcacaatgagcccaaacacacctacatcgaacatatgaacgacaatcgccctgcgcacctcgccagttatccacattttgcatacccacccaaaagaatccacataatcagtccaatacggtcagatgcctgataatcaggcaaaaacacacatctaggcaccgaagctagaaccacataaccccagacagatagacaccgtgttcaccattggcataccgtcgaatcatgaaacatcacaaagcagtggacatactcatcacgaaggctgaagcaacgcaacagtgcgcttatggaacaaccaaggcacaccgctcggcgctggctcggcgcgtgcaggcgcgcgaactcaaacgtgtattccccaacatgtacgccgcttcggaatactgggattcgctgcaacccgacgaacgtatcagacatattgcacgaactcttcataacagacatccggattgggtgttcgccggggtcacggcagcggccatccacgattttgaacaccaatggcatcttcatgctggcaccatcactctcgccacaacatcacgaggccccaacgccagcagtgcaaaggtcaaacgcatcttcacgtcaagcagcacgccagaatatgccaatggactcccggtgaccagcaaagccagaacggtggtggattgcgggctgtccgtcgacttccgatttgcactgcccattatcgattcggcgctgcgcaacggcgtcgccatcacggacattctgaatgtgtgcagcactatgcgacgtgattgcacgccgatattccgcctactgcattatgccaatccggcgagtgagaatggtggcgagtcacttggacgaggcaccatcatcgcaggcggcctattagccccagaactgcaacaaaacatcaccgacccgcaaaccggtgctctgtatcgcgtggatttcctctggcggctacctgagaatcggcttatcgtgggcgaattcgatggctatgaaaaatatgtgaacccggatatgaatgaccgcaagggtgttcgtggtgcagttcaggcggagaaagaacgggagacggcactgtaccgggccaaagtcgacaccattgtccgattcacctatgaggaggtgatgcaacaacatcctttactcaataagctgcgggcagccggcatacctcatgctggaacagtgatgggagctggttaagcgcagtgaaccacggtggtcaaatccatggggtcagagtcaccagaaccatggtcactgcagaaccgccaaagcagtaacccgcgttatttgatatccgatatccgcttttccggtgatgatgagaccgccgatccatgcggcggcagcccaggcgatgagaatcaggccggactgccaccattcgggaatccagtagtccggtttaacggcttcggccagtatggactgcgcggagctgctgatgcctgcggcgagcaggatgccgacgatgccggcggcaaatgcgaattaatgccgcggcgatggatttggtggcgtagatcatgcctctaatgtggcccatattgggcagatgcggcaggattgtcggcgcatggctacacgcctgatacggcgtgttgggcaatccatgcgtgcatggccacggccgccgcagcgcctgcattaatggagcgcacggaaccgaattgagagatgtagaccacatcgtcggccaattcgagggccttctcgctcaatccggggccttccgcaccgaagagcagcaggcaccgcttggggaaggtataggtttccatcggcactgcgccgggaatgatatcgagggcgatgacgcgggcggcttgaagctccttgatgcgcgcatcacaagcatcgatttcggccagcagctcatgaaggtgcttgttgtctccatccacagccacatcatgcgcatggatggcggcggcaccggccttggctcgttcataggcgatttcaccggcgatgcgatgatgccagctttccaccagttcggcgatggaggggtggtgttcgacgtgctggtacagttcggtcatcaacgcgcccttgcgattccacttatgtggaccgacaatgtgtacgcgcttggcctggaaggcgttggcggtgcggaccatggaaccgatgttgaaatcgtgggtccagttttccaccgcaacttcgaagtcgtgacgccctcgagcgtcaagatcggccttaatggcagcgacggtccagtagcggtaacgatccaatacgttgcggcggtcgccgtcattcaacagcaccgagtcgaaacgaccgtcataattcggagaagtcggatcgtcgggacgaggctcgccgggatgggtctcagaccacggcccaaggccgatttcacggaattccggttcacctgaagctttggcagccaaagaaatctggttgggtgcgtgcaatctttctcctcgataacgctattcaccggttcctcttagtcaacttcgcggctcagcccggctgactttatgcgagggaagtcaaaggtggatttaccgcagttcggattcgtcgaagacctggatgaaggggagcgtttgctcgtcgccggtggaggggttgaccacattgatgtctttggcaccgccaccgaccagcgaggcgatggccacgaccttggcacccagctgctccactatgccaaagtcgaggctcagctcattgccgttgcgcagggtgaccagcgagctggtctgcacgtacgacttttcggacagccaagcatccaacagcaccacacggcggccttcgatggaggggcccttgatggacgggtagacgaagtccatcacgaatccgtctaggtcctcgccacgagaggcggcggcctggatcatggcggacaccatgggcacagatgctgcggtcaaggcaccaacagcatcgaagtcatcaaccgaatagcccgcatcttccaaagcgtcaatcagtacatggcccatgacggtggcggcatggtggtcgaaagtcaccgcggcaagttcggagaacggacggcccaccacatgctccctcagcaaggtggctagctgctcacgcggctccagcatggcaaagtcattatggctcttcgcgacggcgaggtccggggtaccagtggggcggaatccagattcagtcatgactccagactatcgcctgaggcagtcagatgagtatcaccttcatcggccggcaccacttcaggggcggacagttcgctcacattgcctttgtctgattcgatgatcggtacttcctcgatgatcttggtcggttcgattttttgcagcttgcgagcggtgggcaacacacggcgttccaagctggacgcgaacttgttgtaggcgctgaccgtcttggtgatctgggtgcccaatttgatggcataatcacccaacgtggagaaccgttcgtaaagttctcgggacaaatcgaacagctgcttggcgtcatcggtgagcgactgctgctgccaggcataggccacggatttcagcacggcccacagcgtgaccggcgaggtgagcgccactttgcgagagaacgcatcatccatcagtgtggggtcggcttcgagcgcggcctgcaacagcgcctcattggggatgaaggccaccacaaaatcgggtgccacatcaaaggcattccaataggccttttcgccgagagcacgtacatgctcgcgcaacgccttggcatgggctcgcagcaaatcatcgcggcgggcaatatcctcggggctggcggtgtccgggatctcgcaggcacgctggtaatcggcataaggcactttggcatcaatcggaatggtcttgcctcccggcagatgcacgatcatatccgggcgcaacgtacgtccatcggcatccgtgaccaccacctgaatgtcgaaatcgacatgttccagcaatccggcggactcgacaatgttcttgagctgggcctcgccccacgcgccacgcaccttgttgttgcgcaatgcggcggacagggaactggtttccttgtccaaacgggcctgctggtcgttgagccccttgagttgggctcccaatgcgcccatttccctcttgcggccctcttcgatctgcgtgaccttgttctgcaaggtatcaagattcttggccactggcgcaagcgcctcgagtaccttgctctgttctttcaaacgtgcttcctgttcagcacgcttggcctcggcggcctgagcatccgcctgacgcttccgttccgcctccgcagctgcacgctcacgttcctgctgaatgcgaatctgctcagcctgctgcgcctgggcaagttgtgacttggcgaaagccaattgctggttcacgccttcaatctgagcctgtgcggcagcattgcgagcactgagctcagcattctcgaatcgcgcattctccagcgaggtcttggtctcctccagctcctcgcttttgacgcctcgagccatctcctgacccttatggcgccccagcacgaagccggcgaagaggccaagccctgcaccaaccactagcacgacgatgacgataaccacggttcctatttgctcaaacatggtacctagtatgtcatcgatggtgaatgacggtaaatttttaccgaattcgacggtttcaagccgttaaacggatgctcagcagcccacattggacatttggactcatcgcagtcgagcatcaaccgttattgcgctgtgtcacacccgaacgccggatgtccttccatgatttgccagcgcgcgtcatcatgcggcagaactcgtcacgatttgacgagacgtgcgatggccgcggaagcctccgcaagtttttcatcggccacctcgccgccctgaatcgacgcctgccgcacgcaatggttgagatgatcgtccagcagcaataacgccacggatttcagcgccgagttcgacgccgaaatctgtgtcagaatatcgatgcagtatttgtcatcctccaccatctgtgtgatggcgcgcacctgcccttcgatacggcgtaatcgtgcgatgaccttggccttgtcttcgtcataaccatgcatcgcaacccccctgatacttatccgtcagctgaacacaccccattatataccctctaggggtatagggtatacactgttgttcagtacatcaggagtgggaaggaacagttatggagttcagcatcttctcgaccgtcgcggcgctgatagtggcggccgcattgacatggttggtcctgcgattcttcttcggaacgcagaaggcaacggccggggccatggacgcttccggcgaacgccaatccgcaacaatcactgtcaagggcgggtactcccccgccgtggtgagcatgcgtgcgggtacgccgatcacactagccttcgaccggcaggagaccggcgaatgcacctcgcatgtggtgtttgctgatctgggacttgacgccatgctgccgggcaacgccaccaccgacgtggaactgccggcgttgccgccgggcgagtatccgtttgcgtgcggcatgaatatggtgcatgggatgttgaaggttgagggagaggacggctcggatgagaacacgccccttcctcatcctgatgcttcgtatacggcacctaccgccgtggatgcggcggaggccgatcgccgggaggcggctgaacgcgccaatgagatcaaggcgctgacgaagctggtgattgtgggcgcggtactgacgttgccggtattcgccgtcaccatgctgcatatggccaatcccacgctggtgccgcattggatggtgaacccgtggttgcaggccatcctgatcacgccggtgatgttctactgcgggcgtccgatccacacggtcggcttccccgcgttggcgcatcgctcccccgacatgaactcgctggtctcactgggcacttcggccgcctacctgtattcgctggtgacctgcatcgccccgtgggtgttcccggaaggctcgcgcgaaccgtatttcgaatcggttggcgtggtcatcaccttggtgctggtcggccgccttctggaaaccaaggcccgcgaaggcaccggcaaggcggtgcagtcgctcatcaaactgcgcccgcgcaccgcgcacaaactcaacgccacttccgcagacaatgtggacggcatcgaatggcgcaatccggcgtatttcacggacaccgacatcgacgccatcgccaccggcgacctgctggtcgtcaagaacggcgagcgcgtgcccacagacggcatcatcgtggccggcgaggcgcatatcgacgaatcgatgatcaccggcgaatccaagccggtttccaaaaccgtcggcgatccggtaaccggggccaccgtgctgctcaagggcgactgcgtgatgcgcgccacccaagtcggcgcggacacggtactctcgcagatcgcggcgatggtggcccgcgcccaggcgaccaaggcgccggtgcagcagctggccgataagatcgcccggtatttcgtgccggcggtgatgatcatcgccatctggacgttcgccatctgggtgtcactgggcccggtgccgcaactggcgcatgcgctggtcaccgcggtcagcgtgctgatcatcgcctgcccgtgcgcgctgggactggccacgccgctgtcggtgacggtctcactgggcttgggcgccaccaacggcgtgctggtcaccagcgccaaggcgctggaacaggcgcgtcgcatcggcaccgtggtgttcgacaagaccggcaccatcacgcgcggcgtggtggacgcggccgccgactgggacaagccgagctacgagcaggacacagtcaaggaaggctcgcgcgaggccatcgcggcgttgcgcgcacgcggcatccgcacggtgatgctatcgggcgacaaggccgaggtagccgggcgcatcgcccgcgaagtcggcatcgatacggtgatctgcgaggtcaagccggacggcaaggcctactggatcgccaaactgcagcgcgaacgcgacgaggccgccgccaagtccgcggatggcgcctcccgcacggccgcgcaatcccgcactctgattgcgatggtgggcgacggcatcaacgacgcccccgcgctggcccaggcggatctcggcatcgccatcggcaccggcacggacgtggcgatgcagtcggcggacgtgaccttgatgagcggcgacttgcgcggcgtcatcaagaccatcaacctgtccaacgccacgatgcgcaacatccgcgagaatctggggtgggcgttcggctacaacgtcatcggcattccggtggccgccggcgcactctacccgttcaccggctggctgttgagcccgatgatcgcgggtctggcgatggcgttgagctcggtgtgcctggtgctgaacgcgaacaggctgcatgggtcgaacatcaacgcgggcgttgtcgatggcaccgctggctcgggcagcagcacggcggatgtcgaatcaaccggatcggccgaatcagccaacgccgccaacatcaccggctccgccacatccaacgcgcctcacgagccgaccgtcatcatcgacgatcgcaccacgctgaatcacaccaatcacgcatctgaccaatccaataatccaaccaacaaggagaacactatggatatgggaatgcacatgcaccacaccgcccccgcggacggcgaaaccgccatcgacccggtgtgcggcatgaccgtggcggtgaacgccgacgcgatcacgcgcgagtatgagggcaagtcctattacttctgcggcgaacactgtgccacgaacttcatgaaggccccgcaggtgttcctggagcagtagtctctgcgtttacctgattcaacgacaatggcctccgcccaaaacgagcggaggccatttgcatatatgaatcaatcaacgaatcagctggcgaagaagaacacgaacagccaagcgccgatgatggcgccgacgatcggggccacgaccgggatccaggcctcgccccagcgggacgtacccttgttcggaatcggcaggatggcgtgcagcagtcgcggcatgagatcacgggccgggttcaggccagggccggtcgggccacccatggaggtcacgaggccccacacaatgaagccgaccacgatggaggatgcggcgtcgtcggccttgccccacggcagcgtcaggcagcacagtgcgccgaacaccagcacgagcgtgccgaacatctcgttgaggaagtagttgaccttcttgttgtccgcgtcagtggtgcagaaggtgcccagaatcgcctcggcgtcctcggtctcctggtagtgcgggtagtaagtgatgtagacgatgagctggccaagcagggcgccgagcagctgggcgacgatgtacggcagcacttcattccaggggaacaggccgttgatggcctgagcaagggtcatggccgggttgatatgagcgccggatacgccaccgaacatgagcaccgggaacatgacgccgaagccatagcccatggcgatgttcagccagccggcgtggtggcccttggtgttcttgagctcgacgttggccacggagccgttgccgaagatcatcagaatggcggtgccgaagaactcggcggccagcttggtaaagagaggataatccactgcttcttcttttctcttcgccgcgcaacaggcatggctgactgttcacggcattctgtgtgattggaaatccgttcgcggagccggcgacgcgatttacgctgggcgcgaaagcaaacgtggcgattgtacactttgccccacgacgaaatgccggcaggatgcgatgtcgaatgtccagccgaatgcaatgcccagaaagccaccggaatcagccgaagcgacctcgaatctcagtggttgcgaatgacgttgcgcaggggtaggacgctggtgggcgagacggacagttcgtcgattcctaggcacaggaacgtatcggtcaggctcaggtctgcgccaagctcgccgcagatgccgcaccagatgccatgacgatgggcagcctcgatagtcatctggatcatgcgcagcacagctggtgaatgcgggtcggcaaagcgttcgaaactcggggtctgacggtcacaggccagcgtgtactgggtcaggtcgttggtgccgatggagaagaaatcgacttcggcggccagctcgtcggccatgatgaccgacgcaggcgtctcgatcatgacgccgatctggatactctcgttgaagtcggtgtgctcgccgcgcagctcgcttttggcttcttcaagaatccgcttggcgtcgcgcacctcctgcaccgaggtgatcatgggcagcataatggcgatattgccgtatgctgaggcgcgcaacaatgcgcgtaactggactttgaaaatctccgggcgggtcaggcagatgcggattgcccggtaaccaagcgcggggttatcctcgtggtccagattgaagtagtcgacctgtttgtccgcgccgatgtcgagtgtgcggatgatgaccggacggtcgcccatctcctgtgcgacttgtctgtatgcatcgaactgaaattcctcggtcggccagtcctcgcgttccagatacaggaactcactgcggaacaagccgatgccctcagcatcgttggccagcacggcggctacgtcagagggacggctgatgttggcgtacaggtggacccgctgaccggacttggtttcggtgggcttgcctttgagcttccgtagtaggctcaggtgttcctcagcttcggccttcctgcgctggcactcggtcagcgtggcctcgtccgggtcgacgaacaccgcaccgctggcgccgtcgattacggcaacgtgaccgtcatcagtcgggtcgaaggcgtcgccgataccggtgatggcgggcaggcccatcgtgcgcgccagaatcgcggtgtgcgagttcgctgagcccttggcggtcacgaggcccaaaaccttagcgcggtcgagctgcgcggtctcgctgggagcaagatcttgggcgaagatgatgtggctttcgccgttctgcgcaatcccgttctgcacagtaccgttctgcacagcatcgccttgtatactgccatcctgcgccgtgctatcgcgtttgccttgcagcacgttcatcacgcggcgagaaacatcctcgacatcagcggctcgagcctgcatggtcgagctatccatcgcagcgaacatggcggcgaactgttcggcgacgctcttcaccgcaaattcggcgttcaccttgtcttgcgcaatcaaaccttcgacgcatcccgcatagtccgggtcctggagcataagccgatggacgtcgaacagctcggccttgttttcgccgaactcagcggcgacgttgtcacgcagttgcttgagctgagcgacggccatgtcacgggccgcgcggaatcgatccatctcagcctgcggatcgtcgattacgcggcgttctacagcatgatcggcggcggcgagcacgcggaccgtgccgatagcaatgccagcggatacgccgacgccctgtatcgttctcattacaggtgctccttgaggaatcgctcgaactctgcggcagcgacagcttcatcgttgccctgcacccgaaccgtaacctcgtcaccttgttgaacatcaagtcccataacaccgaagatacgcttggcatccacggatttgccgccgtaggcaacggtgatgttcgactcatattcccgcgctttggcaaccaaccggccagctgggcgggcgtgcatgccttcggggtcggatacggtgaacgcgaatatctgagacatgacgccgctccttacacgtccggccgtcacgcgcgaagacggcctttccgcaccagctacggactgatgctggaaaaaacaaaaaaccggaatctttcgattccggttgtctgtgcccccgcagggattcgaaccctggacacgctgattaagagtcagctgctctaaccaactgagctacaggggcttggttagatgttgaagtgttccttgcaacaggtgttaaatatactcagatttgaagcggatgcaactctcggcgtgtcgcgcctatttccagcgtttttaaacaccaatacaaaaatcccccatgcggcgcgaaccgcacgggggatgatgcttaagctcagactcttggtctgtgtgattccagcactaggccggaatgactcactcggccacgaccttcacgaagaaggaagcggtgatctccgggtggagggccaccttggcggggaaatcgccggtggtcttgatggtctcgacctcgatggccttcgggttcaccgcggccttgtcggacagagcgatggcgatggcctcgttggagataccaccgaacagcttgccggactcggacaccttggcggcgatctcgacggtggtgccctcgatggcggccttagcggcgacggcgtcctcgcgggtagcgacggccttggccagacgagcgcgcttcatagcggtgatctgagcctcagcacccttggtccacgcgaaagcgaggccctgcgggaacaggtagttgcgggcgtagccggccttcacgtcgacaacgtcaccggagtggcccaggttggacacggtcttggtgagaataaccttggtttcagccattgttcaaagcctccctaactcagcgacccgaggtggcgtacggcagcagggccatctcgcgggcgttcttgatcgccttggagagctcgcgctgttcctgcacggtcacgccggtgatacgacgggaacgaatcttgccgcgatcggaaatgaacttgcgcagcagcgcgacgtccttgtaatcgatctcggtgaccttggcggccttcagcgggttcggcttcttcttgaacggcttgaccggcggttgcggcctcttacgtgacatgatgttctccttataaatcttgatattgattgctgctggcagcggggaggtaagtactgatcagaactccgggtcggaatcgtcgccgccgccgaaatcggaggaagcgccgaacgtagagaagctaccggcatcagatgcaccggcattgctccacgggtcggccgcaggagcggacgggttggcgggagcggcaggctgctgggagtatccagcgccaccaccctgatagccaccgttgtaaccaccttggccaccctggttgccatagccctgattgggctgctgaccaccctggaaaccaccggaacgaccctggaagccgccctgaccggacgactggcgagtcacctgtgcggtggcgtaacgcagggagggcccgatttcatcgagctgcatctccacgacggttcgctgggaaccatcctgtgcctgataggaacgctgctggaggcgaccggtggcaatcacgcgcatgcccttcttcagggactgggcgcagtggtcggccaggtcacgccaagctgagcacctcatgaacagcgcctgaccatcctcgaactggttggtctgacgattccaggttcgcggggtagaagcaatcgtgaagctcgccacggtcgcgccgctgccaatagtgcgcagctcgggatccgcagtgaggttgcccacgatggtgatgacggtttcgcctgccataacggtccttcttacttaccttgaataccagctgttcagctgactaaacgcttgattcagcccttacgaaggatcttcgtacggatcacggattcgttgaggttcagaacacggtcgagctcatcgctggtagcgggctcggcggtgtacttcaccacgacgtagttgccttcggtcttaccggcaatctcataggcgagcttgcgacggccccagtaatcgggctcatcgaaagagccgccttccttggtgacgagttccagatactgctcggtcagcttcttcagaccgcgctcatccagctcaggatcggcgatgaacatcagttcgtacttgtgcgcagacatcacccacctccttcggactattcggccacgg

SEQ ID NO: 452 - DNA, 17835 bp, Unknown
  R48_24m  MAG No. k141_21283
agagacgcccggtcccattccgaacccggaagctaaggcctggcacggcgatggtactgcacccgacagggtgtgggagagtagcacgccgccgcaccacacgtacaggaagcccctcggagcacacgccccaaggggctttccctatatccgaaaccggccccggcccgaacccgcacgggcaccgggacctccccgcatacccatgagacccacgcccgggaccattcccggccagccccgacggcgaggccgaacggcgcggcgcgtccgcgaccgtgggagcccgacgcccgggcccccggtccgccgcgcagactgctcccctccagaggggaaccagaaactggcttggttatggggtcgctctacactggcttctgctatgcattacttcacccctaaacgttgcgccacgtcgaataaaatcatgtaccacgataaggcgcaggctcagcgtgccgctgatcaaagcctgatcgagcgtggagccgagctatgggtgtaccgttgcgaatattgcggatgctggcacctcacacatcgcgatccacaatccagttaccggcatgtaccgctgaaccagcaactcaagccacacagtcgtaaaaagggctacaagccacgtagacgttagcgtcagaagctccacaggcctcgccaacgccgtatctgaggcaggttacggtccaaacacgccaggtcgtaggctgctaagcgttcagggcgctcggacacactccgtccaacactcacatcaccttggtgctttcaaggttgcggataacccaatcgttgaagcgaattaccggcttgcgcaacataagtcccaacagcaatgagggaacaaggaacagtgccagtttgcccatggaaacccagtattccatgccgaatgagcccgccatggccgaatgcatcgcatccaccgcataggggaacagtagccatttagaaacgacctggaagaacgtcggcagtgtttcaatggggaatgtgccgccggaaccggctacctgcataaccagcagtactacggcaatggctttgccgatatcaccgaacgatagggccagcgtatacacaatattcgagaacaccagtgcagacaaccacccgaccatcaaaaactgaatcggatgctcacactgcacgccgagatagaacatatcgcccaggcacaccagcgtaccttgcagcaaagcaaggaaaccgaaaatcatgtatcggccgaaatattcgtggtgcaagcgtaaaccgaactgccgcgcattgccggaagactcggcacgcggcttcttcagcacatccaacgcggcggccggtccggcaatccgcccggcaatcatggcctcgcgaagacccactcccgaaccgagcggcagatcattgcccaaccctaagatacgggccttctcatggtcggaaatcgatactttcaacatggcgaccagaatgatcgcaccgacccagatagacagaatcgtgtagaacggagccatcgcggaaccatagttggcaacgggatagagcgcgatgcggtcgaccgctacgggtgccgccagcatggaagcaatggcatcgggcttcgcagaggaaatcacagacaggtcgttggtgccgccactggtgatagaggcgagttgggaagacaagttgtcgagtttcttcgccgaacgggtcaaagcgctagctgcgtcagtcaaggccgactggatatccgtcaggctgtctgaaacgccgccagaaagacctgacacgctgctgacggtcgacgcaagcccgtcgattacggaacttgcctgcgtggccacttcgtccatggacgaggtcagattgttcagttgcggtttcagcgtgctcttgtacgtgtctgaagcctgagtaatcgattgtttggcggcggcgatttgtgatttcagatctcgacgcgctgtatcggcatcggcagtaccatttgctatgtgcgtggccgcatcgcccaacgcggtggcggcttgctgcatgctctgctgcgcctttgtggcttggtctgcagccgcgttcagttgagcggcaacggtatctccgcccacgggcagtgaagccgcttgtttggcgagatctcgtaaagcggcggcatactttccaaagctgtcggcctgagcctccactttggattgcatatcggtcagcttgtttgatatctgcgaggattgtgagcccacatcggcaaaagcggcatcgatctgcttggcaatggtgtcgtaggatgaaccggcctgctgcaatgccgtaccgacgccatcggtggctccggacaatgccttgtcgaggctggagacgccgttgcgggtctgtttcaacgcctttttggttgtggccgcagctgagcctgttgatcccagcagcttatcggtggaatcaatgatactgttggcggccccgagcagattggcataggaatccatctgcgacgcagtgccggtcaaacgagatgacatggtggcaatatgactggaggcgttgttgacgtactgctccatttgcgggctttgcgcgtaatcggccacgttggaaaccaaatccagcgccacgctcgccaaggtcttcacaaatgtctggtcgatggtcgtggccacggtggtagcaccctggtcggtgatatgcggagcgatcggattgattttctcattgagatagtattcgagcttggcgtgcttgatcttcggtgaaaacagcgtcatcatatcggagctgaagctctttggaataatcagcgcggcatagtattcgcctgagttcacgccatcgatggccttagcacgatccacaaactgccagtcaaggtcatgattggccctgagcgtattggtcacggtttcgccgacgttgatggtgatcggcatcagatcggacttatagcccttatccacgtttgccacggcgaccttcaaggccttggtgttgccgtacgggtcccagctggcggcgatgttgtaccaggcgtacagtgccggcacaatcaccaatcccatagccacgattacggcgatcacattgcgggtggcttggcgcacgtcacgtacgaatattttccagataagcttcatcgtgcgcctccttgcccagactgaccggactgctcgaactgtgcggtgtgcgcagtcggctcggcggcctgatcgccgaacagtgtgagtcgttcagtggtttcgccgatatccggattgctgcccatcgccgcttcgtgacgtccgtggccgtggaaacgccgccacacatatccgttgagcatcacattgcggaactcgtcggcactcatggcactgacgccaagctgcatggcgtaggtttcgcgtgcgtattcaaccacaatgagataggcgtcgataagaataatcgacagaatccaggaggtcagcatggcgattttctcttgggtgacgaacagcagtaccaggaatacgaacgggagtacggtcagcaatgtcagaccggcaacgatcatctttgggtaccgcgcgaagaaccggtgcgcgcgatgagcgatgatatcgcgcagttccttgctgtcggacaccgtgcggaatacggagttcaagctcacctgttcgttcaccatgctgttgtgctcggtgatcatcaggtcggtatctcccaaacgatggtcgaacagcgcgttcaggttcatcgcataccggcgtacgacaagtcccacgaaaagcgccgccggcagataccagaacaggtgcagcatgtcgagccagtaatggttcgcgtacaggccggcgatcgggccgcgcatcgcgttgatgccgtaggtaaagggcagccatgggtgcagttcgcggaagaagttcggcatcatttcaatcggatacaggccggaggcaccgggtatctgcacaatgaccagaattacggcgatggctttgccgatatggcggaacgccacggccagcgcgtaaataatgttgatgtagacgaacgaacagaagattccggccaagatgaacagcagcggatgctcgcattggatgccgagcaccagatcgccaatggtggcgatgatggcttgcaggaatccgatggtgaccagcagcagccagcggccaagatatgcttgcgtagcggtgatacggcgaatgcctttgcggtcgacctcaagcttgtagatggcaatcagcacgaaaccgcctacccacagtgccagattcgtgtagaacggggtgactgcggacccgtaattgtcggtggcgtacacgactttcgtggtcagggtgacgggattgcccatgaactcgccgaatcccttgtcatccagatgcagcgtatcccggattttctggtaagcggcggaactatcgagcgtggcgatatcggtgcgtacggtggcgacatcgctggccgcctggcgcagcgaatcctgcgtgctgctgatggtggttttcgttcggttcagggtatcgacaagctggtcgaacagcccgtcggcctgatccaaggtgccggacaacgaagtcaacgtgccatccagcgtgccgttcagggcggcgaaactgttcaatgatgaggtgagcgacggcattacggtgccggtcagcgagccgcgcgcggtattcagcgccgcgatgccgccggtggtggtgttggtcatggctccggaaaggttcgtggtggcgtctttgctggagttgatgaactgtgtggtgtcggtatggaaggtgttgagctgtgtctgctgtttgctgatcaatgagtcgagcgcatcgatttgtttccagatgttctggccgaccgggtcggtggtgtctttgccgatgccggctttggtcagcgcgtctttcagatcgctgattgacgtttgggtggcgttcagtggggccgaaagtgtgttggtgatggtgtcgacggagttctgcgcgctgttgaaggagccggtgatgctgccggcggcgttgttgacgtggacggccagtccggagagttgtgctgaactgctgtcgagcgcgccgaccagtgtggtggagaaggcttgtgacccggcctgtgtttccgccaacagtgtgccggactggcgggaggcattctgcgcggccgcgacggtctgcttgagtgaggcggtggtctgtttggcgtcggcgagaatcgtgtctgattgggccagcgtgtcctgtaagtcggtgagtgaatcctgaacggtgttcagcgtggacatcaccgtattgagatcatcgatcgtatcgtgctggactttgccagtggcttggccgagatcgtctccggtttcggaaatggccgaggcaacggtggtggctaccgtggtgacgaaggcggagttgatctgctcatcgatggtggtggcgccggtgtcggtgattttcggcgcgatcgcgttcttcttctcgttgacgtaatacttgattttcggctgtttggaggttccggtcaccgattcgaccaagctggcgctgaaatccttgggcagcacgatggctgcatagtatccgccggtctccacgccgtggacggcctgttcctcattgtctacgaagcgccagccgagttcgtcgttctgcttgagtttcttgacgacctgccggcccgcatcgagatggccgaccagatcgttggtggtgccttggtcttcattggctacggccacttgcagattgccggtggctgaatagggatcccagttggcgagaatgttgaaccatgcgtacagcgagggcagcattgctacgccgagcgtcaccacaacggcaacgggattgcgtaagatacgtctgcaatcgcgtagaaagacttgccaaaccgtccgcatccagtccctcttttccggttcgtagtcattgcggccacatgcagtctattcccaccactggtgcggatactgctggtttggcgggttttcttgcaaaactggccgttggttgtccgcataatgggactgatatgtgaacgtttgttgatggtgcgacaccggcgggatggttgtgcaattttgccggtatccggtgatgaaatgttgaggtgttggaactgagtcgtcgcagtgctgagaccgagacgactcagtgacgagcctatccgaggctatctcgttggttctggtctcactgatccagacggaagccctgagcggcggccttgtcgagcagtgtctgatggctgacatcctgccgactgatcgtggcgacctgatcgctgaaagcgtccaccggacggtcggcttggcgcagatcgtagtaccggtgaacttcctcgtcgaaggcgggcagctggtcgagtacgccatcggcgtcagccgggtaggtgttctcgaagaactgcatcgtgcgcggcatgcgcggcttgacggtcgggttctgatcgggcttgccgatggccagacccagcaccggatacgtgtattccggcagattcagcacgtcgataaggccggggatgttgttgagcagagagccgagaatcacgcagcccagtcccagcgaataggcggcggtctccatggcgtgcagggccagcacggcgtcgttctgagcttgggcgaagcgatgctgtacttgagatggaattcgtcggaagcgggatcgatacccttgcgttcggcgatgcgtgcgttgcggtgctcgtcgatgacgaacacgtacagcaacggcgcggtggcgatatacggctgatggccgaattcggcgagcttggctttggtggccgggtcggtgatacggatggcggaccagtcgttaaggaactggctggacgcggcatgttgggcgacggtttcgagcgtggcgcgggtatcgtcgtcgatggcctcgtccttgaacttacggatggagcggcggcccagaagagcctcgattgttgcgttggtaaccatggctttattgtcgcacggcagacgccggacgccacggtggattacctcacagtgaaatgccgatattgtgtggcggaactgtgctggactgatggttcctgtcgattgactgatggttccttgacgaaattccagcgatgagtcatcagtcagccaacagaaaccatcatccaaccgggggattagcggctgggcttgcgatggcggtggtcgacgaacgccttggagccccgatccgacagctgcgaaaccactgcgccgagtgcggccgaaacggcggcgaatgccagactcattgccagactttgcggcgcgtctgccgccagtcccttgcgcagattgcgtttgcttgtgcccttgtcccatatcatctggaatgctttgccggcaaccaagcctgccagcgctgggactgccgacttgatgagcttgtcgcccagagaatcagggtcgttgagccggtcctcgcgcagcctgttgaccttctcgtcgatgcggtgcaggctgtcgaccgcgcggtcggcgctggaggggaagtcggtgttcgtttcgtcgctcatgactctcagtctaatagcatctcaatcatctcagcgcaaaagatgggcgttaatggtggagtcatgaacgagcgcagactagagtggaggcatgagcgaacagaacgtgaacggcaccgttgccgtcgagaactctcgtggcggcaatggatttttggtgttgctgcgccacggccagaccgtgtggagcgaatccgggcagcataccgggcgcacggacatcccgttgaccgcggtcggcgagcagcaggcagcggatgccggaaggcgcctgcgcgaggctttccccgaaggattcagccagggctgtgtgttttccagtccgctgaagcgggcgtgccaaaccgctgaattggctggttttgcggaccacggtgtgttggacggcatcgctgaatgggattacggccgagccgaggggcgtacgcgccagcaggtgagtgaggccagcggttttgaatgggatgtgtggcgtgacgggccgcgctcgctgacgcccacgctggagggcgactgggtcgagaccttgccttcgggcgaacaggtgccggtccatgccgggcctggcgagacgctggaagaagcggcggcacgcgccaagagcgccatcgacgagattacgccgctgctgaaagacggccataatgtgctgttggtggctcatgcgcacatcctgcgcatcctcacctcgcaatggctgggcgtggacccgcatttcgcacggttgctgcgtttggatacggcgcactactcggtgctcagcgtctataagggagataacgtcatcgaacggtggaacgcctagccccggttgcgctgcgattgcgctggcctgcccgctactgcgggcgggcctttattgtttgtggcgggaattgcggtatgtcgataaatgatttgcaaacgatagcgtcggcgtgttgttttttgatgggtataagtggcaatcgattgccatgaaagatatgttagcgctctcatgattgcgaacgcttgcattgcgataatgaggcaaaaatgactgaattaatgggatatttgttgacaatggcctgaaaatgatgatttatgacgcgccgatattgctatcgtttgcaaaaagaagcaaaccgttgcacaatagtgcatgtcgatagtcgtaaaggtgcgtgctagcgtacctgtcccgaccggggacggccgggtcgacgatgaaagagaaaggttcgatgatgaatcgtacagtcaagtcagcagtcgcgatggcggctgtcgctgcgatgtccctcggcgctttggcggcctgcggaagctcgacctccggcgatgacgccaagggcaaggtctactacctgaatttcaagccggaagcggctgatcagtggaccgctctggccaaggaatacaccaaggaaaagggcgttgaggtcaaggtgcagaccgcggcctccggtacctacgagcagaccctgaagtccgaaatcgccaaaaccgaagccccgaccttgttccaggtcaacggcccggtcggctaccagaactggaagaagtacaccgccgatatgtccaatacggatgtgtacaaggagctcaccaaccaggatgtggccctgaaggatggcgacaaggtggtcggcgtgccgtacgtgatggaaacctacggcctgatctacaacaaggacatcctcaacaagtacttcgcgctggatggcgccaaggccacgtccatggacgaaatcgacaacttcgacaccctgaaggccgtggccgacgacatgcaggcccgcaaggacgagctcggcatcaagggcgcgttcacctccgccggcttcgactccagctccgactggcgcttcaagacccacctggccaatctgccgctttactacgagttcaaggacgacaacgtcaccgagcagccggccaagatcaagggcacctacctgccgaactacaagaagatcttcgacctgtacatcaccgactccaccaccgaacccacccagctgagcgccaagaccggagatgatgcgaactccgagttcgcgctcggcgaggccgccttctaccagaacggcacctgggcctggaccgacctgcagaaggccggcatgaccgccgctcaggtaggcatgatgccgatctacatcggcgtcaagggcgaggagaagcagggtctgaccaccggttccgagaactactggtgtatcaatgacaaggcctccgacgccgacaagaaggccaccgaggacttcctcaagtgggtgatcacctctgataccggcaagaaggccctctctcaggacatgggcttcaccaccccgttcaagaccttcgatgacgtcaaaagcgacaacccgctgaccgaggccgccgtggaagaccaggagtccggcaagacccaggtttcttggaacttcaccatgatgccgtccgaggaatggaagaacaaggtcggccaggcgctgctcgagtacgcgcagggcaccggcaagtgggatgccgtcaagaccgccttcgtggacggttgggcttccgaatacgaggcctcgcactgagtctcatagagtcccatagccgataagcaacaatccgcggcgcccctgcctttccttctccaggggcgccgctttgtattgctgagtctcgcacaaaatcgtccgccgcagaaaagtgtgaggcacgcacccgctcaatcgcacgctgtggggccatgaatcggcgatttttcgccatttcccacaatgtgcgattgagcgttattgtgcggttgcctcacactttttctatggtgggctttgttgtgtgggcctacttaacgcgggaggtggaggagcggaccttcagctgggccgggaacacgatgtagggttgctcaatcggcttctcgtcaatgagatcgagcgtcatgcgggctgccacgcgggccatttccaccggatcctggcggatggtggtcaggccgatatcgccggtgtagaaactatcgtcgtagccgaccagcgagacgtcgccgggcacggagaatccattgcgctccagctggaacataagcggcaaagcgatgccatcctcctggcatgcgatggcggtgggcatctcgtcttggctcatgagttggtcgaccacgtcgctgatttcataacgtccatcgtcatcgaccttgcagacgatgacctgcggctcaatgccttccctgcggcagcaggcggtgaatgagtcgaatcggctttgcacggagaagctcagcgacacctcgcgattggtgctgatataggtgatgcggcgatgtccgagattgataagatggcgggcggccagcgtggagccctgcacatcgtcgatattgacggcggcggtaaagccgcgggcttcgggctcgactgaattgatgccgacgatcggcacgccgaccgaagccagttgtgcgatttcgttgttgtcgatatcgaaagacgccacaatcacggcatcggcgttacggcgtaccggcaacatctcgaagaattccttgcgctcctcgatgctggaaatctggaataccgaaatatcgtagccctgcgtgtgcagcacctcgttgagcccctcgatgaccgaggcggtgaaccacaggcggatatggccgctcatcagtactgcgatgcgcagggcgcggccggatttcagggccgcagccgagcgggagagtgagaaattgagtttgtcggcgatggcgagcacgcgctcgcgggtcttggccgacaccagatccggtctggtgaaggaacgtgagacggtggagatggagacgccggcctcgcgggcgacatcctgaatgctcgtagccattgcagcccccttgcgttgaatggaaaatcgcaatacacatgcacaactgactacagtgtacatgctgattgattgatttgcggcgatgacaacgattgtattacaaacgtttgcaaagtgtctatgacggcgtcatattggctttatatagccattatcttagttgaaagaagattgctggagctggagtatgctcgagattgaaacgctgaaaatgacaacgtttgacatataatgattcgacgtctactatgaacataggcttgaacgagaacaggccgtgcatgcggttctcgatcggcaggctcgcattgagttgaactccgcagccggcgcacgatgcagtgtcgcaacgcagcggactcaaggaggaggaaaagtcatgatcagcatggctggcaaggcgatacgcagatggtgggcgctgttcgcgctccccacattcgccgcattcatcatcgggttcctggtgcccttcatcatgggcatctacttaagcttctgcgaattcaccaccgttaccgacggtgaatgggtggggcttaagaactatggcaaagcgttgaaagacaaggaattcctgcacgcgctcggcttctccaccgcgtttaccatcgtgaccaccatcgtgatcaacgtgatcgccttcgccatcgcctacatgctgaccaaggcgatcaagggctccacgctgttccgctcggtattcttcatgccgaaccttatcggcggcatcatcctgggctacatctggctgctgctcctgaacggcgtactagcccactggggccgcgccctgacctataaggcgtcctacgggttctggggcttggtcatcctggtgtgctggcagcagatcggctacatgatgatcatctacatcgccggcctgcaagccctgcccgccgatgtgctggaggccgcggccgtggacggcgccaacggacggcagaccatgttccgcatcatcatcccgctgatgatgccgtccatcaccgtgtgctccttcctgaccgtgaccaacggtttcaagctctacgatcagaacctcgcattgaccaacggtgcgccgagcaacatgtctgaaggtctggcgctgaacatcacccgcaccttctacggccgtatgggctgggaaggcgtcggccaggcgaaggccgtgctgttcttcatcctggtcgctgtcatcgccctgattcagaacaagctcaccacgagcaaggaggtggcagcctgatgaacgagaacaagcctgtgaagcatggcgcattatggaccgtgctgtttgccgtcgtctccctgttctgggttttcccgatcgtcctggtgctgatcaactccttcaagcagaaggcgtacatctccaagaacgccttctccctgcctgccggcaaggcgttcgtgggacttgagaactatgtgcgcggcatcgagaccacgcagtttttcgcctccttcggctggacgctgcttatcaccgtcggctcggtggtgctgattctggtgtgcacctcgatgtgcgcatggtggatcgtgcgcgtgaacaactgggctgcgaagctgctctacaccctgttcctgttcaacatgatcgtgccgttccagatggtgatgttcaccctctccaagatcgccgacatgctgaagctcaataccccgtggggcctgtgcatcgtgtacctcggtttcggggccggtctggccgtgttcatcttcaccggcgtgatcaagggcatcccgcaggagcttgaggagtccgccatgatcgacggcgcgtcagtgccgcgcatcttcttccagatcgtggtgccgatcatgaagccgtcgatcgtctcggtgtccatcctcgaagccatgtggatctggaacgattacctgctgccgtacctgacgctcgacctcggcaagtacaagaccatctcggtcgccgtgcaatacctcaagggcggctacggttccgtggatatgggcgccatgatggcctgcctggtgctggccatcatccccatcatcgtcttctacttggtatgccagaagtatatagtctctggtgtcatggcgggagccgtcaagggctgacgactcgcgtcgtcagcccatggctggaagcccagtgggcttccagcaggctccaggctgagccgcgacagcggcgaagctaatgatgagcctcgtcgtaggcgagtccgtaattgcagggccgaaggcggagcggtcaagggctgagctccaccaatccggctcccctctttgaggggagccgtcggcggaagccgactgaggggagtatcctgagctccatcaagtctcccctcagtcatctgcgatgacagctcccctcagagaggggagccacaggcgacacaaggagtagttgatgaactggctggcaccggactcgaaattcatgcgcgcgtggagcaatcttgttgacggcgtatggatcaacattctgatgctggtcacttcgattccgctcatcaccatcggtgcggccctgaccgccggccatgatgcttgccgccgctccatcgagggcgagggcaaaggcgtaaccgccaactacttcaagtcattcaaagccaacttcatcaaagccacactgctgtggctgccgttcttggtggtgctgattgcactggtctggtcatggatcgtcctgcagatcacgccgctgctcatcatcaaattcgcgctgaccatcctctggcttatcggcttcgaatgggtgttcgcgcttcaggcacgcttcgagaacaccgtggccggcaccttgaagaacgccttcatcttcggcatctcccacatcgcgatgaccgtggccctggtcatcgtggatgccgtgttcgtggcgctgctggtggccagctggttctacatgcccggtggactgttcctgctggtgattcttggttacggcaccatgctgatgctccatatccccgtcaccgagcgtgttttcaatccatatctcattgactaggcgggttctctcgcgaatatgcggcgatcttcgaggtctgagcgttctctgtccacgcaagcgcggtaaagataacaaattgaggctattcgctgtttgtggtgggtgatggtcaagtggtggtgacggctttgaggtcgagtctgccgcaggtcaggtagatcatggtggcgaagtagtccatgtcgcggaagcctctcgcccgtcgtttgacgttctggatgacgctgtcggcgccctcgagcacggcgttggtgtacgggtgctcgaagtaggcgacgatctcggcgaagtggcgtcggatcatgcgggcgaagtccttcatgggctcgagcctcgagtgcatcatccacgagcacaggcggtgcaggcgcacccatgcctcggacggggtgcggctgtccgtgtggatgtcctgcaggacctcgcgcatccggcaggcgcggccggtcttcaaccgttgcctcgtcaggttgcgcttggtctccacctgcagttcggtcaggctttcctcgttgcacagccacaggtacttggtccgtttgagcagcgggttggagcggccttccgtcttcctgaccttgtcgacggcctcgttggcgtgcctggccacgtggaacctgtcgacgatccgccgcgcatggggcagatgctcacggatgcccttccggaagcccaggctcatgtcgcaggcgaccagacgcacatattccgggaccccgttgtggtccatgaaatcacgcgagaaccgttcgaccgtggtcgagtccttgcccggcgtcacgttgatgacatcgtgctccacgagatcggcgaccacggtgatgtaattgtagcccctgcggctggtctcgtcgatgccgattggcccgtacccgcacctcgtcacagcttgtataatcacgattatactaatcatgatacaataaatcgtgatgcgatagaaatacgccggcgtatggcataaaggaggcgggcagcatggcattcatcggacgagacgatgacctcaagcaactgcaggaatgtttcactgagcgtagggcacagcttgtgttcgtctacggccgcaggcgcgtgggaaaaacagagacgcttattcaactcgcaaaagacaaggaaaccttattcttcgcggcgcagaatgccactaaagatgaacagctggcatcgttctcccgtctcatgttcgaggcgggtgccccgggcaaggattatctgagtcaatatccttcttgggaaagggcgttaaccgagttaacccggctgccagagccgagcgatggcggccgcaggcttgtgatattcgatgagtttccttatctggtcaaatctgatccgtcattgccgtcagtgctacagaatctttgggaccacacgttgcgtcatgcaaatctgatgattgtgatttgcggcagtgccatgagcttcatcgaaaaggagctgttgggagaaaaatcgccgctatatggtcgtgcgaccggcatcctgaagatgctgccgatgccatattgggatgcagcgcaattcttccccaactatagtagcgaggataaggcgctggcctacgcaatactgggcggtatcccgcgttacctagaggaatttgacccagatgagaccatagacgcaaatgtcaagcggcatattctgagacgcattgctccgctatacagcgaggttgaatttttgttgcacgaagaactgcgggaaactgcgaaatataacagcgtgatacgggcgatcgcgctcggcgcaacttcgctgaatgagatcgcgacacacacgatgatggcaaacgcaacagtatcgtcgtatctcgccaatcttatggaactggggattgtggaacgtgagttcccagtcacggcaaagcctaaggagcgggcgaaaggttcgcgtgggctgtatcagctgagcgacaatttcttccgattctggtattcgtttgtctttccgtatcgttcggaattggagcggggcgatgtggaaggcgtatacgagcgtcatatcaagccggtattacatgattttgccggcaaaccgttcgagggtctgtgccgtgaatggatgtggcgtgagagtgctgctggacggttgcccttccgtgcgcgtgcggttggccgttggtgggatcgtcaggatgagatagacgtgatggccgttgacaatgcgtctgatgctgccattgtgggcgagtgcaaattccgcaatgcgccggtggaccgttccgtgctgaatctactgcgagaccgtgctgcgcgaaccggtatcggccagcgaacatacctgctgttttcgctcggcggtttcgatcaatcactggtcgacgatgctgcggcgtctcaatccgacgttcagctcgtcggcatcgatgagctgtttcatgaataaatcccatttgcgaatagctctcactgagtgctcatcagtgagagctattcgcaaatggagccttacttcttcgcctgagtgagctggtaggcggcgaagaggatggccagccagatcacgccggcgatgacggcgatgcggtagctggtggagaagcacatcagcaccacgaccagcgccaggaacgccagcaccacccacggggtcaccttggcaaacggcagtttgaagtgaatcgcgtccagtgcctcctggccgctcagaccggccagctcggaatcctcgggagcgccgcccgcggcgaccaccttacggaacttcatttcggtgagcatgatcatcgtccagttgatgatgccggcaatggtggcaatcgacatcaggtagttgaacgcgaactcaggccacacgaacaccacgaccacggcgatggcggtgatcgcggcggacgtcagcacgccggccactggcacgccgcgcgagttgagcttgcccaagtaagcgggcgcattgccctgcttggccagcgagtacaacatgcgggagttggcgtacaggccggagttgtagacgctcatcacagcggtcaggcacacgaagttcaaaataccggcagccgcgtgaatgcccacggaatcgaagatctgcacgaacgggctggacttgccatcgatggtgttccacggcactacggccatgatcacacccagagcgccgatgtagaacacgaggattcgccaaataatatcattggtggcgcgcggaatcgtggtcttcggatcctcggtttcgccggcggtgatgccgatgagctcggtgccgccgaagctgaacatcaccacaaccagtgccatcagcaggccggtccaggaaccgtcggaattctgccccatcaggccgttcgggaagaagccgttacccacggtgaaccagttcgcgaagcttgcgcgcacgccggatgcggtgggcaggacaaagatgatgacggccaggccgccgataatcatggcgatcacggccacaatcttgatgatggcgaaccagaactcgaactcaccgaatttagagacgcccagcaggttggcggcgcagatgatcaccaagaacacggccgccgacacccatgtcggaatcgccgggaaccagtagttcacaaacgaacccaccactgatagctccaccatcgagacgaggatgtagttgaaccagtagttccagccgga

SEQ ID NO: 453 - DNA, 33850 bp, Unknown
  R48_24m  MAG No. k141_21887
cggcgccctgatcatgggcgtgctcaaccagggcctgtccatcatgggcgtggacgccgcctgggtcaagaccatcaagggcctcgtcgtcatcgccgccgtcgcctacgacctgctctccaagaaaaagaaaggctgagcgtggtgcatcaatcgtgatcatgcctactgcttgtaatttcggctagacatggtcatcaaatgagggggatctcatgggattcacttcctcttccaggggtgtcatgattgcagtcacgataccccattactaaatattaaatggtctttcgctgtttggtgtgggtgaggccggtcgtgtggtgataccggtcggctagtttggtggtatggataccacttcgttgttcaccgccgccttgtagttgcccggcccgtggagtgtgtcgggcgtggagttccgcgacggggaggacggcaaacgcgaactgcatgtcgcgatcagcttcgagtctggctcgcgcttccactgccccgaggccgggtgccgtgaggaggcatgcccggtgcatgacgtgcgggagcgcgtgtggcgtcacctgaacttcttccagtacaaggcgttcatccacgcgggagtgccgcgcgtggcgtgccccgcgcatggcgtcagggcagtgccggtgccgtgggcgaggccgggcagcggtgtccgcgctcctgttcgaggccatggtcgtggaactggcgaaatgccagccggtcgcggacgtcgccgaacaggtcggcgagcacgacacccgcctgtggcggttcatcacgcactacgtgcgggaggcgcgcctgtacgaggaccacgcgggcgtggaggcgatcggcatcgacgagaccagccgacggggacacaactgcatcaccgtggtcgccgatttggtggaacgcaacgtgatcaacgtgacgccggacaaggacgcgcataccatcgaacggttcgcaagggatttcatggaccacaacggcgaccccaaccgcgtgcgcccggtgacgtgcgacatgagcctgggattcgccagggcatccgccaatggcttcccgacgccgccaaggtcatcgacaagttccatgtgatcgagcacgccaacgaggccgtcgacaaggccgggaaggccggggccgggagaacggcctgttgaaaaggacgaagtacctgtggctcaaaaacgaggcgaacctgaccgaactccagcttcagaccaagcgcggcctgcaacggcaacggctcaagaccgcgcgcgcctaccggatgcgcgagaccctccaggacatctacgacaccagcgccaaccgggtcgaggccgaggacggtctcaaacacctgtgctcatggatgatgaggtcacgcctggaacccatgaaaaccctcgcccgccagttccaccgccactgggacgacattctcgcctacttcgaccaccggcacaccaacgcgatccccgaaggcctcaacagcatcatccagcacgtcaagacccgggcccggggctcccgcaacatggagtacttctccacgatgatctacctgacctgcggcaaactcgacctgcgaaccgtcaccacctgaccggtccccacccacaccaaacagcgaagggccaattactgaatgtgcaagaatcggtgtcttcacgtatagtcgggtgctatggagaggtcctacataacaatcagcgacgtggcaaaatgcgcgggagtctctgtctccaccgtttctcaggtgattaacggtaagggacgtatctctgagcccacgcggaagaagattgaagcggccattaaagagcttgattatattcctagttcgatggcccgtacaatgcgttcatcgcgttcgtatacggtaggttttctggtttcggatattcgtaatgagttttttgcgaatttggctcatgcagtgcagagcacattatttgcatctggatattcgacattaattggatcattttcaaatgatttgcaacagcaagacatgttactgcgtcgattgttggctgagcatatcgatggagctattatcgtgccgcaaggtcctgatagtgaggcactggaatctcttctacatcatgggctgccagtgatttttgttgatcgtcctgcggccggagtgcagggggttcctctcattgcttcgaatccggagcaaggattgctggaagcgttaattgatattcgtgatcatggacataaaaaagtcggatttgttagcggaccgtctgccatttccccggtatttattgagcgtgagcgtgtctttcgacgttttgcctcagcattgttcggagagagcaatttatattttgccaattatgatccatacgggtcgagagatgtggtgtgtgaagaaattagtaggttgtattcacaaggggtgagtgcgttatttttcgctaattctcctttgaccttagcaggcatgggggcgatgcatactctgcatctgaatgttggtatagatatttccatcgtctcattcgacgatgtggaagtattcgaattgattactcctcggatatcttcgatttctcagcaggtagaacaaatgggagtgaacagcgcgcgaaagattctagagatgattgaaaacgggtcttctgacgataatcttaatcatatcgataccatgtatatcgctagagagtccgtagccgatgcgccaatacccgtctcttgataaaaaaagcggcgcaacattcccgggaaagtagcgctaatagaggggaatacgggcatgctagcgcaacattccttggaaagtaacgccaatagagggccatgtgggtgcattagcgcaacaatcccgggaaagtggcgctagccgcgtctctgcggtgattgcattgtggggggtagccgattgatgctaagcattgacagcattgacaagttgatgtgcccgttgccgtgagaccccgagtatatcgcctatttgctgtagggcgagacccatgccatgtagttcttgtgccgcggcgcgagtttcccgcgctgcgttcgatctgcattccgcttcttccttgcgcagtcgccgagcttcatcaaggtgctcttgtacggattgcggcagttttgtctctatggtgagtgcgaaatcagcatcttgcgtcatgacggtgataaggtcgcgtgccgtactttcaatctctgctgttgttcttgcctgcgtgaaaccgataccgggaatctcgagaatccagtatttttcgccaggacgaacgatgacctgatatgttttcactgctgataccagcctttcccgagtttggcttctgcttccttacaaatgatgttcgcgaggtcgttgtcgatttcgttatggcgtgggatgggaatcatgagtccatcgagttggaatatctcatgactccctctttgcctgatactctcaaacgtaatattcttgcgtttcgccgcttgcttcatcagtttgatgagccatctcctactcgtcattatattgttaactcctttcttgacaactctgtcaagtgtggtatttacttttaaccgccgaacgtgctgaactcggtggtgcgctcgccgggagcaatggttgtggactgggtcatgcggccttggtaatagcgggtttccttgagttctccgttgatgacttcctgaaaatgcgcttcgtggcgctgcacggcgggggagccgaggtcggtggcgttctgataagcggcctgatggtatttgagccaatgcgacaactccctgccgttggtcgaaccagccacggatgcggcgtcatatggggtcagaccgttgatgggcgttgcgccgggagtgcatgagacgtccgaatgcactgtggatggtgttgccgcgggcgcgggcgatacatgcccttgcacggtgagccaattatcggtgaccgggttggcggcaccatccagcgcggcgaccagttcatcatcgatttccacgctggtgacccacgtgcgttgcggaatcggatgattggccaccggcgatccggctgtcaccacatgctcgatggtatattcctctgcccaatccgaggcaagcgtggcggcaacgatgccaccttgggagtggccgatcagtgccacgggctcgtccttgccgataccagcctgacgcatcgcctcggcaaccgtgcgagcgctgtccgctttcctgcggcgctcctgatcggcgctcatcagttccacgttctgcgcccagccgaatggtgagtcaggttgtccatcggtacccgggatggtgaccagccaggagttggttccatcagcccgttcatagcgttgaatggcgatggtcccatattcgagtccgctgttcagctcgattttgccgagccgttcttcggcgagcctgcgcagattctccattgactcggccaccgatctgcttgcacggacgacgtcggcattcgcctgcacctcgcgcacgttcagatgattgccttggacgacgtctttcgccgggccggagaaattggcgattttccccgcagccttgttgacctcatcggtgtgcgcaatgctcttgccaataggtacgccgccaatgattccgcccgcgccgctgagcactccttcctggaacggataggtgaacgtggacatccatgctgggttcggtttgccgtcaatagcccagccggccagaaagccgcccgccgccacagcggcaacacccaccgcggcatatcccggtttggcctgtgtaccggcctgcaataattcggtaaacatgcgccgagccgtcatctccgcctgagaatacagagagtgtgcgcgaatcagcagatcggccgcgccacgcagatcatcgctcaaccgctgacatgccgttgcatggtcataacaccgattgcccagcgcggcatatggtgcagtgacatggccgggaacaacggcgctcggatcgcccgactgcaaggtgacgcacatcggcgcactatgccgatgtgactgcaactgtaatgcggccgattcccaagccgtggctatggccgcaaatcctgccgcctcgtcatcgagagccttggctatggcggcatattcttcaagagtggctggcgcatatcccactccgccgtaaacggacgattccacctgccagtaatcgtgctcgctcatgatgacccccaagccaatcggtgggtggtctccatgtcttgcgcgagactggccgaatactgtgcggtgcgactgagccgcgatcggaatagatcggcggctttaccggtccacacgatgttgctggagcggttcacggccaccgccgtctggtccgattgcgccagtgtggccgcacgctggacggacacgaggtcgcgactacgctgtaccgccgcatggcaagggcaagtgccgtaatcgaacggcgtcaccgtattgccggcaaagccgccggtgggatcgatgggtgctgggttgctggtgtaggtattcatatatccagctaaaaggacaagactcatgcttgtccagccggaacgaccaatgtggttctagcttgccgattttgggtgaagttatccccaagtgttgtgcatagtcgtaacgattatccacaaatagcctgtttggacataccttggatcagccatggcctatcgaaaattggataaatgccaaagccgacagccgaaaccgggaaacagccgcgataaagccatgacccgtgagggtgtgagaaaaaagaacaactgtgaacgactgcttaccacggcttggtagccccggtacccttgttctgcgtcgctttctgcttggattgggtggtgttcgactgggtatcggtggattgctgattggccttcatcagctcctcgacctgcttcttctgttcgtcggtcaacgcgccgccctttttggcattggatgaggtactctcggattgctgtgccgactgggcttgcccggaatcggaacctctgttctgcgcctcggcctgtttcaaggtgatctttgtcagctcggaagaaatcgaagcattggtgtcgatggcgtccttgacttgcggcaacagaagcgtgcgcattcgcccggcctcggcgaattgcgcatcggtctgctgctgttgcgccttgagcgtggtgatatccgcggactcgtcctgagccgctttgatattggcgttcaatgatgcggtggcctgattgaacgtaatcgaagcggacaggtttactgccgccacgccggcaaccagcaacagcaatacggcgccacaagccaggacgatacgtgcccaaagcgggcacttcgcccgcatccgagtattcgccgagtcatcgttctcgtggatttcgttactgtttctcacagcagtctccttgaggttgcgatccatgcaccgacttccatggcaagcaatatcgccaacgcaatggccagcggccataccaccggcgtggtgcgtgtgcgctccttgaccgtggtggtcatgcgccactgcttcgatgacttggccgaaaccgaatccgccaaagtctgtgaagcgttcacggccacatacgtgccactgatctcgtcggcaatgtctttaaggttcttctcatccatcttggagatgccgggttcgccggtatccgggtcgaccacccagtggtccgtggtgttggaatcgccggcactgacgccatcggcgatgacgggaatcttgccgccctcggtcgagccgacgcccacggtaaacccatcattgagatactggcgcagtgacgagaacgtacgacgcgtcacattcgaggtctgttcgccgtcagtgatgaggtacagcacaatcgcatcatccgggtgcgcttcacgaatcgacttcgcggtcagcagcaattgatcgatcggagcatccagactggagcccgccgacacggatgtggcttccaccgccaacgtgttggcccaattatcgatggccggcgcatccggggtcagcggcacatcaagcgttcccgaagcaccgaaccgtaacgccgcgaaactggcgtccggataagcggcggtcacatcatgcacggcctgacgtgcggcatcgatgcgggtaatggtcttctcggacccgtatgtggcatcggccaccgccatcgacccggtggtatccaccgccacgatgacgtcggtggcattgatggcctgtgaggtggtagacgataccacgctgggagtcagtaccatcaccgcgacgatgagcagcattagcgtacgtcgtatgcaagcccacgcggtctcgtcactggaagcacggcgacgaacaaacaatacgatttcgagaatggccagtacggcgagcccggccgccagcagtccgccggcgacccagcccaaggcgggggagaaggtgaatccgttcatcgcctcaacctccatgcacatacgatccagataatgagtatcacggccagagcaagcgtccacagaccgggagcgtccaccattgaggatttcgccttgttctccacatccgtatctctacgtgactgaatatcccgtaccagctcatctatcgacgtgccattcgattgggtgaggaagatgcctccatgcgactcgatcgcggacttcatatccgttgtggtttggtccgattcactggctttcggcccggaatacaggccgtccacggtgattttggtctgctgggtcaagtccaacgcttcggtcagcgaataggtgggcttgcccgacacgacgttgtcggtggccagcacgatggatgccgcacgctgacggtcggcatccgcatgattggcttcgccataagcgaaaccggggagcatcgccgcgcaagacaccacgccgtcgccaatcaaggaggtggcgtccttgcggttctgcgtgccttcgagccaattggcgatgtcctgatattcggcatcggacatcttatcgatgtcatcctgcgactcgacgcctttcagcgccttgctggcggaggtcaactgtttggtgaccagttcgtagtcgtcggtcagcgggaacaccgtgcgtgaggtcgagttgaagatactcaaaccgatacgttccccctcgaaatgcttgaccagttccaaataggtatcgatgacctcgcgatcataggggagcgtggaccccgacacatccagacacaggacgatatctcggctggaagcgcgttcgtcaccggcatccacttggctggggcgagccaccagcacaatggccagcgccagcgcaagcaccagcacgctgatggcgagacggcccaaagcgcgccattgacggaacaggcgggaagcgtgctcggtattgagatcgtcgtccatcgagaatacaggggtgtcgtcggcggcgttacggcgggcgaacacgacaatcagcacgataatcgccagcgtcgccaagacgccggccagagcggcccaaggccaatgccatgccagcatcatgaacgccacctttccaccagattcgccacccactcggcggcctgctgcacgctggtcgtctgggcgattcggttgcgggcatcatcggcaaattccggtggatacaacgcgccaatggtctgcttcaatgcgtccaatccttggcgattcgcgggcgtgcgattcaggtacgccaaatcggtcagcgtactggaactaagctccttgcctgatgcggcaccggcgaaatcacgggcgatgacggacaattcgacgaaagcctcatgccggggcagtgctccggattcatgacgggccaccacatcgtcgatgcgggcacgccactcggccttggagctggcattgctatgagcgccacgcgcgcggtcgctgttccgaggtttgcgtgcggggcgagacagcatgatgatcaacgcgatcagacctaccgccagcaacaggcatgcgacgatggccaccaccaggggagtggtcaaggccaacgactccacgggcctgagatcgccgggatcagtggcgagcgggatgatggggaacatgctgtgcatcatagatcaccagccaaagtcagtccgaccagttcgggtgcagtacccagtctattgcgtgtggtgcgggccaatgcccgggacaccagggcgacgaaacgatcgaacatggattcgctggatgcggatcgaatgatatgggaaccggcacgggtgagctcctgttccaaagccgcggccatatacgcgcgatgagtatcgacctcggccgctgccttggcgttgcgcaggaatgccggcacacgccgtgcactcaagccgtcggtgggagcgtggcgggatgagacggccttgaacggattcatcgtcgccacatcgatcagcaccatcggatgggtgcgggtaatacgacggatcgtggtgatatgccgctcctccatcgcatgctcatcggtggccaatacgatcaatgcctcgcgatccttgatacggcgcgcatattccagcagcgcgtcgatattacggtgatgatcccaatcacggtcaagcgccttgtccagcgtgcgttcgaactgcgcgaacccaccgttgaacggtacgcgggtgatgctggactcatcgccgaacaccagcgaaatatcgtccgaccggcgcaacgacagtgcggcgaacatacgcagcgcattggcggcaacctgccatgcgcgttctccggaagggcatacgccagtcatctccaggccaacgtccatcagcaaccagacccgtgacgtcgacaggcgctcgcgctcgaccaccatggggcggccttggcgggcgctggtcttccaatcgataagacgggattcgtcgcctggctcataggcatgcacatccatcgcatcgccgctgccgccacgacgcccggatgcgtgttcgccctccagcacgcccaaagccttccttacggtaggcaggctcagctgagtgccaagggcctcgattttcttgcgaacggaatcggaactcacggaacaggaaccgtttcgacgatcttgtcgacgatctgatcgctgaccacgccatcggccagtgcctcgaacgtcagcataatacggtggcgcagcacctcatgagcgaacgccttgaggtcctcgggcaccacatagtcgcgcccggacagcaacgccttcgcctggccgatacgggtcaaggcgatggtggcgcgcggcgaggcacccaaacgcaccaaggacgacagtcccttgatggggcgggagccggcacctcgtgacgtggcggtgatatcgaccgcataacgcatgatcgcgtcggaaacatgcacgcggcgtgccgccttgcgcagaaaatcaacgtcagacacggaaatgcgttcgccggtgatggtgtcgggaccgatcatatcggagccacggtgggtgagcatggccagcatgcgagcctcttcgtcgggcgaaggataggtcatgacggccttcatcatgaaacgatccatctgggcttcgggcaggttgaacgtgccctcctcctcaatcggattctcggtggcgatcaccatgaacggcttgggcaaggcgatacgctgcccgccgatggtcgtggcaccctcggccatggcctcaagcatggcggactgggttttggcattcgaacggttgatctcgtccagcagtacgaaattggcgtgaatcgggccgatctgcgtggtgaacttctgtgacgcaaaatcgaagacctgcgtgcccaccagatcggatggcatgagatcaggagtgcactgcacgcgtttgaacgagccggatacgcaggtggcgagcgtctgggcggccgtggtcttggccaagcccggcacggattcgataagaatatgcccgccggccaccaaggtcacgataagcgattcgcgtagattatcctgacccaccagtgtctgggcgaacctcgcccgaatggcgtcggccaggatacgtgcgcgtttggcgtcatcggcacccagcggagccgacacgccgggcgcgggaacggtgaccggtcgtgcggcggtggtcggcgaaggtatgttcggttgcgtggggaacaaagtcatgccctcactgtaactactcacaatgactgttggtctgtctaaagagtccaatccaccgggtcggcacccatggtgactagggcttgattggctctggagaatggtttggagccgaagaatccgcgggaagcggacagcggactcggatgaggcgatttgataatgaaggcattggtcagcaatggctcgaggctttgcgcattacgcccccagagaatcgccaccagcggcttgggcttgccgtcggcgtccgtgcgcgcgttcaacgcacgaatcgcggcctcggtgacttcctcccagcctttgccctgatgcgaattcggtcgcccgacgccgacggtcagacatctgttgagcaacatcacctcacgttccgtccacggtgtcagatcgccgttggtgggcatgggcaccccaaggtcgtcaaccaattccttataaatattgaccaggcttttcggcagcgggtgaacattcggcgccacgcagaagctcaaacccaccgggtgacccggggtcgggtaggggtcctggccgacaatcagcaccttgatggaatcgaacgggatggtgaacgcgcgcagaatattgtggcttgccggcagccacgggcgcccggcggcgttttccgcacgaagaaaatcgcccatatggtggatggcgggctccacgtcggccaaggcatgggcccaccccggctctaccagttcgctcaatggtttgatcatgactcaccactgtagtcaaacgtgcatatccggtgcacgaggcgtggtgtggtggactgatgagttgtttgccgattacactcatgggtagttttgacaggaagaaagggcgattatggcacgcgacatgatgacctacgaatcctatgaaccggattccttcgacaatcctccgaagggaccggtgggagttcaccgtggcgctcgttcggcagtggcccgcctctgcccgttcatcgtcgttattctggtggccgcactgtgcggtgtcggggtctgggcatggatttccggggaatacaggaatgcaataggaggatcgtcccagactgcgaccacgtccgggactgcttccaagtccgattcgtccagcaaggctgggaccaaaaacagcaccaaggatgattcctcgtccacttcgaccgatccgtccaaggactcgacttcggattcggcaaaatccgataccaacagtgatacgacatcctcgaatgagaatcaagactccgatcagcagtctcagcagtccggagccaccgcgactgtgaataaggccacgcaggtgcgtgtggtcaacgccacaggaatccaaggatatgcaggtcagcaggccgatgtgctgcagaccgccggttacaccagcgtcgaggcgaccaatccgcgcggcacattgccggcttcttccgtggtatggtatcagaatgaagccgataaagccaccgccgaagatgtggcgaccacgcttggcatttcggctgtggagcaggtgcaaggactcgccgttcccattacggtggtgctgctcaactagcgttgttgatgcgcccctgatatcggcgtggaatacatcgaaaactgtgagcgttctcacgtctatgaaataattcgtaccgaaaatgtgccactgcggttgggattgttccctcgtcactgtacaattgtcatctagtcgcgaggtaggggagcgcgatgcggttctttctacgttccctataggttttgtgtcgcgacgcctaagggaacaaaggaaagatcagatatggcacaaggtaccgtgaagttcttccttgccaagaaggggttcgggttcatccagccggacgacggcagcgaggacgttttcgtgcactacgcggaaatcaaggacgacggcagcaccaataagttcaagatgctgtacgagggcgatcgcgtggagtatacgcccgcttcgtccggcaaaggcacgcaggcaaaggatgttgtcaagctgtcttcgggtgaagcccgctccgagtgagcaacacgcacgcaaggatgtgcattgaaggccctgaccgtttcgacggttggggccttttcatgcccaaagcgcaatcgccgccgatgatgttggcactcggcggtcgcgagtgctaatgtctgggttagcactcggaggtcgagagtgataatcggcagctgacggctggtcgtcacgactcgacgcttgcgagtgataaccggtatacctagccatttggaggaatacgcaaccatggcaaagatcatctcttatgatgaggaagcccgtcagggcatgctggagggccttgacaagctcgccaacaccgtcaaggtcaccttgggcccgaagggccgcaacgtcgtgctcgacaagacctacggcgctccgaccatcaccaacgatggtgtgtccatcgccaaggaaatcgaccttgaagacccgtacgagcgcatcggcgccgagctggtcaaggaagtcgccaagaagaccgacgacgtcgccggtgacggcaccaccactgcgaccgtgcttgctcagtccctggttcacgagggtctgaagaacgtggtcgccggctccaacccgatcgccctgcgtcgcggcatcgagaaggccaccgaggtcatcgtcaaggaactcgtcgccgccgccaaggacgtcgagaccaaggaccagatcgctgctaccgccaccatctccgccgccgaccctgaggtcggcgagaagatcgctgaggctctggacaaggtcggccaggacggcgttgtgaccgttgaagacaacaaccgcttcggcctggacctcgacttcaccgagggcatgcgtttcgacaagggctacatcgccccgtacttcgtcaccaacgctgacgaccagaccgcagtgctcgaagatccgtacattctgctgacctccggcaaggtctcctcccagcaggacatcgtgcacgtggccgagctggtcatgaagaccggcaagccgctgctgatcatcgctgaggacgtcgacggcgaagcactgccgaccctgatcctgaacaacatccgtggcaccttcaagtcctgcgccgtcaaggccccgggctttggcgaccgtcgcaaggccatgctgcaggatatggccatcctgaccggtgctcaggttgtctccgacgaactgggcctgaagctcgagtccgtcgacacctccgtgctcggccacgccaagaaggtcatcgtctccaaggacgagaccaccatcgttcagggcgctggctccaaggaagacatcgacgctcgcgtggcccagatccgcgctgagatcgagaacaccgactccgattacgaccgtgagaagctgcaggagcgtctggccaagctggccggcggcgtggctgtcatcaaggtcggcgctgccaccgaggttgaggccaaggagcgcaagcaccgcatcgaagatgccgtgcgtaacgccaaggccgccatcgaggaaggcctgctgcccggcggtggcgtggccctcgttcaggctgctgccaaggccgagaaggccgaggccgtcgcctccctgaccggcgaagaggctaccggtgccgccatcgtgttccgcgccatcgaggccccgatcaagcagatcgccgagaacgccggcgtgtccggtgacgtggtcatcaacaccgtccgttccctgcctgatggcgaaggcttcaacgcagccaccgacacctacgaagacctgctggccgccggtgtgaccgacccggtcaaggtgacccgctccgctctgcagaacgccgcctccatcgctggtctgttcctgaccaccgaggccgtcgttgccaacaagccggagccgaagcctgctgccccggccgccggtgccgacatgggctactgatccgcaagcgatcgctagctgattgagctgaaaggggactccttcgggagtccccttttttgtattctggctcccctctttggggggagctgtcgaacgcagtgagactaaggggagctgcggtgtagggatactccctcagtttcgcttcgcgatcgagctcccctcagggaggagagccaagaaactagctggcaaacaggcgcgaagcttggatttcggcgtcagcgtacacggtggaggcttgcgtcagcgagcgttggatggactcgagtgaggcctccatctgctgttgggccgcacgccactgttcggctaccgcggtgaactgggtggccgccgaacctcgccatgcgtcctgcaaggcattgagattggtgtacatgccgcccacggcctgcctgatctgcgagatcgaagtggccactgcggccgaggatgattggattcgctcggaatctacctgatattggggcatcgttgctccttttctagagggttaatggtatgtatggcggccgcttgccaataccggccgctaaggtggaggatatgtcaacaacgaatcgggaagacggaaaaacaactattgtggtcctatcttcggagccgtcctgttcggccttcgggaatatggtccgaaaatggcttgtttgtgccatttgcgcccttgctgcagtagcgatgaacgcaatgtggataaccgcaaatgcctatggggataactcgggcgacagctctgacagctccagcagcagcaccgacagcggcgtgaccatcaccgagaacatcacggatacggaaaatctcctgggctcccatgcggccgaagtcgcggatgccatcgccaaaaccgagaaggaaaccggtgtacacgtgcatctgctgtatctttccagtttcaatagtcaacagaaaccggaagactgggcggcaaccgtgatggagtccatgaatcccaagccgaacacagtgatgcttgccgtggcctcgaatgacggcaacctggtggtcgtcgtgtccaagaactccgataagtggcttctcgataacaaaaccgtcgataagctatccgaagccgcacagcagccgttactggaaaacccgccgagctggtctggcgcggcaacggcaatgatggatcaaatcgtgaaatccaaaaaagcctccacctcatcatccacggtgaccgtaggcataatcatcatgggtgtggtgttggtggcgctggtcatcatcatcgtggtcatggtggtgattcgtcggcgcaaggagatcaagaaggattccaaggccgaactccaagatgacattcaggaaacgcccagaagagcgcgacactctaggaagcatgagtaagcctattgaagcatcgattgttgttgtcgacgacgagccgtccatccgagaactgctggtcgcttccctacacttcgccggattcgaggtaaacaccgccgcttccggttccgaagccattgaggttatcgaaaaagtgcagcctgatctcatcgtgttggacgtcatgctgcctgacatcgatggatttaccgtcacccgccgcatccgccaggaaggcattaacgcccctgtgctgttcctcaccgctcgtgacgacacccaagacaagatcatgggcctgaccgtcggcggtgacgattacgtcaccaagccgttcagcctcgaggaagtcgtggctcgcatccgcgccattctgcgccgtacccgcgaacaggtggaagacgacccgattattcgcgtcgccgacttggaaatcaacgaggactcccacgatgtgacccgtgcagggcagccggttgacctgagccccaccgaatacaagctgcttcgctacctgatggacaatgagggccgagtactgtccaaggcacagattctcgaccatgtctggcaatacgactggggcggcgacgcagccatcgtcgaatcgtacatctcctacctgcgcaagaaagtcgacggcatcgaggtcgacgacggcgaaggcggcaagcgcaaggtgacttcgctgattgaaaccaagcgcggcatcggatatatgattcgcgaaccgaagaactagtcgccccatccataacgcatcgcaatctcatgagtatccccgataagcagtcaggcggcgtaccgccgagcagcacgccgaacgccgctccgaacacgaatcccatgcctgcaatgccgccgttcgccgcccatttccaagagcggcgcgagcgtaagaaaaacatactgatgcggcatatcgaccgtatctcgttgagcagcaagctggtggcctgcaccatcgccgtgctgcttatcggcgtgtcggtgatttccttctccatccgcgcgttggtgaacaactacatgctgcagaaaaccgacacccagttaagctcgcaaagccagctggtggtcaacaatatcgatctgctgtcaaaaaatgactcatcggggccgaactcgtactttctgcagattcaatataccgacggcaccaaagacaaagagggcaatcctctggtcgtgaccccgctgatgccgcagatgcaggacggtatcgtatcggtgccgattcttcctacctatggtgataccagtggcatcacgctcggccaggcattcactacgcaggcagtggccaagcagatcatcacggtgcagtccgacagtgcggacagccagaacgatccggccaacggaaactccaattcctctgacaccatcgccaaggtactggccaaccccactgtcaatgccaaccatgccgccatcgtcacggcgagggcaccatggcgtattctgccggtgaccttccagcaaaacggcaaggaccgtgccgtggtgtacatcggcttgtcactggccgaccagatcgacaccgtcaacacactcacccgatactgcattgtggtcggcatcgccgtggtgctgctcggcggctccctgtccacgctgatcatccagcacacgatgacgccgctgaagcgcatcgagaaaaccgctgcaaagattgccgccggcgacctgagccaacgtattccttccgcgccggaaaacaccgaggtcggctccctggccgcctcgctgaactccatgctcacccgaatagaatccagtttccatgaacaggaggagaccaccgacaagatgaaacggttcgtctccgacgccagccatgagctgcgcaccccgttggccgccatccatggctatgcggagctgtataagatgcagcgcgatatgcctggtgccttggagcgtgcggacgagtccatcgaacatatcgaacggtccagccagcgcatgactgttcttgttgaggatctgctgtctttggcccgtctcgatgaggggcgcggcatcgatgtgaccggcacggtgaaactctcgtcgctggtcaccgacgccgtcgacgacttgcatgcgctcgacccggaccgtgccgttcgccgcatgcagatttccctcgaaccggcgcgcgatttgaacaatcccgccgaattcaaccttgccgaaggcgattggcccgaggtcgtgctgcccggcgacgcctctcgactgcgccaggtggtgaccaacatcgtgggcaacatccaccgctacacgcctgccgattcgcctgccgaggccgcgctcggtgtgatgccggccgccatcgatccaagacagctcgctcgcatgcccgccagcgacgcatcaatgcggcggttcatcgacgccgccgaagtaggtgcctcgatgcagaccggctatcgatacgccgtattgcgtttcgtggaccatggccccggcgtgccgcctgaatcgcgctcgaagattttcgaacgcttctacaccgcggacccatcccgtgcccgcgaaaagggtggtaccggtttgggcatggccatcgcgcaatccgtggtcaaagcacatcacggctttatctgcgccaccggcaccgatgggggaggcctgaccttcaccgtggtgctgccgattgagcagatcgtcgctcctgagcccaagcggcccaccggcaaaaccaaggacgccaaacagaagacttcttggttcagctctgagcgtaagactcaggcgactcagcccaaagcgtgaggtcaagccctgtgaggtaaactgtaccttcggtttactatttccattgaggattaaggaaggttcgcaatgcccaccggtcgagttcgttggtttgacgcagccaagggttatggcttcatcaccagtgaggaaggcaaggacgtgttcctgccggctcaggccctacccactggcgccaccacgttgcgcaagggggccaaggtggagtattccgtggtggacggccgtcgtgggccgcaggccatggatgttcgcctgatcgcctccactcccagcttggtcaaggccacccgcccgaaggcggatgacatggccgccatctgcgaggaccttatcaagatgcttgatgcggccggcaatacgttgcgccgtcaccgttacccatctgctgccgacagcaaaaagctggccacgttgctgcgtgcggtggcggatcaattcgatgtacaggactgatctgatctatgactgataccaccgaaaccatcgtgacaccggaccctcacgccatcgcgcgcgccgtgctgctcgaagtggccgacgagagcgatcaggtgggggatttcgttacctcatatgatcttgaggatcacgtcactgacttccgcttcgccgcgaatatccgtggctacgaaggatggcaatggtcggtgacgctgtatcacgacgaggagatcgactcctggaccgtcaacgaatcctccttgatccccactgagggcgcgttgatgccgcccaagtggattccttggaaagatcgccttgagcccacagatctggctcccaccgattcgatcggtaccgatccggatgacgagcgcatcgaggaaggcgaagtcgaggaatcctcgctgcaggatgtcaacgatgccgtcgagaccttccgactgacccgccgtcacgtgctgacctcgttgggtcgtgcgcaggctgccaagcgctggtatgaaggtccgcgaggccccaaagcgttgagcaccaaaaccgccgaaggcaacctgtgctccacctgtggtttcttcgtgccgctcgcgggcgaactcgaccgtatgttcggcgtgtgcgccaacaagtggagtccggatgacggccgcgtggtctccctggaccacggctgcggtgagcattccgaaatcgaacctcccgagccaagccagctgtgggtgcagtccaagccagcctttgacgatctgcatatcgacgtggttgccaaccgtccgtgcaagcaggagcaggttgcccaggacgaggccgaaggcgaaaccgacaagacaggcgagcctgccggtgatgatatcgaagcacagaagactgttgacgggaacgccgtcgatactgagcccgctgaggaggcggcaggcgacgggacctcgcaatcccagtctgccggtgatgagtctgttgcacagaacgcatccgattccgttgtggatgttgatgcagctgattccagcgacgagtccaagtctgatgctgacgacgaggccaccgaagaggacatcctcaacaacaccgttgccgatgatgatgaggatgatgagatggacgacgaagaggataacgttcgtccttcagacgatgtgactcctgaactcgaaaccgtcatcgatctcattgagcagctgcgccagaacagggcggacgaggaataaaataaacgccaatcctgctccccaacagcagaatgtactctcggatcaacttataggtctcagcgaagatgtttcctaaaaagtagatggtgatggggttgcaggaataaagaattcctccctgcaagcccatcaccgagacgtgcgttagcactccatgccgatttcggtgcatcagtgcaccacagtcaccgtgcattcggcgaagttcacgatctgacgggacaccgatcccaggaagtgcgcgtccagaccggacaggccgcgcgaaccgaccaccagatggctggcgtaccgagatgccgcaatcagccccttggacgcgggaatatggaaggcattcgcgctgaccttgacaccatcgggaatctcggccttggccatcagcccggcgagaatctcctcggcgcggcgctgaccgaccttcaccggtgccacggcgttctcatagcccggaataacgcccaaatccttgagctgccagcagaacatcacatgcagcggcgcgtcgtgcagtcgtgccttttccagcgcgaagtcgaacgcgcggcgggaagtctcggaaccatccacaccaaccaccaccgggcggcgagccacctcgaccacgggctgtggctgcgtgtagtggaccggctggtctcctggcgtcagggcattggcgatggcatcggtcacggtctcatcctcgctgccggcgatgcgcaccacggtcaccggcacttcggcggcctcggccagcgaagcggacagggaccccatgaaccagcgggccacacggctcagcgagcggcggccgaccacgatctgctgcgcatcatggccgatctgcagcagggccgaagtgccggaggccttcaccgaggtgagcttcagattcgccggatcgaagtcgatgcctgcagcggccttgtcgacccacacacgcagctcgttggcgatgtcgtggcggaccttggcccaggcctcgtcgctgtccggttcggaacccatatcccacgaatgcgtccagccaaacacggcgttgacgctctgaccggttaacgaagcctcctcaagcgcccacttcagcgcggcaaaggattcatcggaaccatccacaccgacaacgatgtcgggcttggttgcagcttcactcatttcgagcctccttgtaatcgactacgggtgaatctagaaccagcatatcgttttcttctcctctcacggcgcaattcatggaatccgatgaataaacgtcatcgtgaatcggtagagtaagacggaatgtcaattgaggaaggacaagcatgttcgaacggtttaccgaccgtgcacggcgcgtgatcgtgttggcgcaggaagaggcgaggacccttcagcacaactacatcggcaccgaacacctgctgctcggcctgatccgcgaaggtgagggcgtggccgccaaggcgctcgcctcgaagggcgtggagctggatgccactcgcaagcaggttgaagaaatgatcggcaagggcaacgcggctccgaacgggcacatcccctttactccgcacgccaagcaggtgttggagttctcgctgcgcgaagccctgcagctgggccacagctacatcggcaccgagcacatcctgctcggcctgattcgcgaaggcgaaggcgtgggcacccaggtgctcatcaagatggacgtcgacctgggtgagctcaggagcgcgaccatcgatatgattcgcggcaactccggcaccggcaccggtgacggcaagggcgatctggccaacgccggcggcgtgacagacaagcagaacaagtccggttccgccattctcgatcagttcggccgcaacctgaccgtcgaagccgctgaaggcaagctggacccggtcatcggccgcaccaacgagatcgagcgcgtcatggtcgtgctctcccgccgcaccaagaacaacccggtgctgatcggcgagcccggcgtgggtaagaccgccgtggtcgaaggcttggcccagaagattcaggccggcgacgtgccggaaaccctgaagggcaagcaggtctactcgctggacctcggttccatggtggccggttctcgctaccgtggtgatttcgaggagcgcctgaagaaggtgctgaaggaaatcaagacccgtggtgatatcgtgctgttcatcgatgagatccacaccatcgtgggcgccggctccgccgacggcgcgctgggtgcctccgacatgttgaagccgatgctggctcgtggcgagctccagaccatcggtgccaccactaccgacgagtaccgcaagtacatcgaaaaggatgcggctctggaacgccgtttccagccgattcaggtgcacgagccgaccatcgccgagaccatcgagatcctgaagggcctgcgttcccgttacgagaaccaccaccacgtgaccatcaccgatggcgcgctgcagtccgccgccgagctgtccagccggtacatccaggaccgcaacctgcccgacaaggccatcgacctgatcgatgaggccggtgcacgcctgcgcatcaagcgcctgaccgccccgcctgagctcaaggaactcgacgagaagatcgccaagatcgccgccgacaaggacgaggccatcaagggtcaggacttcgagaaggccgccgaactgcgcgacaagcaggagaagctggaagccgatcgcaagcagaaggaagactcctggcgcgaaggcgagtccgacgtcaagatggtcgtggacgaggacgtgatcgccgaggtcatcagctccaccaccggtatcccggtgttcaagctgactcaggccgagtccaagaaactgctcaacatggaagccgaactgcacaagcgcatcatcggccaggacgaggcggtttccgccctgtcccgctctatccgccgtactcgcgtgggtctgaaggacccgaagcgcccgtccggttcgttcatcttcgccggccccaccggcgtgggcaagaccgagctggccaagacgctcgccgaattcctgttcgacgatgaggacgcgctgattcgcgtggatatgtccgagttctccgagaagtacgcggcttcgcgactcttcggcgcgcctccgggatacgtcggctacgaggagggcggcgagcttaccgaaaaggtgcgccgcaagccgttctccgtggtgctgttcgacgagatcgaaaaggctcatccggacatcttcaacacgctgctgcaggtgctcgatgacggccacctgaccgacggtcagggccgcaaggtggacttcaagaacaccatcatcatcctgaccaccaacctcggtacgcgagacatcgccaaggccgccaacacgggcttcaacctgggtgctaacaacgagtccagctaccagcgcatgaaggaccaggtcagctccgaattgaagcagcagttccgcccggagttcctgaaccgtctggacgacatcatcgtcttcaagcagctcaccgagccgcaggtgcgccagatcgtggatctggacgtcaagcagctcaacgaccgcctgttcgaccgtcatatgtcgctcgaactcaccgacgccgccaaggacctgctcgcgcagaagggcttcgacccgctgctaggtgcccgtccgctgcgccgcgtgattcagcgcgacatcgaggacgccatctccgagaagattctgatgggcgatctcgaagacggtcagcgcgtgattgtggatgcggaaggcgagggtatcctcggcgaattcaccttcaagggggagaagttcgaggagccggccgccgccgataagcccgccgaagacggtgccgccaccgatgccgaaacttcgtccgaagccggtgcctccactgatggcgagactccagccgacgccactccggccactgaaccagccgaatccgctcccgccgattccggtgacgctccgcagaagtagtccgtttcgatagcgtagctagcgcataccagcaaagctccccttgacaggggagctgtcagcgaagctgactgaggggtagacctacgcacacataatgtgcacgtttttggtctacccctcagttgcctctggcgatagctcccctgtcaaggggaactactgtttgttgtcgggttattgcagcagggcgagtccggtgtcgatggtctcctcgcgggtaaacagcgtgcggccggcgcgcaccgaacgcaataccgagcagcgctcatacacggcgttgaacacactatcggcgtccagcacaatgaagtttgctggcttgcccgtttccaagccgtacatatcgcgcaggcccaacgtagtggcaccgttgacggtcaggaacttcaacgcatcgtcgatttcttcaaagctcatcatctgtgccaaatgcagcacataatcaagaatgagcatcatattgccattgcccagcgggtaccacgggtcctgcattgaatcctggcccaatgacacattgacacccgcctcagtgagctccttgactcgcgtgatgccacggcgcttggggaaggtatcctgacggccctgcaaatacaggttctcggtgggggcgcaggcgaagttgatatgcgccgccttaagcagcttggtcaggtggaagaagtaggcgttgtccgccgatcccagcgaacaggtgtggctggcggtgaccttcgggccaatgccagccttatatgccaacgccgaaagcagctccacgtaacgggaattcggatcatccgtctcatcgcaatgcacgtcgatgagcttgtcgtatttcgaagccaactcaactaccgtgtgcatggaatgctcgccaaactcacggcactgttcgaaatgggggatgccgcccacgcagtcggcacccatcttgagtccttcctccaccagctcggcccccgattcgccatgcgggccctcgtaggagtacatgccctcctgcgggaagctgacgatctggagagtgaccgtatccttcaattcctccttaagctccagcagcgcctttaatgaggtcaggttcgggtcggtcacatcggcatgggagcgaatgagctgcacgccatgcagtatttctttcttaatgccgattttcgcgcgctgcttgatctcgtcgaccgtcaagtcggacttggtctcactccatcgctggatgccctcaaacaaggttccgctttcattcaccgcaccgggcttgcgggccgtgaatacgtaatcaaggtgcagatgcgtatcgcagaacggtgggcagacaagtttgccgcccagatcgaccacctcaatggccgccagatcaccaccctgagcctcatattgttgcgcgagtccggggccgaatgcggtgaacacgccatccgtgacgagaatgtcctgcaatggcagggtgcttgcagccgtgctgccgggttctccggtggcgatatgtgcgttggtgaacagtgtggtagtcatcgtcgctccttcaactggtgtgttgccgaacggttacgtgaaccgactgcccgcgtaaccaactgaggttattgtcaacagcacgctttgcggtgaggttaaccggaacgaccggtgttccgcgggggaatggacagattgtatgactgtatcgattcgcagtgcgcttcataacacgcagttcaaacgagccgatcctgtggtggaggtcgaaggcaaagacctcgatacgccagtgcgatgggtgtttaccaacgagcgagaggatgtctccagtttcctttcgggcggtgagatgctgattatcgagggtaacgctctgctcgccgccgattggcacggcacgttaggacaatatgtagcaagcctggcacaggctggtgtcgccgctctggtggtcgaactggtggagggtgtggtgcggatgccggacgaactggtgtctgcggccaggctgcatgggttgacgttgattggtctgaaatctcgcgtaccttttgtcgacatctgtcagagtgtcaataccgctatcgtgcacgaacagatgcacttgcaattggaggtggacacaatgtccacttcattacgtgagggattgtcccgtaccggcaatatcgaggctgtggccgaaaccattgcgtcgctgttcggcgaaagcgtcgccattttcgatggtgacggtctgttggccgctcgagcgggtcgtgcgttcgatgccggcaacgaatcgagcgccgtcatcgcccttgaaagtcgctcccggccggtgggagcattggagatcacgcaacgcgccatgactttcgacgccacgatgcgtcgggccatcgccaccatcgtgtctccggtggccgccctctatattgacggcggcgcgcgtatgggcatgatgcatcatctgagtatgggcccggccgacggcgtgcacgtcaatgcatttgaggcgcaggaagcgcatgcgatgctcgacgcgctgggttttgccggatcatgcatctatatgccattcgcttttcggttcagatcggtggtggaaggcatcaaccatgtatcgacgatggtcgaacggttcgaagaacggtcgggatgtgccgtctcctgcatgctggaaggtgacttgatggtcggatggtgctccaccaccgattcctcagacggtgcggccgcattcggacgccattgcatggatgcgcttgccgtactggaaggcgacggtgtgtacgtggtgcatggccgagtggcattggacacggtgacgctggtcgacgggttcgcggtattgcgtgacatcgccaatcaggaaccggcatacgggcgaatcgtaagtaccatgtccgcactcgtcgaccgtttcgtcgcatcctctgatatggacaaggcgatgcgcatgctcgtggtgcagaccatcggattcgaggtcgccgcctctccgttgttgctggacacactgtgcgtctgcttcgacaacctcgatagcaaaaccggcgcgtgcgagcaattgggtatcagacggcaaaccctgtacaaccgactggacaaagtgacacaaatggtcggcgtcgactataacgacaaaccgaactggtcgatgctgctattcgccgccaaactcacgaaatcatggcaagaaaagcatggtgaataatgcgccagcaccactgggcaacctgtccacttctacgccgaacgggttaatcgacgattcacgtttcagcaaatactcaagggcatagtcgaggctatcgcggcgctggtcgacctgctgcgaaacgaattcccacttgaatcccattcagtcacacgaacagcacatccttgaaaggacggtgacatcatgagttccgcaacgattactacatctgcacgactgatgaatttcacccctcaaactgaagaacaggccatggtcaggaaagtcgcggtatcttccttccttggcaacttcatcgagtggttcgactacgcctcctattcgtacttcgccaccaccatcgccctggtgttcttcccaaccgacaatcacaccgtcgccatgctgcagaccttcggcgtgttcgcgctatccttcatcctgcgtccaatcggcgcactgttctggggtagctacggagataagaaaggccgtaaagccgcattggcccactcgattatgttcatgtccggtgcgagcttcctgattggctgcctgccgtcttactcggtgatcggcgttggcgcgccgattctgcttctgctgctgcgcatggtgcaaggcttctccgcttccggtgaatatgccggtgcggccacattcctcggcgaatatgcacccacctcaaagcgtggcatctactgctcgctgattccggcgtccaccgccatcggtctgctcgctggctccacgctggccacgctgatgaccgccaacatgaactccagcgcgatggtcggttggggatggcgtgtgccgttcctgctggccggcccgctcggcctgattgtgctgtacatccgtaccaagctctccgattcccccgtgtaccagtcaatgaacgatgctcttgagtccaagagcgccgcctccgctgacggccaagtcgtttccaagagcggcatgttcgccccgctcgccgaactcttccacaaccatctcaaggccctgatcatcagcttcggagcctgcgtgctgaatgcggtcggcttctacaccgtgctcacctacctgccgacctatctgtctgacaccgtcggcatggacgccacccagtccggcaccatcaccaccatctgcttggtcgcctacgtgttcatggtgttcggcatgggccacatctccgacaaattcggccgcaagaaggtgctcatcggtgcttgcgtggcgttcatcgtcctcaccgttcctgccttcctcatcctcaacacctcccagttctggcccgtgctgctggttgagctggcaatgtgcgccaccctgaccgccaacgacggtaccctgtccagctacctgaccgagacgttccccacctccgtgcgcttcaccggattcgcgttcagcttcaatctggccaatgccatcttcggtggtacggcctcgttcatcgccactggcctgattgccctaaccggttcatccatcgccccggcctggtacatggtgggtgttgcggccatcgccttggtcgcgatgattctttcccatgaaaacaccgacaaggatctgaatcacatctgatctcctcagctccggctcctttcccgagggagccgggcgcattcattgaccatccaatccaccaccaacccaaaggagtactgcaatgggtagcaaccgccgtatggaccacatgacctggccggaattcaaggaggtgaagactcatcccgtcatcgtgccgatcggttcgaccgaacagcacggccagcatctgcccatcggtaccgacgcggtactcgccacgcgggtcgccgaagatctggcggaacgcatcgacggcaccgtgctgcccaccctgagctacggatacaagtccaagccgctctccggtggcgggccgctgttcccgggtactatcgacatgaacggcgtgacagtgatcacccaaatgcacgacgtgctgagcgaactcatcgccgatggcttcaccaagatcgtcgtcatgaacgcgcattttgaaaacgaggcgttcatcgtcgaggccatcgacctggtcacccgcgaaaccgggggagtggccaccatcgtggaaaccaattggtgggacccggttccgcagtcggttatcgacaaggtgttcgatggattggtgttccccggctgggcattggagcatgcggccgtcaccgaaacttcgttgatgctccactacgcgccggaactggtgcacatggaccgtatggtcgaggaagccggtgccacggcgaaatcctatgtacgctacccggtgcgccaaggtgacgttcccgctcacggcggactcgccaatccggccggctcaagcgccgaacgcggccgcctgattgccgaggcgtgcgtggatgcggtagctgagatctgcgtcgaggaatttgccgagtaatctccccttgccgacgcattcgtagtgacacgggttgcaaaggcctgaccctgatagtacggggtcaggcctttcccatcccaagacgccgctaagaattcacctgagagtcgccttcctaggcatggccgttcaatcgacgatcctagcgtgactggtgtgagcaggaatatgaagaaccggcggtgggccggcaagcgatcggggatcgcttttggtgcagtagcgcttatccttacggctctggtggttccttatgcttgtgcgggaaccacgggagccgttcctttttccggcgataatccatcttccggcacccgtacggtgaccatcgccgacatcactgattttcacgggcatatcgaacgtggtgcggacaacgccaccgccttcaccgtggccgacagccataatcccggcaatatgatcccggtatcgaccggcgatttggtgggaggttccccgtatgagtcggcggtggagaaggaccaacccacgctggacatggccaaagcgtggggattgacgatttcggcggtaggcaaccatgagttcgaccgcggtgtcgccgatttcaacaatcgcatcgctgatcccagcaatggcatcgactggctgtgcgccaacacgtctgccgccagtaagtcgcctgacggactgctgagccatgtacgtgactctacgattcgaacggtgaacggcaagcggatcggtttcgtgggcgcccttactgatgcgctcggctcggtagccactccgcagattacgcgtgatgccgatcttgacgaacgggcggtggacgcgatcaatcgcgtggcccgtgaactcaaacgctccggaaaggtggatgcggtggtggccttgctgcacgccgatgcttcagccgccgccgatattgggcgagatgttgatgtggtatacaccggccacagtcacgcgatcaagcgtggtacgaccgctggtggcgcgcctatttacgaggcgggcagcttcgggcagaatatggccgtgcaggatttgatcatcaccggtgccgggcgtcgcgccacggtgcgagtggccgatgtggacctcggcaatggcaccagccatacggcggttgacggcgtgctgggcgtggaagggcttaatgcgcatccggcgcaagccgcttggatgtctgccggtgctgaggcgaacgatgaggtatcgcgcgctcagcatatttaccaggcagcggcaacatattcgaatcatgccggcaacgcggtgattggcaccttggcctccggcgtgaatttcgacaaacaaggttcggataagcacgggaatacggtcggtgtgctggtggcggacgcgaaccgcgagtcaatcatgaagcatgtgtatgccggaaatcgtttgccggtaatcggattttcgaataatggcagtctgcggactccacggcttgatatgaatggcgatggcaaagtcaccgtgcgcgaggtggatagtctcatggccttgcagttcaaggccgcgcatgagacgctcaccgggcgcgatgtgaagagagtgctcgccgagcaattccaccgtgacgatgggcgactggagcggcgctggctcggcatctcctcgaacgtgacgtatcggtatgccgaatgcggtacgaccggtgggagcggcaatgccgatgccgccgctgataccaacgctgacgctgacgagtgtgctgccgacgaacatgcggcggttcgtatcgtgaacctcgccgttgacggtcgaccgattgcggacgatgacctggtgattatcgcatccaattcatatctgcttcagggcggcgacagttatcccgccttccgtgccggaaccaattacggcgagctgaatatgccatacagccagccgttgcatgaatatctggccgcacatcaagggctcacggcaattgttgcagcaccggtagggactcaggcgtaagacaccaattgctgggtgactgaggaactatggggtggagttatgagtatagggcagaagaaaacggcataaatatgacgaagctcccctcgctgaggggagctgtcgccgtaggcgactgaggggagcttgcggtataaccgtaaactcccctcagtcagccttgctgccggcttccctcagaggggaacctggcacgagacccttacttgatggcgttcagccactgctccttggtggccttctcggcttcgagcttggccttcttcttcgggtcggattcggccgcgatcttggcgtcgagctcggcgagctgggcgttgagctgctcctcgaagctggacttgcgggcgtcggcctccgggtcggtctgcttccaagcggcatcctcgatggccttgatctgcttgtcaacggcgtcgagacggttctcgatgcggcgcatatcgtcacgcggtacgtaaccgatctgatcccactcttcctgaatcttggccagctcctggcgggccttcttggcctcggcgtcggtcttcaccggcaccagagcctcggccttgaccagcagagcctccttggcagccagattctccttctcggaggagttgatctgatcgcgatcagcctgacgagcgttgaagaaggtgtcggcggcttcgcggaacttggcccacagctcgtcgtcctcgttacggccagcgcggccggccttcttccaacggtccatcagatcgttgaacttgcgggaagtctcaccccaagcggtggaatccttgagctcattggcctcggcgataatcgcttccttggcttccttggcggctgtacgctcgttgtcgcgagcctgagcccacttgcggcgagcctggttgaaggtggtgcgggcggcggagaagcgcttccacagcgcctcggcctccggcttgtcgatgcgcacggtggtgcgctggtggttctgccactcgtcgaacaggttgcggaacttgtcggcggtggagcgccagttggtgttgtcgcccagagaagcggccagtgcttcggccttctcgacgatggtggtgcgctcggcgacggccttggcctgagcggccttgcgcgcttcggcgatctcggccttcttggcctcgccggcggccttcagttccacgtaacgggccttgagggccgcgaggtcgcccaccaccgccggttcggcggtttcttcgcccagcagcttcacggactcgtcgatttcacgggccttgatgttcggggaagccagacgggtggccagcagatcgagcttggccttgagatccaggaaacgacgggcgtacagtgccaacgcctcttccttggagacatccgggaactggcctacctcgcgctcggcgtcgccatccttgacgaagacggtgccgttgtcatccacgcggccgaaggcctcggcggccttgacatcagcctcggaataggtggcggtggcggcggccggggcggcagcgcgcggcttggccgacggagtcttcttggcgaaggcggcgggggagggcgcgtgcggtttcggcatggaagcgggggacggagtcggcgccggcgtggccgcgctggcttcgggtgcgggtgtcgttgcctgctcttcgggcgcagcggtgtttacgggttcggtgacagtttcgtcggccatggccagctccttaaagcgtagaatgcataagcgggagcgtctcccatcccgggcgaaccaggaagttttgacgcaaccctcacctattatattgatttcgtggctaaaggtgcatcaatatcaggattcccggagtggctcccctc

SEQ ID NO: 454 - DNA, 5305 bp, Unknown
  R48_24m  MAG No. k141_22575
acacggcatggcgatcatccgcatccgacaccgtccgccggacggacgcgccacccgcacgctgatgctcgatgcgggacggctcaccgatctgacgcgggataaggaggtgcgcccatgaacggcgcctacgacatcgacacctggggtcttgttctggcgttgggcatggtggccgtggcggccatcgtcagcgaactcatgcacatgggcatcggcaggaccctgatgtggtcggcatgccgcgccctcgtgcagctgtgcgccatgggattcatcatcagctacgtgattcgttcgaacagcgtgtggatggtgttcgccctgatggcggtcatgctggtcgcggcggtgcagatcgtgatatcccgcgcgcgcggcatccccaaaggtcttgccggaccgatcttcctgagcctggtcatcacgatgctgctcatgctggcgttggtcaccgaactcatcgtgcgcccacacccgtggtatgcgccccagctggtggtgcccctgaccggcatgctgctgggcaacaccgtttccgcgctcgctgtcgggctgagccgattctatgaaagcatggaggaacgccgcgacgaggtggatatgatgctggccttgggggcgacggcatgggagtccgcccgcccatccatcatctcgtcgattcggctgggactgctgcccaccaccgcttcgctggcctccagcggcatcgtgaccatcccgggcatgatggcgggccaggtgatagccggcggagatccgctgaacgccgccaaataccagttcgtggtcttcggtgccatcgccgcgctgaccttgctggccgacggtctgatcatggccatggtctatcgcacctgcttcactaccgacgaccaatatcagacgcctaaagcacgatagcctcagtatcgatctcaggccaagcctcaggcgatggtgaccggcgtgccttccggaatttggttgtagaaccattcggcatcggccacagtgagtcgcacgcaaccatgtgaggccggctgaccgagcttgttgccttcctcttccatatactcgccggagttcgccccggtcggcaccgagtggaagaggaacgggccgttgaatcgcacccaataatcagcacccatgccttctgcgggattgtagaagtgatcgcctctcatcccgataacatagttgccgcgcggggtcgtatcgttgagcccggtgctggcgatcatcgtgtagatggtctcaccgccggattgcacatacacttcctgcttggcgatactgactttcacgctgagatcggagtattgcgacaaatcaggctgcttgccggtgggattcgtccatcgcgcacgttgcgcttccttgtcacgctgctcctgaatcgcctggttaaagaccggtacctgctggcggtccaaggatgaggccgatgcagacactcgcgatgccgactgttgcgcggattgactcaccttctgcgcctgcccctgaacctctgcctgcccctgtgcgaccgactcaccgcggggccacacccgctgggcgtcaatcgtcgagaagacggcaagaacgcagcacaacaatgcgcataccgcaaccacaatgcgccgtacaacgtaaattcgttgacgacgaatcctcatccgtgctcgacgccgctcagtcatgtcttccttctcgttgcaaagacttttgccgtaagtattgtagccgcttttacgatacgtcgcgtaccaatatcacgcgcgctattccgctgtcactattcctattccgttgccgtccacttacgtctcagcaacatccacaggccgatgatcacggccaccacgccgagcccgatgccgaacagtcccgaggattgcgccgcgtgcgcggttccctgggattccaacagcccgtcctgcgtgaccaccagcgacagcatcgcatcgagaaggtcacgaatttgaccgacgaatcgatggggttgtgcgtcttatgcgaaatcaccataccgcgaatcgcaatcaagaagaacccgcaacttacgcagcagacggtcaatcgccttaaggaggcgttctggaagctgtatgaaaccaagccgatcgagaagatctcggtgcgtcagatcaccgaactcgccggctacaatcacgccacgttctacctgtatttctcgtccgtgcgcgacgtgcgtgaccagatcgaagacgacctcatcgcccagcgagacctcatattgaagcagtgcatgcatgacggcacactccccagcatcgcaccgcatatgcaaatgccatcgcaatcggaagcagcgcagcagccagcggcatcaccgcaagcccagtagcgaggtcaacccacagctggcggcgcgggaaacaggtcgcgccgcccagtacacgaatccggcgagcttctaccgagtcgcgaggaagaagaaacgcgggaaggggaagatgatgctgccgtccgactgtgtggggtattcctcgcggacttgggagaacacttcggcctcgaacttcttgcggccggcgtcgtcaagcgcctgcagatacggacgcatgccggtgccgcgataccagtccataatcgcctcatgcgagggcagcgtgtgctcccgtttgaatcgcagatactgttccgaatcccgggtaaccatgctccccacgctaatcagccgttcacatatcggccgatattatctcacaattcagccaagcagggcgtcgcggcgggcgatgagcccgtcaatcgcggcctcgccttcgatgacggtgaaggtcagggacttacgttcgctggtctgcggggcgatggtgtgcaggtcgccgcgctgctcgtgccagccgcggccgtggacgctggagttcgagggttcgaggccgaccacgtagtcgcccgcacccatcgacttccattccatgaagtatgggaagaggctggcgtcgaagtcgatgacgactccaagtccgagcttgcggttgaccacggcggcgaagctgcggccgttctcgtcggcggcgagctcgtgcaggtacacgctttcggggcggttcgcctcgggtgcttggatttcgttccacggcgtggtgtcggctgcggtggtctcgtcacgcggggtggccttgcggctggggatcacgacttcggcgccttcggcgagcaacggccagccgaagttgcagtggtacatccacatcagcggctcgtcgcggaaggattcgttggtcacctcatcctcgaccgtgatcgacggctggccgtacacgctggtgatcttgcggcgcatcaccagattctcgccgaacagttcggcctcgcgcatttcgccggagacctcgagcacgtagtcgccttcggcggtccagtgggcgtcggagcccacatgctcggccggcgtggtgcggatgcggccgtgcatcgggaagctgccggccgggtacttgccgccctcaggcgtgacgtacggcgcgcagatgttctcgaagccgcaggtgaagaacaggccgcccatgatggaacgctgcgcctccagcccgttggtgtcgaactggttgcggccgttcaggcccggcttggacaggaaggtgaggttctcgccgcggtattcgaactggcagacgtcgagggcgcggtcggccatggatacgaagcgtagcgggccgttcttcacctcgatggccttgagaccgtgggcacggccctcctggtactcgatcgggcgcacgtaggcggcctgctgaaggctgcccatgtgggccaacatgtcggctcgcgtattgtgttctgtggatgtcatcgtcgtcaccgctccttgcaatcatcggcttgttgtccgtgtgcacatcatactgtaagcgttttccgcaattgtcgctatcaacaacgtatacgcatgtcgaaaagttggaccgaagaacaacgcaagcacaacgaaggctccccgaagggagccttccatcgtagcacacgttacgcgagaattcgtcgctcgcgctttacgcttccgcggcatcgtccttcagcgcacgcagcagggccttgttgcgggtttcgatgatgcgcttgccgtcctcgccctgccaagagaagaagccctgaccggtcttggcaccgaggttgccttccttgaccttttcggcgagcagcgggctcgggccggtgccgttgtccatgtcgtcgaacaggtaggtgctgatgttgtagaacacgtcgagtccgccgaggtcgatgctggcgatcgggccgaccaggttccagcggcggccgaggctgtacttcatcacgtcgtccacggtggccgcgtccgctatgccctgctggacgatgtagaacgcctcgcgcaacacggccagctgcaggcggttgcccacaaagcccagcgattccttcttgatctttgccggcttcttgccgatcttggccatgaggtcgaaggtgatgtccaccaccttcggatcggtcttttcacccggcaccacttcgaccagcggcatcaactgcgcggggttccagaagtgcgccaccacgaagcgctcggggtgccccatcaccgactgcagcgcggtggggctcaggccggaggtgttcgtggacagaatcgcgtccttgggggcggcgtgctccacttcggcccagacggacttcttgatgtcaaggttctcggccacggattcgatgacgaagtccacgtccgccacgccgctcgcatagtcggcgtaaccggtgatgcgggccagcaccgtgtccacggtgtcgccggccttgagcagtccggcttcggcgaagtcctcggcatcagaacggatcgccttcatcgccttctccagcgaggcctcgctgcggccgaccagatgcaccggatatccggccagcgcgaactgcaacgtgatcgcatggcccattgttcccgtgccgacgttcgcaatcgtcttgatatcgtccgctgtctcaatcatggagaccccttctttccggcggttcgcctggcgttggcgtacgcaggaacagcaccgtgccgttatgcgtttgctcgcattctatgccgatttcgctacgtgaacatttactgaacatttcgcggattcgactagcacaaatccctatatcagcacaaaagcccgttgtctatttagaagtgcaacatccttgttgttcggttaatgatagcagttcgtcggcgaatgcctcggccggggtgcggtagccgagcacgcgcatgggacggttgtcggtctcgtccacgatggcctgtatctcgtcggccatggacgagtcgatgcgcgtgcgcttgggcaggtagcggcggatc

SEQ ID NO: 455 - DNA, 31787 bp, Unknown
  R48_24m  MAG No. k141_22948
gatccgccgctacctgcccaagcgcacgcgcatcgactcgtccatggccgacgagatacaggccatcgtggacgagaccgacaaccgtcccatgcgcgtgctcggctaccgcaccccggccgaggcattcgccgacgaactactatcattaaccgaacaacaaggatgttgcacttctaaatagacaacggggtgactaacgaagagacggcggtgttctacactggtagccatgtctatcgcatcagtagaggcccaaaaacagctcgaccgtatcgtggctctcggctatccggatgtggcggatatttccgccgccgcattccgctcgctggcccgacccctgatcggggcgctcgagcattccgatttgggatcgaacatcctgctggtgcccacgcgcgaactggtttcgcctgagtcactgatcgcacgaacctccatcaatcgcatggccggcttcaccaccatgccgccgcgtgacatcgccagcttcctgcctcaagacggcttcatgccgccggaaggcccgttctatctggtcgtcaatccgcacaccggcacgtgctatatcaatcgcgagccggacgtggcccgcaagcttatcgactccgatgaacgcctgccgctcaccctcgaggaaggcttggccatcgccacccagcacccggagtggctgctggaaaagaacggcttcaatctgctcggctcacgctccgcagacggccgcgtgccgagcatctggatgagccagaacgcaccgcgactgggagctgtctggcccaattcccgccatacctggctgggcaacgcgtattgcacggcccgtcgcggggtgagtctgttccgttgactccgccagtgtgcgttttctctgtacaatgaaaggcatattgcatcatttcatcagagagaagacgcgatgaactgtgataggtgcggtgctgccaatgacgataggtcccgtttctgcacggaatgcggtgctccgctggcaccgaaacttgccgtgggacacaatacggtcactgatgttccgcctgtgccgatgccacccgccggtcccattcccggccccggtctcagctctagcctcggcccagcgtcgtctgcgcccgccactatcgcggtaccgcagacgccggtaccgggccataagcgtcgccaaggccgctgcggccgttaaagatatgggtgtgccgatttatgccaagcgagtagccgcaacatccaaggccgatacgaagaaagtcgtgtatacctacccggctgggggcagccagtggacgataatggtgcgatttatcttggtatcccggatccctcagtcgagggcatgccggccgacgttatcggtatggataaggatgaggcgaaaaccgcagtagaaaacgcatcgaacaacaagatcgaggttattctcgagccgcgattttccgccaagaaggattttggcaaaatcgtagcttccaattacatttttggtgcgccgtttgaggcgagcaatgaggaaaatgattataaaatattgcaaccgatacgtctgtactacggtgtgggagccgacaacactgaagatgtggtgaccaccggttcaggtagtgattatgatttcgacccgcacgcggattatgccagcactagcaagagtgacaggagtttgccgtatatctcggctgcgggcgaatggcgtgttacgggcacctattgcaaggatggtttcttacctggctcgggtggatgcatctcgctgatttcgaagggtcaagacggaatgaaatacgggtccggttacccgtatttggtgcgcaacggcgatgagtccaatggcatatggaacgatcgggtcacactgtgcacgcccaccggagacattggcgggtgcattctgcactacaaggatggttcgattcccgataatgaaaccaatatgcgcaaccacttgttggccaaacagtggggcatgttcgagatgtaccgtggctacggatggccggtatgcgacggcacggtctaccgaggctatggggagacggaagggtgtgaccatggtcaatatgtgaggactgatgatatccctgatggtcagcaatccggtgccacctacgaaatggatgacttctacgtttacttcccggtgggatcgaagatcagcaaactcgaggattccgactatttctccaacaaggcgctggctgcggcgaacaaggcggggaagccagacaccgaccggccgttcttcatcatgcgcgaccccaagggatacaagaccacaagcgtcgaagcatacaagaacggcgagcaaaccaccaatccgtttgtacccggtataccgatgagcggtggatacaacccgctagtgaagatggatgtggctcccagcgccgatgcgtcgtctgaagactcggccattgccaatacgtcgcagtcgagtaagaagttcgttgccgcaggcctgtatctgccggtgtatcttgcctctcaaggcaacggcaatgcggaaggattggcaaatacgatgatgaccggcatggataatagtgccggcaatcaggctgtcggggcccttggcggatggagtgctgtcaattcatggctgagttcccatgggtacagcggcaccagcttcaaccgtgatttcggtgatgtacaggccagcaatgctggatatgagaattacagtaccgctcgtgacgcggcccgcatgctggttgccgttgatgcggtcggtggcactggtctgatgaacactgatattgcttcggagggcgtggtgattccgagcggcatgaccgtgcatgcacatcgtggcatgggcatccagaacacgtggaattacttcgccatcgtggaggtgaatggcaacaaggccgcggtctctgtggtcacgcaaaaccaaggtcaggatcgtgccgctcagctgatgagccaagtgcttgcctcggtggatagcacgttgcgcaaatagtacaagcagtatttgcacatgcaactgtgtatacggaccacgccttttggttggcggctgagtggggactattccatcgcgttcatttcccagtagaatgaggctatagtgcgtcattcgaccagagagaagagcaatgatgatctgtaagaattgtggtgctgacaatgatgggggaagccggttctgcatgcactgtggtgcgccgctaaccgacgtgagtgctcctgctcctcaggcggcggccggcccgattccagtgccgctgccggacaatactatgacggtgcttgatcacccgccgctgcccggcccaaacgatgggaacgcctatgggcagtccggcgtgccgacatcgagcggtgtggcaggagcgccgaccgcaccgggagcaagtcatactgggtcgatcgcaccgggagcagtgccgcaggccgctccgggtgctcctgtcgctccgggcgcagccacgccgccgagcggcacaacgaccgcaaccgccacattgccgaatctttcgggcaagcgtggcccgaatacgctgattatcgcgctcgtggcggtgctgctggcgttgatcgtagccggtgtggctttattcctgacgtatcgtgccgaggtgtggggtggtaagtcgctgcctgatccggcgtccatcgcctccagcgtcaccgataagaacggcaagaaggcatcggtggtcaaggccaaggatgtgaccgaggcgttgaaggccaagggcctgaacgcgaagacggttccggtgttctccggcgaggatcgcggtgtgttcctcggctacgagggcacgaatcctggcgctcgcgtcaaggccggttccacggtggtggtgcaggagtcggccggtcccggtgtgccgaagggcacggtcggcaaggatgtgaacaaggtgacgaacacgttcgcgaatatgggcgtgccgattcactataagaaggttgtgatttcgccggacagcaagactccggaagggcaggtcagcgtcacgtacccggctcccggtgtagggctcaccgatggcgagaaggacaacggcatttacattggcgtggcctccaagggcgatggtatcccggtggatattcttggtgcggacaagaacaaggccgtcagcgacttggagtcgcaaggctacagtgtggatttggaaccgcattactcgtcagagaaatacgtgggcaagatttccggctcgtacccggctccgggatccacgttgagttccggccagtcggtgaccttgtattacggcatcgataagtccagcaacatggacgtgctgagcaaaaccaactcgtatgacaacatcaagatggccagcatccacgcgtccgcaatgatcggtatgtactgcaagagcgaggtgacggatgccgccaaggactgcatcacactggagcaatcctcgatgaatccctttggctccacttcatccgaggattatcagtacctgcaaatcaaaggccatgagcctgaagacaaggccgatgtgttgggcctgaccaacttctcccaggatatcagcggcgcgatgctggaagcggattcggaatacggcatggccgcggacaaattgccgatgaaaaaccatctgctgttgaaagactggggtatgttcgagctgtacgcgggcatgggtctgccgaactgcggctcaaaggtgatgtccgcttcgataggcgagtactgcgtgaacggcaactatgaacgggcgtcgttcgacgatggcgaaatgacgccaccggccggggctgagaacgggtcgaccggcatgacctacgacatgaaggacttcctggtctacttcccggccggttccgatgccaagtcattggatgattccggttacttcgacgccgccgaactggcgaaggccaagaagcagaaggccgtggataccagccgcccgtacgttctggttcgtgacaagagcctgtacagcgagaccagcgtgagcgccagccggggcaaggacgtggacccgtttgtgccgaccaacagcagtatcaataactatcagaacgcgctggtgccgatgaggccggctcccagcgattcgaccgtctactatctggtggagcagaacggcgatctcgactgggattccctgccggacgccgaggtcaagggcactggcgataaggccgcttccggtgagacgaccggtgacaagtccaaggacagcggcaaacgagacgccacattcaaagaggccatgaaacaggcggcaggtaactatagtttcggttccggtgtcggcgcatggggaaccgtaatgaaagtcaataaggatggcaccttctcaggctcctaccatgactcggatatgggggccacgggagacggctatctcataggaaacgacgtcgatacgctgaacggcaaggcattgctcaacgtgacgagcggagcggataagggatacacgttctacgatttctcgtagtgattcagctgccgtgcggagcggcggggaacgtgaaggaccggcgcgtatgctgtgcgaaacagcattacgtccctagactggtgaggcatgacgaacctgcgattccgcgaagacggcagcttccgcgtgctgcaaatggccgacatccaagacggccccaacgtgctccccgataccatccgccttatccgtgaagccattcgcaaagccgacccggatctggtggtgttcaccggcgaccagatccgcggttacgatcctgcctacatcgacactttcctgcgccgccgtggcgaggaaccgggcgctcgcgtgcgtgcggtcaccgaggtcgaggccaagctgcgcggaatcaagcggcgggccagagaccgcgtgaacaatcgtctgctggccatgaagtccgacggcagcgattccgacgcccaacaaaccgcgtccaccgcgtccacgctggtctactccacaacatccgatccacaggatgtgccgacgactttggacgagctcatggacgagacccgtgacaaagtccgccgcacgtttgccggcttccttggcccggtcatcgaagcggaagtgccgttcgctgccacctacggcaatcacgatttccagtgcggcatcctggccgacgagcaggacggcatctaccgcgaattccccggctgcctgaacccagtcgacagccttgagccaggcacttttgccctgcccattgaggcttccgacggatccgggcgcgtagctatgtccgtcatgatggtgaattccggcgattacgccggcaagcccgaagagaacgacgcccaatacccggcctatgtggtcaatccgcgtggtcttgatttggctgattccgatgggtatggcacgccaagccccgaggcgatcgattggctgggagccgtacagtccgaacttggcgaacgcaacggcgacggtaagccggtgcctgccatcgccttccagcacattccgccgcaggaattctacgattgcctcaaagaggttcccgcatggacgccgaacgcggtggaaggcgcacgtacccacgccggtcattgctacgtgctcaaccatgagatctgccggccgggatcgcggctgggtgaggcgattggctgtgcagacgagaacgtcggtgaagtggacgccttgcgtgaggcaggcggctacttcgcgctgttctgtggtcacgatcacaagaacgccttcgtgggccacgcgcatggcattgatttgggctacgcacccacctgcggattcgaatgctatggccccaagtcgcgctatcgaggcatccgcctgtttgaattccatgaaagcaacccggccggctacgtgacccgcatgctcacctggggtgatctggtgggccgatactccagcaacgaggtgcgcgtctggttcgaggaccactgcgtgaccggtgccatcagcatgcgtaacgaattgcgccgcccgcaggtattcgcagtgctggccggtgccatgagcctcggttttatggccgtcatccgctcgttggtgaagaagcgataaaaacacgtgaggccggtatgaactggcctcactgagtattaagcgttggatccgcctgaaccctgcttaactgttatttatttctgggtgcggataaaaacaccagagccttcggtgttaatcagcatccaatcggatggtccatccggcgttccacgcttgacgagcatggcctgtgcttcagatggcaacgcatcgctggaggttccagatggatatccggtgaaggtgccacacgggctgaatcctgacttgtcggatttggacttgtcgtcaattttgaaagccgacgcatcacacttcagcgttaccgtgccatctgaattggatgtggcggatgcaaacttaccgctgaacttggtctggatacgtggcgcattcgctgcggaatcgccactgctcatatctgcctcgtccacagtgccggagaagttgccccgatcatccaacgaaatggtggtgaaggcgctgccatcgccagcaatcgtgtaagcgtattgggcaccggccaaatcagaaaacaccttcagtgaggccgcatccggtgtgccggatttcttactgctcttgttggaatccttggaatccttggagttgcccttgtccttggtgctgggcgccttcacgtccgcgtccggcagggaatcccaatcgggttcggacgcttcgaccagatagtaggcgtcggcgtcgcttggggccggcttcatcttgacgatgtcggacttactgccgttgtatccgttgtagggcaggaacggattggcgccgttcccggcaccgttgtatggagcggtggtagtgtcgtagagcttcggatcgcggtacagaatgaacggtcgattggtgtccaccgccttctgcttcttggctgcggcaagcgcgtctttgtcgaagtagcccttatcttccaacccctgcaagtcggagccggtaggcactacgaggaacagatcctgcatgtggtattcgccggatgtgggccaagaatcacccatatgcacgccattgccgtcatacattttgccgttggcccaaaagttggtcaggctgatatgcggcatgagctcgaaggcgccataatcttgtgtgactaggtagtcggctttcggactgttgcagtacgcctgctgaatggcgttgcaggcaatcagagtaccgtcgtaatcgctggtatagtcagcattatcactgccgccttcagtcaccttgtaattgtcgatggtgatgcacttcccatcattagtgcaccactggccgtcggctgcgcgtgtggtaccgagcagcgcgtcaccgcctgtttcggccaaatcatggcctgtaaaggcttctttggtgtcgctggcatcgatgccctgatacagggtcacgtcttcgccggaagacagggacgatcccggagcggggctggcgccggaaaccttacccacgtaatccttggaagagaaacgctgttcaacggtaactgtgtggccctcagactcgagctgggatttgacggtatccacatcctgacccatcacgtcgatgggcagagcggtgtcgtcacccttggcggccacgccaatgtagatgcccttgtctttctcgtcgtccttgaccccagtgccggcggcaggataggtggccacaaccgaaccttcggggttcttcttggcgtcagagacaaacaccttcttatagtggaccggaacgcccatatcggcgaacgtctcagtcaccttattgacctgtgcgcccagagtgtctttcggcacgccggggccggcggattcctgcaccacgaccgtggagccggccttgacacgagcgcccggagcggcgttcttatagccgatgaactcacccgaatccttgccggagaacaccttctccgttttcgcgttgagtcccttggccttcagcgcggccgtgacatccttggccttgacggccgacgccttcttgccgttcttatcggtgacgctggaggcgatggatgccgggtcaggcagcgacttgccgccccacacctcggaacgatatgtcaggaacaaagcgacacccgcgatgatcagggccgccagcaccgccaccagcataatgatgagtttgtttgggccgggcttggtcgcggcggttgtggttgccgttgccggggccgtctgcgtggccgtggcaacggtcgcagtgggctgcgtagccgccggtgcggagacgaccgccggagccgacatgccagcagcaccctgcggcataggaatcggcggcactgccgcaccgccggggccggggactgaagcggcagccggagcgggagtcgctcccgctggcgtgggcgcaaccggcgcgtcctgcggtgtcatggaagcactcgacgctgcagtattcgcttcggtggcggtgagcggcgtgccgcatgtttcgcagaacttgctaccttccgcgttgtcggtatggcaattggggcaaagcataaatggaatctcctatgaatcaacgagactgcggagccgaactaatggtctgactggtgcggccatcggcaaacgcagtaaaaacactgccccggcaaatatgtcggcaagtgtagaaggacgggattgtttcagccgcgcgcgttgtagtcggcggacagatcgttcatcgcatgcagcagcttgtagaagtagaccagcggtcccacgatgatgaaaattcccaagacgtcccacagccagaaggtggctgcggtaacggtgggagtcatgccgcgggcctgctgctcatcgccaatacgggcgctgaggcggtggtaccacaccagccagccgatgcccagcgtcaggccaccgatcaggaagaacatcaggcagtagtgcatcgtgcgcttgccgtcacggcgcgaagcgatgaggttcagggtctcgcccacttcgctcatttgccagatatcgtaaatgccgaaagtaataatgccgagcaggatgtacttcagcaggctgcgcttggtgcgcagttggttgaccgggcgcgggttataggtggcttgctgtgctgcgggctgctgtgggaatgtcggctgtacggcagccggagcctgcgccgggaactgcggcgcggcaggctgagcatattgtggcgccgcgaactgcggcgctgcgggctgcgcggggcgtggtgctgcaggctgctggaagaccggctgcggtgctgtaaattgcggagctgcgggccgctgaccgttcggttgagggatttgcggcatcggaggcatacttggatttgtcataatggacctcttctctcgctgtggaagcccatgcgcctccacgcatagttgcaagtctagtagtactgcgccgggaagcgctacgtgtgctggcatattgtgagatgaacggggtgttggaatgggccgtcgctaggatggaggaagttacgcatgttaccaatgcgtaaacgaatatccaataagcgattgtatgaatggttcgcacagtaaaggaggaacaatgggtcagggtcaatcatccgtttttgatctcgcggcagtggctgcggcgtccaatggggggaacaacgacccgctgctgcctccggcacgattcatcggcgatccgcagaagccgagtcgtatgccgtataacaagtacgccgcctacgacaagcagatcccgtttgattacccggagcgcacgtggccgggcaagcgactgcagcgcgcgccgcgctggtgctccgtcgatcttcgcgacggcaatcaggccctcgtcaacccgatggattccgagcgcaagctgcgtttctggaacctgctcgtctccatgggattcaaggagatcgaggtgggcttcccgtccgcttccgaaaccgatttcgacttcatccgtatgctcatcgagcgtgagctgattccggacgacgtgaccatcgtggtgctcacccagtgccgcgagcacctcatccgccgtacttacgaggcgctcaagggtgccaagcgcgccatcgtgcacttctacaactccgtgtctgtgctgcagcgcgaggtcgtgttccgcaagaacaaggaagagatcaagaagctcgccaccgacgccgccgaactgtgcaaggacctcgagaacgaggccaagggcatcgacctgtactacgagtactcgccggaatccttcaccggcaccgagccggagtacgccgtcgaggtgtgcaacgccgtgatcggtgttatcaagccgactcccgagcacccgatgatcatcaacctgcccgccaccgtggaaatgaccacgccgaacgtgttcgccgacgaagtggagtacgtctccacccacctcgacgaccgtgactccgtagtgctctccctccacccgcacaacgacgaaggcatgggcgtggccgccaccgagctggccgtgctggccggcgccgaccgtgtggaaggctgcctgctgggcaacggcgagcgtaccggcaacgtcgacttggtcacgctgggcctcaactggctcacccaaggcatcgacccgcagattgacctgtccaacgtgcccgagatccgcaagacggttgagtactgcaaccagatcaagatctccgagcgtcacccgtacgccggcaacttcgtgttcaccgcgttctccggctcgcatcaggatgccatcaagaagggtctcgaggctcgtcaggtggccgccgagcgcgctggcgccgatctcgacagcttcgtgtggcttgtgccgtacctgccgatcgacccgaaggacatcggccgcacgtacgaggccatcattcgcgtcaactcgcagtccggcaagggcggcatggcctacctgctcaagaccaaccacaatcttgacctgcccaagcgtctgcagattgaattcgacaagatcgtgcaggactacgctgacacgaccaagaaggaagtcaaggacgaggatatctggcgtctgttcaaggacgagtacctgccgatcgaacagtccggcatgaccgccgccggtgtggttgtgggcgatactcatgacgcctcgctcgcgccgtggggccgcttgaagctgctcaaggtggccgtcagctccggtgaggatggctccgataccgtgctcaaggctcgcctgctcgaccgcggcgtgaacgtcggggtcgatgcgcccgtggagcgcgaggtctccggcatcggcaacggtccgatcgccgccttcctcaacgccatttccaactttggcgttgacgcctcgattatggattacgtggagcacaccatgtccgtcggcaccgacgccatggccgcctcgtacgtggaatgccaggtcggcgaggccgatgatgcgcagatcgtgtggggcgtcggcatcgattcgtcgatcaccaccagcgctctgaagtcgattatctctgccatcaaccgttcccagcgcaagcgctgagcgctaacaacaaaacaaagctccctctgattgcatcagagggagctttgttgtctgtgcttacttactactgggtgacgccgttggtgccggtgttcccgccggtgcctccggaattaccattatcgttgccggtattgttcccgttgttcccgccggtattgctgggattgttgccattgttgccattgttgccatctccgccggtagtggtgccgggataattcggacactcggtggaatagctcggattggcgaggcactgctgggcgaactcctgggcctgctgttgcttcttggcttcctcttcggccgccttctgctgtgcgtcctgctcagcctgcttctgcgcgtcttcggtggactgcttgttggtgttgttggacaggccgctgctctgtcccttgcccaagccccaagtgccgtcgggtccaccgatcttgccattgtctttagcggtcgggaactgctccacctcggtaccttgcaaggcctgagccatgaactcctggaacaggtgggcggggtatccagtggaagagatgccgtatccggagaaggccggcaccgcctgcggattgcccttatcgtccgggttccagatagcccacacattcatcatgctgggggtgtatcccacgaacgacgaagccatttcgtcgttggcggtaccggacttgccggcgatgggtcggcccagcatgttggatgtgccggccgccgtaccgtacgtggtggtgccctgcatggccttctgcaccaaagcgcagtcgttggcatcgaacaccttggtgcctttgctgggcgcgttgtacatgtccttattgttggaatcaagcactttggacaccatgtgcaaggtgctcttcacaccattgttggcgatggtcgaatggccttgcgccaaatcccacacggtcagggcgttgatgcccagcacgttgtacatggagttttcatcgatatcgccctgaatgcccgcttcatgggcgattgcggccgtgcgcttcggcgtcagatgctcattgacgttcatgaacaccgtgttcaccgagttggcggtggcctgatacagattgatgttgccccagttgttctccagagcgttattcacttcttgatccaagccggtgaagtgctggtgggaattgccgttgaacaacgtatcgaagctgacgccggattgcgcggcccccagcaaagcgaacggcttcatagtcgaacccggttcgaatacggcctgatcggcattgttgagctgcttggacagataatctgaaccggcgtatacggacaatacttcaccggtcttcgggtccagcgctatgccgccgatttgcagggattcaggcatgtcgtccagacgggtgtcgccgatggactgcataaggtcctgcttgctcttgtcgatggtggtgatgatcttgtatccgccggtatccaaatcctctttggtaaaggccttggactgcaccagctcacggcgcaccatatccagcagataaccgttcggccccgcgtattcgttttgctgcgccaccgcggcagtctgcgggaacttggcatcagtgtgctgcttggcagtgatgtaaccatcctcctgcatgatgttcagcacacgcttgaagcgcgatttggccatatcggcgttatcggccggatcccacgtggacggtgacggaataatgccggcgatcatcgccgcttcagacagcgtcagatccttggcgtccttattgaagtatgccttggccgctgcctggatgccgtaggagttgcggcccagatagatggtgttcatgtaattgcacagcacctcgtccttggactcggtttgcgcgattttgatggccacgatggcctcgcgcgccttgcccacataggatgtggtttcgcccatgtaataccgctcggcatactgctgggtgatggtggaaccaccttggcgcgtgcccttggtcacattattaatgaatgcgcgggcgatgcccttcagatcaagacctttatccgtgtagaacgtacggttttcggacgccacaatcgcgttgccgatgtagtccggcagcccctcgcaagagatgattgaacgattctgttccgcgtaggagccgatcgcggtggtgccgtccgcgtaatacacggtggttttctcggccaacgcgaacttttcgggttgcgggacctcggtggtggtgtacaggtatgcgaatactgcgataccggccagcaagcccagtccaatcagggagaagaagatgcccagcacccatttcagtacacggtgcttgccttttcctgtgttctttttcttcctgttcggggctcgatggctattggaagccttgtggcttgcgtggcgggaacggctctcctggggcgtataggggccctcctgtgcggagtggtcggctctgctttgcgcggtgcgcggttgcctcagagcggggccattgcctcccgaatgtgcacgacgagtataagaagccatggtgtccaccgtaactgttggccttgaacaatcgtttgacgtgagcgtaaccgcacgcatttatgccggtatttttccggaattcttacaattgggcacgttccttgatgctgcatgaatattgcctgaatgcgctggttggcctgccgtgcgacccggcgcgcacgtttcgtgtcgctgcgctggtccatacgtctccatagacttatccccagcctccacgcggcgctatgtcacccaactcccccagggcaggaatgcagcaagggtaagtggcctctgacgggtgcgtggaggttttccatttgtgcggatttggccgtgagctggcacgagcacggctccctgtccggggcgcggccgtacagtcgaacgtatgaatgacgcacagacccctagaattcgcgacccgcatgcggcggtcaatctggtcggctcaggcgcagcgcagcctgactcgtcgtcgaacgttgttgacccattggctgcgctcggcccggtctccggttcagatgcatcggcatccacatcaggctccttaggggatttcaggccgctgggcatggacgatgcggatggggcatctgatatcgaccgtggcttggcccggcttgacccgcttaccgtgcgcccgcgaatctccagccgcgtactgtgcgtggtattcggtctgctcctgatcgctattggcttcggcgtgtggtgggggtgcgtgtttaccgaaaacggacaatcgtacgacgaactggtctggaaaaacctgcacaacgatgtaccgtcctggaccaccggcatgatgaacgccgtcgcacaatcctggctggttatcgctgtcagctgcacaattgccgcaatcggcattattacggcgctgattcgacgccgctggtggttggccgggcaaatcgccgtgttcgccgtggtctgcttggccgtcacccgtatcaagggtctgttgccgcgtccgttcatcatcaacactgaatcgcctgccgctaattccgcgccttccggacacacgatgctggccgcagcctgtgcggtgattctgctgcttaccgtgcctcgcgcggttcgagctttggcgggcgtcatcggcgtggtttgggcggcgaccgtcggtgtctctgtgatatacgggcaatggcatcgcccttcggatgtggcgatgtccatcctgctggtggcgggattggccctgctcgctctggcggttacacgcaagtccggcatggacgagccgggccaccgcgtctcctcagtgagtgtgcagatcgtcggcagcgtgttgattaccgggggcctgctgttgctcgcctacagcggttatgtgatctggcaggtggtgccggggctcaatgtcagcgccagttgggcggttcagggggcgaatgtcagcgctgttgtgggcattacgggtgtggccatgctcgcattcggactgttgctggccctacgtcagatcactgcagcgcccttaagcaggctgggcctgatcggcgctccgccggcaccgcccaaacggtaaaacatgaggtgcgaacggccgaatttgcccggcacaacggcggaatttggcagttggatatgattcatgagtattatgacgccagaaacgtcgtgtgtttcgcgcaatacataaggagtgggtatggctaccaaactggtgattgtggagtctccgaccaaggcccacaagatcggtgactacctgggcaaggggtacaccgtcatggcgtcggtcggtcatatccgcgacctcgcgcagcccagccaggtgcccgcggcagacaaggccaagttcggcaagttcggcgtggacgtcaacgacgggttcaagccgtattacatcgtcgacggcgacaagaagcgtacggtcagcgaactcaaatcggccctgaagaacgccgacgaactctatctggcgactgatgaggatcgcgagggcgaggccatcgcgtggcacttggtgcagaccttgaaacccaaggtgccggtcaagcgcatggtgttccacgagatcaccaagaacgccatcaacgcctccctgaacaacacgcgcgacgtggacggcaatatggtcgacgcacaggagacccgccgcatcctcgaccgtctgtacggctatgagctgtcgccggtgctgtggcgcaaggtgggcccgggcctgtccgccggccgcgtgcagtccgtggccacccgcctgatcgtggaacgcgaacgcgaacgcatggcgttcaggcgcgcgccgtactgggatatcgtcgccatgttggccgcgcctgacgcgctgggggagcgtgccgaattctccgcccgcatgatcgcgctcggcggcaagcgactcgccggctccaaggatttcggtgccgacggccagctgaccccggacgggttcgcggcgaacgttcgcctgcttgatgaggctggtgccactgccgtggctgaagcgctgaggaccgccgatttcactgtgatgtcgatggaaaccaagccgtaccgccgccgcccgcagccgccgttcaccacctcgaccttgcagcagaccgccggcaatcgcctcggcatgggtgctcgcgtcgtgatgcgcgcggcccaaagcctgtacgagaacggctacatcacctatatgcgaaccgattcggtgacgctgtcgcaggaggccatcaccgccgcccgcaacgccgtctcctaccatttcggcgacaagttcctctccgccgagcccaagcagtacgccaccaaaaccgctggcgcgcaggaagcccacgagtgtattcgcccggcgggctcgcgcttccacgacccggatgagctggcttccaaacttcccggcgaccagctgcgcctatacacgctgatctggcagcgcacgctcgcctgccagatggctgacgccaccggctccaccgccaccgtgcgcctgtctgcgccggccggccccactgagggcgaggccgtgttccaagcgtccggcactgtcatcgaattccccggctttatgaaggccacgggggaggggcgcaagcccaaagccgccgctcccggcgctggggctggctcggaccaggctgctgccgccggcaagacggacgtcaaggccgtcaggggtgacgcctccgaatccaacacctccctgccgccgatgagcgtcggccagcaggtcgaggcaagcgacatcgaaccggacggccatgaaacccagccgccggcccgttataccgaggccacgctggtcaagacgctggaagccaaggaaatcggtcgtccgtccacttacgcgagcatcatctccacaatcatggatcgcggttacgtatacgagcgtggccgtgcgctgatccccagctggctcgccttctccgtgaccaagttgctcgagacgaacttccccaagctggtcgactaccagttcaccgccgagatggaaaacggccttgaccgcatcgcccacggcgaggaatccggccgcgactggctcacccacttctacttcggttccggcgagggcgccgcccgcaacgccgacgaggcgcacgaaggcctgcaacagcaggtcgcgcagctcggcgagatcgacgcgcgcgccatcaacaccatcgacatcggcgacggcctgcacgtgcgcgtcggccgttacggcccgtatctggaagacatggagcatctggacgtcgaaggcaacccgaagcgcgcgtctctgccggacaccatcgcgccggatgagctgacggtggccgtggcccgcgatttgatcgacaaccactccggtggaccgcgcgagctgggcgttgacccggtatccggcggtaccgtcgaggtgcgcaatgggcgtttcggcccgtatgtggcgctggtgccgccggctgaggcttcggctggcgctgctggcgatactgctggtgcttctgcggccaagaagggttcgaagaaggccgcggccgccgccgcgtcgcgcccgaagatggcctcgttgttcaagacgatgagccctgaatcgctgtcgctggaagacgcgctaaagctgctgagcctgccgcgcgaagtgggcacatacgaggaaaccaacgccgaaaccggcgaggtatccgaatgcacggtggccgccaacaacggtcgctacggcccctatctgaccaagacgggtgccgacggcaagtcggagacccgctcgctggcctcggaagacgagatcttcacggtcgatatcgacaaggccaaagaactgttctcgcagcctaagtacggccgcgggcgtggccgtggtgccgccaagccgccgctgcgtgatctgggcaaggacccgaacaccggcaagaacgtgaccatcaaggacggccgtttcggcgcgtacatcaccgatggcgagaccaaccgcacggtgccgcgtcagtacacgcctgaatccatcacccctgatgacgccttccgactgctcgccgaaaagcgtgcggctggtccctccacccgtggccgtcgcggtgctgggcgtgccggtgccgcgaagtcgggagccaagggagccaagaagggcgctgcttcggctgcgaccaatgccgccgaggccaagcgcgccggacgccgtgccgaggtgaagaagctggcaaacaagggctggtccaaccagcgcatcgccgaaaagctcagctccaccgccgccaccgtcaagaaggatgtcgactggctgactgccaacgagggctacgagcgccccgccgtaattcccaagcgtggctgagcggaattattgctctacttgcgtttcaaggggctgatttctcgttttgagaatatctacttccgcttcaaggggctggtcatctgctgaaccacgagtatgaacggctccgcgccaacgtcattccgccgttttgggacgttgtctacttgggtaacagccccttgaaacggaagtagaccttcagaaaagaccaaatcagccccttgaaacggaggtagagctggtttaactgcctgttgggcacaactctgcgcctaacgctaaggtcaatagcatgagcggtctgtttgtttcgtttgaaggtgtcgatggcgtgggcaagaccacgcaagtcgagcggctgcgtgcgtatcttgaggctcaggggcgtaccgtggtcgttacccgtgagccgggaggcactgcgctaggcaaggccattcgccaactgctgttgcacggtgtggatgggggcgccgtcgacatcgcaccgcgcgccgaggcgctgctattcgctgcagaccgagcccagcacgttgccgaaaccatccgcccggcattggagcgcggtgaagtggtgatcaccgaccgctatctagactcttccttggcttatcaggccggtggccgcgaacttacgccagaagagattcgagccttaagcatgtgggccaccaacaacctgctgcccgaccgcacatatctgctggatatggatccggcgctttcccacaatcgtcttgagcataccgaagatcgcatggagtcggccggcagcgacttccagtcccgcacccgtcaggcgttcctcgacttggccgtggccgagccgaatcgtttccacgtgatcgatgccagccagtccatcgaacaggtgtggtccgccatcgaagcggacattcagacactgctgcgggacaatgttgcagatgtggatacggtgatggcgcgatccggggcgtctacaggagccgtgacgatgggcggtgtccgatgagcgtatgggattcactagtcggccagcagccggtaatcgacatgctcagtcgcatcgcgcagggcgacccgggtcagatcacccagtcgtggctgatttgcgggcctcccggctccggccgttccaatatggcccgagcattcgcggcggcgctggaaagccccgaccacggcatgaacgatgagcccacgcgcgtcacccaacaggtgctcgctggcacccacccggatgtcacagtgctggccaccaacaaagtgaccatcggcatcgaccaggtgcgcgagatcatcaccgcctccgagcaaatgcctgccacggcaccatggcgcatcatcatcatcgaggatgtggaccgcatgctggagcgcaccaccaacgtgctgctgaaggagatcgaggagccggctgaacactgcatctggctgctgtgtgcgccgagtgcccaggatgtactgcccaccatccgctcgcgcacgcgcatcgtgaacctcgccgtgccctccacccaggcggtggccggattcctgacctccaccaccaatgtcgagccaaaagtggcgcagcgtgcggcccgtctggccgagggacacatcggcatcgccaagttgtacgccactgacgagcaggtgatgacggatcgcgacgaattggtggtgggcgtactgaacctcgctcgcgcctcggacgcggtgctgctggccggcagccttatcgacaatgccaaggcccaggccgaggcggacgcaagccgcatcaccgccggccaggaagcggaattccgccgcatcaacggactggcaccgaacgaccgcatcccgccgaaactgcgtggcgcgttcaaccagatcgccaagaaagacgatgtgaagcgtttggtcacccgccgtacgcgcgacgtattggatcgtgcgctgaactccatcgcctccatctaccgggatgtggcggtgctgcagaacaatgcggaggattcggtgggcctcatcaacctggagaaccgctcgccgatcaccgaattgtcggtgcggttgaaccgggccggtgccgtgacccgtctggacgaagtggcccacgcccgcaagcgtctagccggcaacggcaacccgctactggtattcgaatccctcttctgcgccctaattccataacccgacgcaaccagccccctctgacgagggggctgtcgagcgcggcgagactggggggagagacccccgtaacgcacagcccccagtacgtcacacatatgagcgatactgggacatatgaagatttccgccgatttcaccgtcattccggacgattttgccaaggccgccgcgcctgagtacttcaacggcggcgtgccggtcgtctccttcccgttctacatcggtgatgtgaaccccgaggcccgttacctgcactgggagttcgtggacccggattcgattccggtctgcggcttcgagtggattcactggtccgtggccaatctgccgattgacgcgctgatgtacgacttcaatgattcgcatgcgttggccatcccgccggacttctcccgtcagctgccggccatgattcccgagaccgtgcaaggccgcaattcttcggcctccaagttcttgggccgcagcactgacccagcggtgatcatgcggtacaacggtccgcagccgccggacaaggaccacgagtactacctgcaggtgtgggccaccaagaagccgttgcccggcttgaatcagggcttctggctcaacgagctgttgcacgcgctgcgcaacagcggcgaagcgcccgacaccgacggcatcttcctgaccggtaaggcgtgatttttagttggcgtatgtgagctccctctgatgagggagctggccgccgtaggcggactgggggagagacagctagagtgactacccctcagtctcgctttgcgagacagctcgtcctgcaattacggacgggctaccgctcgcaacatctgtggtgggacttatctcccaccctcgcctacaaacagcccaccgggctgtttgctgaacggctcagcctgacaaggggagcttgaataagagaaaggacaccatcacactatggcctgcaccacgattctggtaggcaaagacgcgagctatgacggttcgaccatcattgcccgcaacgaggattccgcgaacggcgagttcaacccgaagcgcttcatcgtcgtgaaaccggaggaacagccgcgcgaatacaaatcagtgatctcccacctgaccatcactctgccggacgacccgctgcagtacaccgccgtgccgaacgcggacctcaaggaaggcatctggggcgaggccggcgtcaacgaggcgaacgtggcgatgagcgccaccgagaccctgaccaccaacgagcgcgtgctcggcgccgacccgttcgtggaatacacgccggccaggggcgatgagcccgaggtgcccggcggcatcggcgaagaggacttcctgaccatcgtgctgccgtatgtcaagaccgcacgcgagggcgtccagcgcctcggcgtgctgcttgaggaattcggcacctacgagatgaatggcgtcgccttctccgactccaacgaaatctggtggctggaaactgtgggcggccatcactggattgccaagcgcgtgccggacgaggcctacgtgaccatgccgaaccagctcggtatcgacgaattcgaccttgaggacgctctgggcgaccaggaagcgcacatgtgctccgaagatctcgccgaattcatcgaaaccaaccacctggacctcgcggtggagagcaccaccccgttcaacccgcgcgacgccttcggctcccactccgactccgaccacgtgtacaacaccccgcgcgcctggtacatgcagcgcttcctcaacccgtacgacgaggtgtgggacggcccggacgccgaccacaagcccacctccgacgacatcccgtgggcccgccagcccgagcgcaaggtgaccatcgaggacatcaagtacgtgttgagctcccactaccagggcaccccgttcgatccatacggccagctgggcgatgagcgcacccgccacatgtaccgcacgatcggcatcaaccgccagagccagcttgcggtgatgcagatccgcccgtaccgcccgcaggcctcccgcaccatccagtggatggcatacggctccaacccgttcaacacgctggtgccgttcttcccgaacgtggacaccacgcccgcttaccttgaggacaccaccacccgcgtgacgtccgagaacttctactgggccaaccgcatcatcgccgccctgtgcgatggcgccttccgctccacgtccaacgccgtcgagcgctaccaggagaagaccggcgcgatgggccaccgtttggtgtctgccactgatgagcaggtggcacgccttagcttgacggccgccgaggaagcctcgcagtctgctgccgaagaggaattcgaggccgacaacgtagacggtgatgtgcagccgatgaccccggacgagaccatcgccgcgctgcgtaaccccgaagtgcgcgagattctcgccgccgccaaccagaccatggccgaccagctcaaggaggaaaccgacaagctgcttgactccgtgctgtacactcgcagcatggaaatgaagaacggcttccacatgtccgacttttagtccgtattgagctcccctccctgaggggagctgaccgcgaagcggactgaggggctaagctgttaagaaacagcccagtgggctgtttctaggcgaagaggcggcggcggccgccccaccaccccgctccgccatcatcagcacagaaaggcattaaatgaccaccatcgaagacttcaccagccagtacggcctggtccagaagatcgacgcattcggttacatgaagtacctggccgagaacccggacgccccgtgcaagcacggcaaggtggtgctcgtcaccgccgatacgccgctcaaggcatcgcgcggcgaaggcaagaccaccacgaccatcgccttgatcgacgccctgaacaagcgtggcattgatgcggccgccgtgctgcgtcagccgagcatgggcatcaccgcagccggttccaagggcggtgcctccggcggcggcaaggcatccctgacccaccccgagctcatcgactggggtctgtgcggcgaaatgggcgccatcgaggcggcccagaacctgctcgtctccttcgccgagaaggccatcgatgaaggcaagcttgacacgattctcgtgccgcgtgtctccgaggtgccgagccgctccctgcgctccaccgccgtggactacggcaagggcaacgtgccggagaaggtcgtgctcacgccgacctgcgagctcatgcagatcatggtgctctcccgctcgatggacgagatttccgagcgtgtatccaagatgatcgccggcaccaaggacggcaaggccgtgaccttcggcgagttcgtggacctgtggcgcatcaccggcattctggccgacgcggtcaagccggccaagaccgagaccgtgaacggctccccggtctacgtgcacggtggcccgttcgccaacgtgtccatcggcattccgacgctggtttccgtggaaatggcctgcgctctgcatgatgtggttgtcgtcgaagccggttacggcaccgacgccggtgcccagaagtggctggacatcgcctgtcgcgagtatggcgcgcagtggccgtccgccgccatcgtggtgacccgcgcctccacctggcgcgacgatcccgagctggcctggcgctacccgttccacgtgcagcgcctggagaacctggacattccaaccttcccgctcatcaacctgtgggaaggcgaggacgatcaggttccgtccctgaaggccaccgccgacgagctgggcttccgcacgccgatcgtcggcaatctgttccgcgacggcggcgaggcgctggtcccgcagcttgacggtttcgtcgatgcgttgcagaacggctccatgccggccgaaccgcattcgcacaagggcatggccctgaccgagaacgccaagtgggtggccgagaacgcctacggcgtaccggccgagcgcgtgatctacaagccgggcttcaccgagtccgtgtccgaggccatggaactgtgccagagcgcaggcatctcgctggatgatctggcgttcgtggcggtcaagtccccggcgaccatgaccgacaacgaccgcgcccccgaagaagagcgcaccgtgaccctgaagaaggtcgaggtgcatgccggtgccggtctggtccacgtcaacctgaccaccagcctcaccacccccatgcccaagattgtgtgatgacaggcatgaggtgaggtaactcgctttcgaggggcggatttccggttttccggaggtctatctgcgtttcgaggggctcttcgattgcgaaacccggagtatgaccattgaaattgcaatgtttatactccgggtttcttgttttaaaagccccttgaaacgctagtagagcttctgaatgttggaaatcagccccttgaaacgtagaaagcccgacaccggcgggctttctacatctgagcttccctctttgagggggagctgtcagcgaagctgactgaggggagccagaatacgcaaactagttgccaccctgagccattaaacggaaagcccactgggctttccgtaggcgatgcgaacagctatgctgcgaggggaatggtggcaactagaagttgccgccattccagccccaatcggtggtggcggtgtagcggatgtaggtgcggccctcgggaatgccgagtgtggagttcagcgcggccataatgctttcggtcagcttttcccaagcagagcccggcacagagcggccgaatacgttgacctccacataggcggcgggctggtcatcgctaccaccgaagtagattggcatattgtcctcgaacgggcacatcagccagccttcggacttgcccggcacagcggtaatcgccttgccgtaggcggccttcagtgcctcacgctgctcgggggtggtggacacggacacatgagtgtgaataacgggcataattcctccttgattcggttcacttccagtctagcctcagcggctgctgttgaacatggcatgcggacgtaggaagctgcttgcagaacggaccggggcaaggccaattggggatattattggcctttccagccaatacacgttccgcagtcagcccaatagtgttgaatactcttgtgagaaaactgattgaacagctgatgaagttcggcattgtgggcgttatcgcctttgttatcgactggggtatcctcaacctattggttggcatattccacatgcacaacgtgctggctgccaccatctctttcatcatctcgctgattttcaactatctggcgagcatgaaattcgtattcaagcatcgtgatgacatggcacgctggatggagatccttatcttcgtggcgggcgctgtagtcggtctgttcatgaatgacgcgattatctggatttccacctatggtatgaaccatgatgcctatgtatcgcagcatgccgaatatctgttgcgcaccaatatcggcaagttggtggccactgccgtggtaatgatctggaacttcttgattcgcaagtggctgctcgacgatacgcacaccaatgcgatgaaccgtctgaagtccgctgaaaatcgactgaatgccgaggagcttgaagccaagtggcagaacagcttctcccacaagctcggcatctggtccttggagcacacgcccaaaggctggccgaagtagcgttttgacgtatgctaagccccctcgtcagagggggcttagcatacgtctcacacactcacttcagtcagggtcggctgctcggtggagcccttgatctgcttgaagccgatcagtgcaatcaccagcgaggccagtgccaaggtggtcaccaccatgaagcctccgtgcgagcccatgcggtcgatgaactggccggcaatcgccgaaccggcggaggagccgatagaattcatcgcacccatccacgccatgccctcggtcaagcgagagggcggcaccagatgcaacatgagctggttgccgttgatccacgtcggggcctggcatacgccaataatcaagtagatgatcatgatcacccacagatgcttggcgaacaggaacgtactgatgccgatgttcaccacggccaggcagaagtagaagcgcttccacagggcaatcgaccagttcttcgcgccatacaccaatgcgcccatcagcgagctgaaggagaagcaggcaaacacaaagcccgtgtactgcttcatattcgcttcggtggcaaacgcgatgatggagatgcccgtagccgactggaacgcgcccaaaccgaaccaggtgacgcacaccgcaatcagacccggaccccaaatggacgccttcttgcccgaacgcgcatcggcgaccgcctgcttaatggctgcgttaatcgtggcctcatcggtcacgccttcacgctcaagacggcggcgggtctcctcggcggcggtttccaccttcagcgcctcagccttggcggcctcgcgctcacggtattccttgcgggagatgccctcggcacgcgccagcgcggtctgcgacggtggctcagtggtcagctcggtcaggaacatcagcgcaccgaccaccacgcacatgccggtgaacgagaacgccagcaaaccggagatcacggccagcgtggaggccagcggattaccgatcacccacatgcattcgtcgagcacgccgcacagcgacagcgcgcggttcgtgcgctcccggtcacccttaagaatcttggtccagcgcgcgcggctcatcgcgccccacggcggaatggcggccaggaacggcgtcagacagtacagcacccattccggcgcgcggttggtaatcgccgtcaccagcgcgatggcggccacaatccaaacgataatcgtcggaatcgagacctgcctctggccgaacttgtcggtcagcttgcccagcagcggcgtggccacggccagcgcaatcgcctgaatggcggtgagcatgccggccagcgaatagttgccgtaataatgctgtacggaaatggtgatggtcatgccgaccatcgggaatggcatgcaggcgatgaccgagccgatggaataacgggcggtatgcggaatgcgcagtagttccgcatacccaccaaagactttgtggcctacttccttgatgccggccagaatggtgctcgagttcgagttggacgagttattggacataacagcactacgctcctttccgctcccgattggatgtcccccgctggcgtggcgttgccggcgaagccctcatcgaatgatgtgttgtccatggtcgcgcaaagtttgcgtcggattttcccatccgcatatttgcgtcacggatactctacgggtgtccactccgcgacacgcggtagattggagatattaagacaacgttctcatgcccttcagggcgggaagcagaaaggcggctcatgagcgctaccaccatccatttcgtccggcatggcaaggtatataaccccgaccatctgctctatgagcgactgcccgacttccatctttccgaccttggccgtcgcatggctcaagccaccgccacgtacttggccaagaatccccaaaccaatacgattgcagccgtctactcctcgccgctcgaccgtacgcgcgagaccgccggcgcgattctcgatgcgctgaaccccgtgcgcgaggctcgtggcgaggcttcgctcacgctcaccactgatgaacgggtgattgaggccggcaacgagttccgtggcaagcgcatcggccatggcgagggcgcgctgtggaagaacggcaactggaagctcgtcaccaacctgtacaagccgagctggggtgagtcctatcagcacatcgcggcgcgtatggacgacttcgcccgcgagaaggtggcccagcaccccggcgagcagattgtggtggtcagccacgaatcgccgattttcagttatcgccattatctggagaccggccaccccgagcactggatgttcctgcggcacacggcgctcgcctccgtgacctcggtgacgtacgacaacgaaaccggccgtgtgatgtcaatcacgtatgtcgacccagcagccaacgtcaagtaacggcacactggtgttaggacattggctcccctcagagaggggagccaagacgcactgcaatcgagtggtggacgcaaaggagcatagatgaccattgaactcaatcgtgaggcaatcgcacaggtcgcggcattgccggcggtaactgaggccgccgaagccggctcggcgctgatcggcctgtggccgctgaccgaagccatgcagatggacaatgacgcaaagtacgcggagaacctgcaggtgcgcgtcacccgtgcattcgcccgcatcctgaccggcgaggacgtcaccgtgccggacgccgagttcgtctacgaaggtgccgatgagattcccggtcgcccgcagagcatcgtggacgccctgctcgccgccaatgacgcctacgacacgatggccgactacgccgagtccggtgatgccaggctgatcgttgaggcggccgacgtgttgggaatcgactgggattccgcgacggcggaatcggtgagggaggcggtcgcggccatggaagcccaggtcgaggccgacgctgaagccgatggtcgtctggccacgtctgccaagcccgccgatgtggctgttcggttcgccaccgcgctcgccgtgtgcgatgcgttattgggtgaggtgtccggtgatgctgtggccgatggttcagcggacagtgtcgccaatgctgccgccaagattctgccgattctgctctacgtcaacgaactgcgcgagcagtgctcggtgccgcgcatctgcctgaccgacgagcagatcctcgggttgcttaatgcccgtgccaaagccgccgacgcagacaccctgaccgccaccgccgaatacatcgctcctctggccgttgccgaatggaacaagcaccgtgaggatgtgctctggaacccggacgaggctaagcgtcaggccaaggaagaagacgaaaagcgcaataaggaggctctggccgccaagttcgcgcatgtcaaggatgatcccggcaaagagaccgtggagttgtaaagagtaagggcgttgctctggccgatgcttcgctcgtaacggttagaggcctggtgcctctccctccgtcatcgctttgcgatgccacctccctcgtcagagggaggtggggttactgcttatcgattaccgagccgcgatcggtcagcgtcgggtccacgtagatgtggcgggttgtagaatccgggttttggatgcggttgatcagcaggttgatggccgcctcggccagatccttatcggacgagcgcagtacggtcagcgggcgggagctgggcgtggcaaagccgttgacggagatcatcgagatatcgtccggtacgcgcttgccgcggcgctccagggtctgcgcgatggcgatcgccagataatcggagtgcaccagcatggccgtcacgcccgaatccagaatggtgtccacgatttggttgacgtccctggtgttgtacggctgaatgccggtgatggtgaacgggcattcgatggcgtcgctttccgtcacgatttgcttccagccatcctgaatcagctccgaagtcggtgtatcggtgaacgccgcgcccacacgggtgtgaccgtgttgcaggaagcgcaccgccgccttacgcacgccatagggatggttggtgcgcactgaatcgacatagtgggtgcttagcagcggcagatcgctctctggcagcgagaaacgcatctgtagcccttagggcatcgctcaaaagcaacgagttcattggaccacagagcacaaggccgcgtcgcacatcgtatatggtgtgtgtacggcctttgtgcatcttgcggccatactttgcgattcttttttgttaaggaagtatcctatttagtgaaaagtatcgttcgcgcaatgggaatgggaaacttatgggcaatggtgtcgatttgcgtatgctcgccaacaatggcggcagcgtggtaatcagcgattacgga

SEQ ID NO: 456 - DNA, 14479 bp, Unknown
  R48_24m  MAG No. k141_22949
tcatcgcggtcggacagatgcgcggttagagttctttggctcggtagatgcggatggctataagcatggagccaaaatatgcgagcagacacaacacggcgagaacaagcgccgtatgccaccagatcgtcaggaaatcggtaatattcagcaaaagccattgccagtcaacaggcaatcgggccagcagcgcaatgacggcatacaagccaaccaggaccacgccagaggccaccatcatcttgcggaaggtgaaccggtatgcacaggccagcagcaccgacccaagaatgatagccaaagcgaagatgaaagcacctgctgccaaggtaccgatccaccccatatctgctatatcgccaaagacaatgaagacgccgccgcatatcaccacgtccaaagcccagagcaggccaaccaccaacagaaaaaggtaccgacctacaacttgtgcagtgcgtgaaacaggaatcagccctcgcatggcactgtgccctgcagattcctcggatgacgcaggccccaatgcactcatacatgccatcgccgatgccaaacctccgagtccgcccatcagaccactaacaacgtgttcatcgacgtgggtcgatatcatcaccagcgataccacgatagacagcaccgggaaaaccagcagaaataccatattcgctacgctaaacagacctgtcccaacacaatcgaatcgacattgctttactacggatttccagctcatcgtcaccattcccttgaagcaaatatgcgagaggcaattacatacgagattccatatgccacaaccgtcgttgccaataccgcaataaccagccacaatcgttgcgcgatgatggcattcgcggcatgggccaatcctttggtcaccgaagcaggcaaaatagatagcagtatgaatccagccaatacaacgacataaatcaccatcatcgtgacttgaagaccgcctagtttggtccacagataacccgtgggcacgataagcgcgaccatcagcgcggtgcagaaacctcccaacggagccgcccacagattgcccgcgaatgaccaatccggattgaccagcacttgcaacccgtcaatcagcacgatcatcgctatcgacaatacggaaatcaccaatccaaccacatatcgcgcggccacctgactcttcctcgaagccggaataatgccacgaagtcgatatccgttctgtaagtcagcaaccgccatggttagcacccacatggcgcaggtgaataccgtcatgatgacacccatgcgatagccgaagccatcaccataagcttcaccttgaaagatgacggagaacaacggtgccaacaacaacgagaacacagtccgttcgccgacgcacaggtaggccatatcgacgcgcaatgcagtggccaatgcatgttgccgagaccgcgacaccctcagtattgcctccatggccgctcacctcccgctcaagtcacgattggaatcatgggcattggtcagtcgaatgatgtcatcaatggaagccgattcaacgacaagccccgaaaccaccgacgcaacagcatcaagcctgtctgaccggaccagcgcatcgaatccggtggcatacgtatgtgagcccagcaccacgtccgcaggcagttgtgccagttcgtctggaccgcccttaatcaggcggaacgattcctcaaactcgtctttcggaccggtgtagtagagacggccatcggtgatgtaggtaatgaagtcagcggcacgttcgaggtcggcagtgatatgggtgctgaacagtaccgaatgttcgccatcctcaatgtaggcatgcaggatatccatgagttcgtcgcgggcaagcacatcgagtccgctggtcggctcgtcgagaatcagcagtttggcgtcatggctcaatgcgatggcgagcatcagcttcatctgcatgccgcgggaaagatccttgatatgtttcttgccgttctgtgcaccaccaaggccaaaagtatccagatacttgtgatagcatccaccgtcccatgatggatacagtggcgcgacaatacgttcaatgttcttgacttgccactgttcatgcatgtagctgaagtcaaacaccacgccgagttgttctttgacgagttcctcgttggcgatgttgtcaaggccgagcacgtgaatcgaaccggcgtcgcggtggatcatgttgaggatgagtttgatgagggtggatttgccggcgccgttcgggccgatcagtcccatgatgtagcccttgggcaggtcgaaggtcacgtcgtccagcgtgaagccggaatcatagtgtttggtgacgtcggtgacctgcaacgccatcgcgtcggattcggatatggcggtcatgtccatggtcctttcttgaggttattccttgcggtattcctcttcgagcatgcggtccaatgcgtccagcggaatgccggcggctttggcgccccggcttgcctcggccaggctttcgcgaatctgggtttcgagctgacgttgcatcagttcgttgcccttgtccatcacgaaagtgcctttgccttgaatgttctgcaccacgccctcatcggccagttcgttgtacgccctggtgacggtgagtacggagatgcgcagctccttggcgagtttcctcaaggacggcagggcctcgcccgccttcaactcgccgctgagcaccgccgaacggatttgggttttgatttgctcgtagatgggttcaccggacacggatgagatgatcagtttcacctatgcccctttcgattgtggttgactagcaccccagctgtttagctgttatacaacacagtataactgttctgcttaactgtcaaggtgtgttgcataacagttgaacagtgagcaaacacctcgccaacatacagtgtcgaaacatgggccgtgcctacaatggcctcggaaaggggcacctatgccaaacaacgccgttacgccgacagccccgccagcgggggtgtaacttttttatcacagcacgcgcggagcgtcgtggaagtcgaagaggacgccgtcggccaggtggcagatttcgggccaatcggaggcggaggagtcgtcgtgcatggcccagaccttcatgccgaccgatttggccgacttcatgccgaccagcaggtcttcgaacaccgtgcagtcgaccggcgcggcgcctaggcgcttggcggcgagcaggtagacgtcgggctggtccttgccgacgtcgttcgcatcatcgacggagacgatatcgttgaacagttcgaacatgccgacgtggcgtagcgccggctcacgcagatgcgggggcagcgaggtggcgacacccagtttgacaccggaggctttcagatcgcgcagatagtcaagcgcgccgggtttggcttcgaccgtggtggaataggcgacgctggccatgtcgtcccattcctgcatgagctcttcgggcgtgtctgtaaggccgaagcgtgcgatggtgtattcggcgatctggcggaattgcatggcggagactttggtcatgtagtcgggcggcacttcgattccgcgcttgttcaggaagtcgatgtcgacttggtcccagactcccatggagtctaggagggtgccgtcgaggtcgaatatggcggctttggtcataggacactttccttcaacagttctcgggcgtggtctagggaggcttcggattcgctgccggagagcatgcgggcgatttcgtggacgcgggtttcgccgttgacttcggcgatggtggtgaccacgcccaaatcgtcgtcatcggcatccggcggctccttggtgaccacgaactgcgcgtccgcccacgaggcgacctgcgccaagtgggtgacaacgatgacctgcgcgctgcgggccagccgtgccagacgtttgcccaattcgaccgcggccttgccacccacgccggcgtcaacctcgtcgaagatgaaggtctggtcggcaccgccgcgcgtgtcggcggccaccagctccaaggccagcatcagtcggctcagttcaccgcccgaagcgcttttgcccatcggcaactgcggcgacccctcgaacggcgtaaacaggaacgcgatatcgtcgcgaccatacgggccgagcggatcatcggccttgtctcgcggcgtgacgcgcacttccaaggaggcgcccagcatggcgagcgagccgagttcttcagtgacgcgcgcgcccaagtcggcagcggcagccacgcgcgcggcgctcagcacgtcggcggcggcgagggccgcatcgtacagcgcctgccgttcggattcgagttcggcgaccttttccggcgaggcgtccagatcctccaaatcgaacgccgccttgtcccgccaagcgagcacgtcggccaaggtggggccccaccgacgggtgaggtcgccaagctcgtggatacggccgttgatctggtccagatcctccacgctgccttcgtcgcccagctcctggctcagggcgaacaccacgtcgcccaaatcggcattgatggattcaagccgatcggcctgctcggcgaacgtgccgccgacgcgaatcgcgcgcaacgaggtcaccgcatgattgatgagttccacggccgaagcgccgtcggcggcgtccacatccacctgcgaggcatccagcgcgcccagcgccgaacccacgccttgggcgatgtcggccgcgttttcgatgcgttcgcggcgcgccttcagctcctcgtcctcccccggctgcgggtcggttcggttgatgcggtcgatggattcgcgcaggtagtcggcctgttggcgggcagaggattcctgcgagcgcaggcgttccagccgctcatccatggcggccagcgcatcccacgccttgcggtaggcggccagttcggcttcgtctccggccacccggtccagaaactcgcgttgccgtgcggcggccgcgattttcagctgatcggtctggccatgaatgatgaccagttcgccggcgatggcccccagcaccgaacgcggtacggacttgccgccgagcacggcccgcgaacgtccggaagcgcgtacggtgcgggaaaggaacaattcgccgtcttcggggtcgacgcccgcgtcgtgggccttggccacggccacggcagcaccggtgagcccgctgtcagaatcgtcagaaccggcatcgtcaccggcatcgttggtgtcgccggaatgttcagatgcgacggcatcatccgcgagcgcgaaaatcgcctgggcccaagcctcgtccgccccggccgagacgcgcgaggattcggcggccccaccggagaccagtcggatcgcggagagcagcatggatttgccggcgccggtctcaccggtgatggcggtcatgcctgcggccggcgcaatggcggcttctcgaatcggccccagattgcggatatcgagttcttcgagcatcaggctcctgccttgccgtcacgttcgcccggcttgtcgggatcggtaccagcgacgccagcgtcaccggcaacgccagccgcatacgcggccgccgggagcgtgtgcccgtgatgcagcggctggctcgaggcctcattgcgcgcgtgctcgcgccagccgaccacgggcagatcgaacttggagaccagacggttggtgaacggcacgccggagagtcgggcgaggcgcaaggtatcgcgcgattcgcgcaccatgacgcgcgtaccctgcggcagggcgcgctggcggcggccatcgcagcaaatccagccttcggacatggaatcgtccagaatatcgatggtaaaggtcgaaccggagccgatgatcagcggcctggcgaacagggcatgcgcggccaacggaatcaactgcagggccttgacgttcggccacatgaccggaccgcccgcggagaaggcgtaggcggtggaaccggtgggcgtggagacgatgacgccgtccgcgccgaacgagttcatctccacatcgtccacgcggatggacagttcgaccatcttgccccggtcggcgcgttccagcgtgatgtcgttcagcgcccaatcctcaatgggcttggtggtgccaggcagccagacgtccacatgggcgatcatgcgttcgtcgatcgaatagtcgtgggtggcgacccggcggatcgcctcgtcgatctggaagctttcgaattcggccaggaagccgacatgccccatgttcacgccgagaatcggcacctgggtgcagtggacgagttcggcggcgcgcagtatcgtgccgtcgccgcccaggaccacgacgatttcggtgtcgtccgacacgcacggcggctgcacgccgaaatcgggggcctcggtgttgtcgatgatggtgacttcgaaaccggccactcgcagctggctcaccgcctcggccactacggttccggtctgcctgagcctggtatgcgtcaccaccaccgcgttgcgcttggccatggcatcctcctgtcgattcggtcgcactgctcattattctagccgcagacaccgtcatcactcgtacaggtgttcgaaaaatgccgcttcgtggcgcgtcgccgacaacgttccgcagagtcgattaacgtaaggcttcggcatacaatggcatacagtcgcgcgatcaccgtacgcgtgccgtgcgcagcgcgatggcatgccgtatgaccatacagcagtatcagttgaggagcttgaggacccatggccaatgacttcgacgaatcctccgccaatgaggaggcctcgaagggcctgtcatggtggtattcggccgatgtactgagccgagacaaaagcgataaaaccgccaagcgcattcgccgcatcagcatcaccgaccgtctgctcaggcacccgggccgtgtgtccatggtgtatttcggcgcactgatcatcatcgtcaccggcttgctgctgctgccgatctccacatcggacatcatcttcaccaacttcccggtcgcgttcttcaccgccgtctcggccctgtccacctgcggcattccggtggtgaacaccggcgaatactggtcgacgttcggccaagttgtcatcctattctccatccagttcggcggcctgggcgtcatgaccttcgcctcgatggtggctcttggcgcttcccgcagactcaaggtctcccagcgcatgcttaccgcgaacgaactgggcaccacgaagctttccgaggtcaaaggcgtactcaccgtggtattgggcacctccatcatcgccgaggtgcttaccttcgtgctgctgctgcccgacctgttccgcgtgaaccacggcaatatgggacgtacattgtggcaggcgctgttctacgcggtatcggcctacaacaacaccggtttcacgcctgacgccaccggcctgcatgtgaaccgttggggcgtgggactgccgattctcatcagcgcattcataggaacgctcggcttccccgtggtgctgaatctggtgcagtgcgcacgccggcatctcagcccgaaacgttggacgttgcacaccaaactcactttggtgaccaccgctgtgctggtggccacctcactggcttggttcctgctggtcgagtggggcaataccggcctgttccccgcagacggtcccggcatgaagatgcgccgtgcgatgagcgccgccgtcatgccccgctccgccggtttcgatatttcctgggtgcccgaagtcacgaatgagaccaaggtgttcatgagcatactcatgttcatcggcgcaggctcctcatccaccgccggcggcatccgtgtcaccacgttcgcggtgattctcttgatttgccgcgccgcattcaccggccatcgcgatgtcaccgtgttccgccgccgtatcccccgccgcgtccagatgaccgccgtgtccgtgaccacggcctgctttgcgctggttatggtcggtgcgatgatgctgatgttcaccaccggctgcgcattcgtggacgccgtgttcgaggcctgctcggccttctcgttgggcggttattcggtgggcgtggcaagcgccggcaatccggccagcctgtttattctgtccgccgagatgattgtcggacgacttggcccgttgaccatcgcctactccatcagcagaccgatggctcccgaacctattcgttatccgcaggaaaacattatcgttggctgatcgtccattcaatcggcacacagaaatccggcatagagaggaccatcatcatggcagcaaaaccgagcggcaacaaaagcgtgctggtcatcggcctgggccgtttcggcgggtccgtggccgccaccctcgaccagatgggtcaggatgtgctcgccgtggataagaacccggagcttgtggcccgttggtccgcgcatctgcccaccattcaggccgacatgaccgatgtgctggccatcgagcagatcgacgcctcccagttcgacacggccgtcgtggccatcggcgacagcatcgaggcttcggtgatcatcaccggcaacctgctggatgccggcgtttccgatctgtgggccaagtccgtgtcccaggagcatgcgcgcattctgcagcgcatcggcgcccgtcacatcatcaatgcggagaccgatgccggcaagcgcgtgggtcatctggtggccggcaattatctggattacatcgaaatcgacggcccgtacaccgtcgtcaagatccacacgcccctatacgcggtgggtcgcagcatcgaggacgtgcaggtgcacgacaaatacggcgtgaccgtggtgggcctcaaggccccaggcaaggagttccagtacggctccaaggaactggtcatgcatcgcaacgacgaactcatcctcatgggcaagcaggatcagatcgaccacttcatccaaggctaacccccctaactgcgctcgctataccccctatctgctcacatcgtgaccgatataacccccctcaacatggatgcgctcattattggggcaataagccataaagctgtacgtccatattgagggggctttatcatcatgggcaagcatacgcagaattgcacgttgataggcaaaggagtctacggcactataggagtggaccaacgttcccgtcttgccgatggcgcgcattttcacaccatgattgtgaccagcatcctcgaggcctcagttatagaaggggacaaactggtcatcaagagtggcattgtgcggtgtgatggtgatattcgcgtatccagcatcagcggcagcggcgacatcgaagtcggcggcgacattatttgcgatgaaataacctttaccggcaaactgcgatgcaacagcgatatcgtttgttccggaaatctgtccgtcaatggctccctaggcacccgtcatattagcggtcagacagtccgcttgaacggcgtgttgaagggtcatgacgtcaacagcagggctctggaagttcatccactgcgcagtacgatgttttctcgttttgatatggatgggtatgaggatggcagcatggttcgccatatcacagccgtcacggttgaagccaaccatctgcaatgccggactttgacggcggactccgccatgctacgcaacggcagtgcggtggaaagcgccacgtgtgccaccgcaataggcatcgaccgtacctccagcgtgctgctggtgaacggagactgccaacgcattcatctcaagacagcgtaaagcaggtattcctcattaccgtgggtgccgatgatgggactatcggcagtggccaccacgtcaagtccgtgctgttcagcacaggcgaccacgtcgtgcaatgcccgctcccgcaatgccggatcttccacgatgccgtttttgccgagtcctgcccgcccgacctcgaactgcggtttgaccagtaacacaatctgcgcaccgggagccgcgatgcgcgcgattaccggaatcacataggtcagggaaataaaggagacgtcggagacgatcatcgccggccggtaaggcaggtcgtcggcctctacttcgcgaatgttgacgccgctcatttcgatgacgtgctcgtcattggcgatgcgcgggtcgagctggccgtggccgacgtcgagcgccacgactttggccgctcccccgcgcaacagtacatcggtgaagccaccggtggaggcaccgatatccagacattccaagctttccggcccggtaaggccattgccggcaaaggtctcgaacgcgcccaagagtttgtaagcgcctcgggagacgtagtcgtcgcccttatccacggcgagttcgctgtgcccggctttgaccatgaacgatggcttggtgatggtctcgccgtccacgcgcacatgcccggctttgatgagtcgctgcgctttggcccgcgattcgaccagtcccgaagccacgagcatcatgtcgaggcgatcaagtggggtcgcgggatcgatatgttgctcggtcatataccttcctttcgacccaccatccaccaacggggtggctcggcatggacccaccatccagcacttcacgtcatcttccgctggcgggagaatgaatctcctctgctagctgcggctgttatcaagctcgtgttgtaacgattccagcacgttgcgataggtctcaagcttgcggtcgttgtcttgttcatcaatatccgcaagttcggggtatcgctcggtgaccggcgcgtgttcgctatccgtaggcataggactatgcctcgatggcgaacaccggtaccgtggcctcgctgagctgtgcgccttggtcggcggcttcccatgcggcgcatacggcggcacgcaggccgtccatactggtggggtcgctgacgtgtacctggccgttttcaaaccaagcgctagccttgcggcattcccaagtaccgctctcgtcgcggaccggctccggttgggcttcgccgagttcacgcagatcaagggcgatgaatgtgggcctcaggtgtgccggagccagcatcagttcggtcgggttggtgacaccggtcagcaccgccagcgaatcatagtcaccgcggttaccggcctcgatatcagtgtcgagtcggtcgccaatggcgatggacgcctccttgggcaccagatcgtggccttcggcggcgttcagttcgcgggcctcatcgtacatgtacgcttccggtttgccagcggaggcgaccggttcgacgccagtggccgtgatcacggcgcgaatcatcgatccgcaaccgggggcgatgcccagttcacgaggaatcgtcaggtcgcggttggtcacgaaatacgtggctccggcctcgaccgcgaacgcggcatcggccatcatctgccaagtcatatccggataccagccctgaataacggcctgcgggcggtcctgaggaccgtccacgatggtcaggccgttgcgggtgacctcatcgcgcaaatgctcggcgcccaatacctgtacgcgcgcgccggcgggcaacgccttggccaccacacgggcggccaccaccgaagaggtgatgacctgccacggctccacgtccaagccgaagcccttgagctgatcggccaccacgtgctggaagcgcgaggagttgttcgtggtgtattcgatggtcatgccggcggcttcggccgcacgaatggaatcggctgcgtattcgaccggattcttgccgcgatacaccacgccgtcgaggtccagcagcgcaagctgataggcctcggcgagcgggcgatcggtgcctttgaggaaacgggtcattacgccgctcactcctcggtttcggtctcggtctcgtcggactcagccggttcaacggcatcgtcagcggactcggaagactcctcggcttcagattcctcagattcttccgatgcatcctcggactcagcattttcgacatcggcctcatcggactcggcatcgccgtcttcagcctcgtcgtcctcatcgccgtattcctgctccagatccggggcgtactgcgcctcgtccggatcgatgccgagcttctcgagcacgtcggagtcgtcggtgatgtcttcgagatcgtggtcaatcaccacgtcgtcgctgttttcgtcaatctcctcgtcggcatactgatcctcaagacggtccagcaggtcattaagctgctcggcttccttgctgcggccggcctcttcaaggaagtactgctcggcctgcacggcacgcatacggtactcacccggaagaccctgagagcggccgacggtatgaaccacttcaatggccttgtcccacatctccaaatcgccaagggcaccggcatacaccaggaacatctcgaccttgggagcgccatgcagctgcttgccctcatcggacagcgccagttccacggccttcttcggttcaccgacaccacgctcgcagtcagcgatgaacggcaggtagtcgaggaagccgttcatacggtaggcggtacggaactcacgcagggacagcttgtagtcgccctgacggtaggccacgaacgcgagcgtctcgcgggcaaagtcgatgcgggaggcctgacgggccacccacttggcgtgttccaaagcaagttcgggatcgctctcctccagcgcgaaagcggcgaggatgtgcagaccaatattctccgcatgctccttggacaggccgcgcagacgttcgcgctcatccttggacagcatcgaccattccatgcccttgggcatcttgggctcgtcgggacgacggtcggtgtacgggttctgcgaggggaagctcatcgtgccgtcggagttacggcgcggacgcctcatgtattcagagcgcttctcctcacggtactggcgcttctcttcctgcgaaaactcgcggaattcgccgtcacgacggttgttgtcgcggcggtcgtccctgcggaagttgcggcgagcgccatcacgatggaaatcacggcgatcgttatcccttcggtcatcgcggcggaagtcacgacgatcattgtcacgacggaagtcacgacgctcaccatcgcggtggaagtcacggcgatcatcgcgacggaaatcacgacgatcgttgtcacggtgctggtagcgcgggttctcgccgttctcgccttcgtgggaacggtagccgccttcgcggcgcggcttgaaaccttcaccgtcacggcgcggaccactgccgcggtaaccacccttgtggaagccaccggacttgccgtacgacttacggtagccgccgtggccctcgccatcaccatcacggcgcggcgcgtaaccctcaccatcctcacggcggcgcggcttgaagccctcgccatcgcggtcgcggcgcggcgcgtaaccctcaccatcctcacggcggcgcggcttgaagccctcgccatcgcggtcgcggcgcggacggaagccgtcgccatcgcggcgcggaccgttgccgcgatagccgcccttgccaccgaaaccagagcggccgcccttgtggaagtcgccacccttgccgtacgacttgcggtagccgccgtggccctcaccgtcaccatcacggcgcggcgcgtagccttcgccatcctcacgacggcgcggcttgaaaccttcaccgtcatgacgcggcttgaaaccgcccttgccgcgcggcttgaaacccttgccaccgcggttgcccggtcggcgatcgccataccccttatggccgccgccgtaggacttgccggaacgctcgttaccttctgccattacttgttttccttaattcgttgttgattaacggttttccacggcgccgagcgccttcttgccacgacggatgagcgcgaagcggccggccaggaagtcggcttcggccagcacctgctcctcatcctcgatacggttgttgttgagatacacgccaccggacttgatggcgcggcgtgcctcggaagcggacttgaacagtccggcagcctgggcggcgtcgattacgcgatcgcccggcttggagacggggaagacgtgctcgccgttctcgtcgaccaccttgaagccgtcgagcacggattccagcgtttcctcgtcgatgtcttcgaggttgccaccgcgtccgaacagcgcaccggaagcgtcaatggcggcctgggtagcggcctcgccatgcacgaagctggtgacctcccaggcgagggtcttctgggcctcgcgcttgccggggttggtcttggattcctcgaccaatcgttcgatttcggccttgggcaggaaggtgaacgccttcagcaggctttccatctccacgtccgggcggttgatccagaactggtagaacttgtacgggctgagcatcgtggcgtcgagccagacggcgttgccctcggacttgccgaacttcttgccggaagcatcagtgatgatcgggctggtgaacacattgacgtccacaccgcgcaccttgtgaatcaggtccaggccggaggtgaggttgccccactggtcggagccgccgagttcca

SEQ ID NO: 457 - DNA, 9275 bp, Unknown
  R48_24m  MAG No. k141_24185
gcgttcggccatcgccgaggcggcgaacgcctccaccggctcgctcaggagatgcagctcctcgcgcagcttgacgtgttcgaagttcaggtagccggcggtgggtggcagatcgtgcgtggtcaccgaggccaatgcctgtttgcgatagtccttgggtgcacggtacgggtcgccggcgttcggcgacccgtccacgcggttgaaccattccacgtcagtgccgagtacgccgtgatctgccagaatgcggcgcacgtaatccggcacggtgcccagatcctcgccaaccaccatgcctccggcgcgcgtggcttcgatggccagtactcccagcatcgcttcgtggttgtacgttacgtatgcgccgttgagggtgccgagcccctgcggaatccaccacaggcggaacaggcccagcacatggtcgatgcgcaccgcgcccgcgtgctcgtacatcgaatgcaccatctcgcggtacacctggtagccggtggcctccagatagcgtgggctgaacggcggttggccccaatcctggccctgctggttatagaagtccggcgggcagccgaccgtgacgccgccggaggcgaagcgttccggattggcccaggcatccgcgccgagcccgtgcacgcccacggccatgtcttgcatcagacccagtgtcatgccgtggtccagcgcctcctgctgcgcggcgttcacctgctcggcggcaatccactgcagccagcggttgaactcgaacaggtcgtggtgctcctcgacgagctggcgcacggccgggtcgtcgatggtcttctcgaagaaccaacggttctcgccccacggcgcgccccatacctcgaagcacaggcaccaggtggcgaaggaatcgaggtctgggccggcggtggtcttgaaatactcgaattcgagctcgcgcttgttgttgcggcccgcgtcgaagatcaggcgcagcgccgggcgtttggccgcccacgccgcgttgatgtccatcggggtcgattcgtcgttgcgcgcggccaccgaatcatgcagcgcatccacctgcgctcggatatcggccggcagcgtgccgtattcggggatgtcctgcgggcggatgtacgtcacgttgaggaatcggcgcgattccggtagatacggcgatggctcaagcggcggaatcggcgcgccggcgtgaatcgggttgatgagcatgaagtcggccttggacttgtcggccgcgtccgccagcagcagcttcagatcgccgtaatcgccgatgccccacgattcgcgagaccgcacggaatacatctgcgtcatccagccccaccgctggtgctcggcgaccgcctccggcacgggaatgcgcgcgggggcggcgatgatggccgccttgccctcgcgcccgtccaccgtgacggtcagtgtgtggtagcccatcggcagatcgggggcgatggtcaagtccggcttgccggaattgaggttcggcagcagggcaaagtggccaaacgcggtgccgtcctccagttcgatggagacggtgatgtccgcgtccgacgaacagttcagggtgatgccggtcggtttgccggtggtggcgacgatggtggaggggagcaaacgtttgctgttttccacctcaagttgggtcatggaacgttttatggcctcgtcgctggaggcgtccacatcgagggccttgagcacggcgaccaaggcctcgtcgctgatttcggtgtaggtgccgagctggtcgatgaacgaggtggaaagcccgcatgctttggccagcttgaccagcggacgggcgagtcgttccgcgctttccgcgcgctgcggggcaccggaagcggcgtcgttggtggtgtctgcgatggtgccggtgctggtcgctgcgtcgttgccgtgcgcgtcagtcatgatgactccttgcttgcaaatcgggtactgctagtcgtttgcattgctgttcgagggccgctctgcgttgaggttccggcaatctgacagaccaatgttcgagctgttctatctttaccgtaactcatattgacaacgattgcaatacattcggtgagttgggcaattagcgggttatccgagcacggcgaacgactgcggggagagcgtcagctgcccgtcgcccacggccggctcgccgaggccgagcagcctagcggcgtcaagtgcaacgtgctctctgatgaagacattgccttcggcgtcggcacgtccagtagttctcctgtaggctgggcttgccgatttgtttattgttcatctgaagttcctttgcgcgttcgctggattactgctgtcaaatgttttgcggccatatcgtaaaggcgatcggaatcctgcactcgcgtgaaggattcggcctcgaaggcctcatcgattgttcctgaagcgaaaggaagaatagtgaagaatcagttgaaggcagtcggtgcggcagttgctgcgcttgccatggtggcggcgctccccggtatggcccttgcgcaggacggcaagggtgttgacgcattgtcccagcacggtggcgcccagcgcattgcgggtgtgtacggtaacgccacggcgaaaaacgttattctcttcatcggcgacggcatgggtgattctgaaatcacggttgcccgtaattacctgcatggtgccaatggttcgttcgatggccttgacaggattggccagccgaatctgaacactgcggaagccggcaccggccagtacaccactttctcgttgggctccagctccagcgatggcaagtatccgaaggcaggcggaattaacgagaacgctggcgtcgtcactcccgtgaccgactcctcggcttctggctccgcttgggctaccggcaccaagacctacaacaacgcggtcgacatcgacatcaacggcaatcctcagctgaaccttatcgagctcgccaaggccaagggtcttgccaccggtaacgtgactacttctgaaattcaggatgccacgccagcggtgctcgagtcgcattctaccgagcgctcgtgctacggaccgcagggcaagaccgacggctcgtccaataacgcggataagcagtgccgcgccgaacagctcaaggagaacggcggcatcggctccatctccgagcagctgctcgacacccgcgctgatgtgaccatcggcggtggctccaagtacttccggcagaccgcacagggtggcgattatgcgggcaagaccctgtgggagcaggccaaggaacgcggcttccagaccgtcgagaacgatgtggacgctttctccgcgttgcggtaccaggagaaccagccggtgctggctctgctgggtgatggcaacctgccgacgcagtacaacccgtccgttgcgaccaagcgggatcccgccaaggatgagaacccggtggagtgcactaccaatgcaaagtggttgggcaacaagaccgctgccggcaattcggcttctttggccgacatgacttcgaaggcactggatctgcttcaggccaacccgaagagccagaacggtttcttcttgcaggttgagggtgcgtccatcgacaagcaggaccacaacggtaacgcttgcggtcagattggcgagaccgatgacctcgacaaggctatctccgctgcactcgagaagattaacctgaatgacacgctggtcatcgtgaccgctgaccatgctcacaccagccagattgtggaatcccagccggcttacgcgctgagcaccgtgctcaagaccaaggacggcagcaatatggtggtctcctacggcacgtctgcgagcaacctgtactccgatggcaatgacaccgaaggcacggcggattcgagcaaggctcagggcaacatgagccacacgggcacccagctgcgcattgcggcttccggccccggcgcatcccgcgttgatggtttgaccgatcagaccgataacttcttcaccattgcccacgcgctgggcctcgcatctgaaaccgccgatcagcaggcgctgtcttcggacgctaaggttgcggtgaagaatgagaacggcaagtttgtcgccgacctcaccggttttaatggtgacgcggtggtctcctacgagctgaaggaccagtccggcaaggtgcttgatgcgtctaattcctccacgcctgtttccggcgtgagggttgccaccggtgaaaccaccgctattgcgctggataaggtagctgagggtggcagctacacgctgaccgttaccggtcgccagtctggcaagactgtgcctctcgatttccagggaccggctcagggctctggcgacaagacccctgatggtgttgtcgctgagggccaggtccagcaggataagaagaacgagggcatcggcaaaaccggtaccgctgtgcttggtgtagtgatgatggcgattgctctgattgccgctggtctgaccatcaagttcgctcgcgaacgtcgctgagtctcgagagcagtcagcgggcggctgtgaatagtctgctcgtctgctgccgtgagttggccgcattccgcacatcgatgcggagtgcggccattttgctgtgtcgattgcagttttctgtaatgattggctgcacctgttgcatagacgataccttcagtatgggtgccgaaagtatcgtcacccatacacgatgaaaggggtctcctatgcatacagtgggacggcaaatacgaagtttcatagttgtcatcgccataattgcgtctatgctggtgaatccaatgacagccaacgccgatgaaacagataccgctggctacgtcttgattggtaacacccgtgtatctcgttcgttgggtgtccagaccgaagaacagttgacggagcggctgcgccaaggctatgtgagcgtgacctttaatcaatatgcccaaccaattgaggttgagccactaaacaatgaatagactattcagccgcgtaatagtacgagagttccttgtcggtcgaacgatgtgtgcttgacgttcgtgaacggctccaatcgtggattctacggttctggtgtgcgtgcaggagcatggagcggtgtgaagaaaagcgacaacgggaaatggttcacccgattccgcgtaagtctcggtggctccacatactctaccggtgtactggggccgtatacgataggtaactggaacactgcagcttctattacgcaggtgacgatttactagcaaatattgctgtcctatgatgagcttgacgattctatcgtcaggctcgtttgttattggaggctcggtgaagaagacgtttggcgtatgcgagacagtagtgctggttgcatttctgttgcttgggatgctgccacagtggaccgcagattattggagcactgatgccgttgcgggctatgtcttggttggtaacacccgtgtatctcgttcgttgggtgtccagaccgaggaacagttgacggagcggctgcgccaaggctatgtgagcgtcacgtttgacgatggactgacagaggtgtcgccgttgtcgtatggggagcagttgcaggccggcaacacggtgtgcccgccgtatttccgctggtggtgcggtatcggttagccggcgttattgattagccaatggtattgaccggcactgaagcgtgcagtacccactgtccgcgttcttcccgcacgttccaatctccgtgcatgttctgcacgcgttcccgataatatgcgagtccggaatgcctcccttcgagggatactccgtcttggcgtggatgatccgttatgtcaatggtgacgcggtcctgagaaacggcaatcagcattacgtagcgctgcgttgagtcggcatacttggcgatattgccgaacaattcccgaagaaaatcggcaataaacactgtaactgagttgttcagcgtatcgatagctccggtgatgatgacgtcaccggcgtaacccatacgctgcaatcgagcgcgatgcttcgcgatgtcgtcagataggtgtcgccgagatgccacagtcacgtcaagagccgactttggaacttgcggcggttcttcctcaagcgtggcgatggcctgtcgggtgtgctgcagcgcatcatcggcaatcgtgcgtagggcctttagctcagcggccgatactgagccaggcgctaagcggtaccggtcaatcagcagcatcatgtcggtgatgtcgttggtggtgtggtcgtgcaagtctcgcgcaatgcgaacattgcgctgccgtgcgcgccgttcatgctcgttaaggctgttgtgcgccgctgaacgtatgcagatgccgatgcaaatcgcggcaatatccaggccagaaaaggtcagcgaaccgccttgtcccatcacaccatacggtgcaataacaccgtagccaatagcgcacaatgcaaataatgtgccgcagaccatgccggctattgcacggaagtagctgattgaagcgatggctacaagcgccagaatatacgacgtaaacggcgtggaaatcggcgcaaacatttcggcggccagtagcgcgagcagcccataagcgccttgctcggggcgcgcggtgaaccagagcgccaacgctgtgcgcaatgcaaacaaggccaatcccagtgcggtgactcctgcgatatgcaatatatacagcccctccgcaaggttgagcagtgcgaacgccgccgccacgcacgacagatacgggtggggaacacggctacagaacatcgcgctctcctgcatctggcgacaacagatgattgcgccggcaatactccaacgcctccagccatgtgccgacgtgcagtttgcgcttgatattgcgcctgtgcgacgacactgtattggccgtgatgcccatacgcgcgccgatttgcttggtgctgaggaactccatgctcagggcgatgatattgcgttcgatgtcgcttagtgcaggcgtatctggatcgggtactgccgatgataggtctgatgacgaggccgatggcgagtcagatggcaaagacgctgtggagctcgattgacgcggcgactcggcgtggtgggccgcctctcgtaaggccggtgcaagcgtttcggtgagattcgccttgtccagcagcgtgacgattccggcatctgcagcggcctgccggtacgtctcaagacggtatgacgtgagcccgatcagcgcaatgccgggcgctcgccggtggatttcggtagcaatctgtggcccggtaacgccgtcaagtgccatgtcgatgagcagtacgtcggtatggtggctgacggactgacattccataatcgccaccgccggagaagtagtgctccatacatcaacgatgcggccatggataggggtcgaagacaccagccgagcgatgcaatccagcgcgcaggcgtcgttatccagaatgcctatgcggaaagccgctggtggttcatgtactgattgagtcgcgtccgacatgactccatacagtagccgttccgccctgtcccagtcaccccttgcagttttctgcataggcgggtttggcctcaaacgcaccaatccatcaccctcaatcgcctctccaaaaaacttgagccagacacgctcaactttttgtggggaatttgggaatagaacttgccaaatggaagttgagtgatgtaggctcaaattttggaaggttcaagagacggccaaacggaacttgggcgaagaacgtaagaacaaacgaaaaattaaggagcacacattatggcacgcgcagttggcatcgatcttggtacgaccaattcctgcatcgcaactcttgaaggtggcgagcccaccgttatcgtcaacgccgaaggcgcccgtaccacgccgtccgtggtggctttctccaagtccggcgagatcctcgtcggcgaagtggccaagcgtcaggccgtgaccaacgttgaccgcaccatctcctccgttaagcgccacatgggcaccgattggaccgtcgacatcgacggcaagaagtggaccccgcaggagatttccgcgcagatcctgatgaagctgaagagggacgccgaggcatacctcggcgagcccgtcaccgacgccgtcatcacctgcccggcatacttcaacgatgcccagcgtcaggccaccaaggacgccggcaagatcgccggcctgaacgtcctgcgtatcatcaacgagccgaccgcagccgctctggcctacggccttgagaagggcaaggaagacgagcgcatcctggtcttcgacctcggcggcggcaccttcgatgtctccctgctggagatcggcaaggatgacgacggcttctccaccatccaggtccaggccaccaacggcgacaaccacctcggtggcgatgactgggatcagaagatcatcgattggctggtctccgaagtcaaaaacaagtacggcgtcgacctgtccaaggacaagattgcgctgcagcgtctgaaggaagccgctgagcaggcgaagaaggagctctcctcctccacctccaccagcatttccatgcagtacctggccatgactcctgacggcaccccggtgcacctggatgagaccctgacccgcgcgcacttcgaggaaatgacctccgacctgctgggccgctgccgcacgccgttcaacaacgtgctgcacgacgccggcatctccgtgagcgacatcgaccacgtggtgctcgtcggtggttccactcgtatgcccgccgtcaaggacctggtcaaggaactcaccggtggtaaggaagcgaaccagtccgtgaacccggatgaggttgtggctgtcggtgccgccgtgcagtccggcgtcatcaagggcgaccgtaaggacgtcctgcttatcgacgtgacccctctgtccctcggtatcgagaccaagggtggcatcatgaccaagctcatcgatcgcaacaccgccatcccgaccaagcgctccgaggtcttctccaccgctgaagacaaccagccgtccgtgctgattcaggtctaccagggtgaacgtgagttcgctcgcgacaacaagccgctgggcaccttcgagctgaccggcatcgctccggctccgcgtggcgtcccgcagatcgaggtcaccttcgacatcgacgccaacggcatcgtgcacgtgtccgctaaggacaagggcaccggcaaggagcagtccatgaccatcaccggtggttccggcctgccgaaggacgagatcgaccgcatggtcaaggaagccgaggctcacgaggctgaggataagcagcgcaaggaagacgccgagacccgcaac

SEQ ID NO: 458 - DNA, 15739 bp, Unknown
  R48_24m  MAG No. k141_24708
aggcgggcgatatggagttcgtcaacgtaccgctggacgtgttcaagaaggccgcgcttgaccagctcaccgccggccacccgatctggttcgcctgcgactgcacgcagttcgcgctgcgcaaggacggtttcttcgaccagtccgtggtgcgcgtcgaccagctgttcggcaccgaattcaccggcgacaaggcccacggcctcgaatacggcgacagcccgagcaaccacgccatgactttcaccggcgtgaacctcggcgaggacggcaagccgaaccgctggaaggtggagaacagctggggcaaggacgccggcaaggacggctactacgtcatgtccgacgcctggttcgaccgctacgtcaccgagctcatcatccgcaaggaatacctcgacgacgccacccgcgccctgctcgccgccgaaccggtcgagctcgacccctggcagcccctcacccgccgctgccgctgacgttccgctggcgggagcatatattcgaatgccccttctctctgttcagagagaaggggcattacgttatgcgagtacgcccggccgcacctattcgagactatcgcggctgagctgagcaaaagtgccgtcatcatcggccaattgccggtaggttccggcctcgctaattgttccgaactagttatccacagagttatccacatctcacgcaagctagagccacataccccggttttcatagcgagcatgtgaccgctgcgctacggtggcgtcatgaacgacatattgcccactccaccgcccggcgtattcgacgacgaaccgtccggctggacccggccccacacaccgggcgttgcgtctgcgcgcaccatcaatcctgagctacgttcatcaccacgtatggcgagttccgcgccaactgtgattacaggccctgtgtcgccagcaatgagcgaaaccctcacccaacgtaagcgggaaatgcttaaacgatgcacggacgccgcgcaacagctcgggcaaccggtgctcttcggcatggccacatcgctgatactgcaatccgtgccgcttcccaaggattgcgatatcgaccccgccgagctccataccgtctccgactcacaccgcacacgaatacgtgccatcgtgccgccaacgacaccacacatctggaagccgctgagcgatgcgcacaatgtgcgtatcaacaaacatgtgtacgcactggatctgatacacacttgggcacaactcgccgctcatatatcgctcgaatcgctggtcatacttggcgacgcaatccttacggcaatcgcccgcaagccgggtctggcgagcggccgcactgctgacggcatttatcaggacttcgtgcggcaagtcaccgaactcccgaaattcaacgcaaaatccaagtgcatgatcgctcttgcattcattacgccccgcgtggactctccaatggaatcaaagacccgcatcgcgacgacgaaatacgggcttccgccagccgtgacaaattacacggtgcccggcgcgacattcagcaacggcgcgccgataacgctcgatctcgcttggcccgaatttcgcgtcgccatcgaatatgacggcgatcatcatcgcaccgacaaaaaccagtggcggcgggacaacgacaagcgcgaactgctgcgacatcatcattggatcgtcatcatcgccactgccgcgaacatggccgatgagccatcccaagccgaactcgcctaccgggtcgggcggcagttggcattgcgaggtgccgtattcgatttcactttgacggcaacgccactcgatgagatcgcccggcggaggcgacgaagaatataacgtttatcgcgaaagtcgtacagtatccatgttgcgccgacgctgcgcgactcggtgtccgtgtccgatgtcccggtagcgatgtcaatcgatttatgtgtggaccgggccagatttcgctgtcccggttctccatttcgcccctttttgagcaaccaagacaaaatttcattcacctatcaccccaccgtgcaatattcgccatcgtacatcggcggaattccggggttttgggattacggataatgggcgtttacaaggggggctgtcccggttcccaaaaagaagccgaaatcacgaaccgggacagcgaaatctgtcccggtaatcgcgtcaatcggttgccgtcatcaccggaacatcaactgcgcataggtcgaacgcttcaatgcgcaacaggcatgcgaccatatcgcgatagcgatattccgacggaagtatgggactcaccacgcgaccaatattatttgccgagctttggagcctcgtgcttggcgtggcggatcacggcatcggggaaaccggcgtggatgtagtcggacagcatccgcaatagcctctcgtcaaaggtgtgccgctcatcgctgctggcatcgaccaggatgaaatcccatgagtattcggtgtcaccgtcgttgatgatgagtccgcggccagtgatttttgcggccagcaacgcggcgatctgtatggcgcctcgcttgaccaaggccgattccgcttgagtcaggttgcccgaaaatgtgacggtatacatcatcagtccccccttctttgttattttctagaacagcaatgccttattgtaaacagacagcactctgccataatccttttttcaatatgcggcccatggcattcccagcattaaaaaaaaagaaacccggcggagggggccgccgggtgagagagaagagagaagaagggttcagttatggggttcgaagaacctcgccaccggtatgaacttcattccgttgacatcttctatataaccgccccatgcttggcgaattgatgtgcttgtctgggaaaagtcttggcggagtgtgacgaatttgtgacgcccgccgacaaccggcctcgcattgtcggggcttgaccgcacatacggcaacgggccacctcgcaacacttcatgtgcgaggtggcccgtcagcttcgagctagcaatgccgaatcactcggcggcgagcttggccttctcggcggccagacgttcggcttcggcggcacggcgagcagccaacgcttcatcgaagcgagccagctcctcttccacggcctcggtcggaatcttggcgaagatcggtgcgggcttaggcaccacggcgccgacctcgatcgcctcgctcttccacgggtgcacgttcacaccgagctcgtaatcgccggtgatgatcgggtacgtgaagccgggcttgtcgagatcctcgacttccttgagctcaggcagcggcgagaaggtgccggtgccgccgagcgcctcccacaccctctgtgcggagtgcggcaggaacggcgcgagcaggtggttcgcgtcagacacggcctgggcggccacgtgcagcacggtgccgagacgagcctggtcgtccttaatcttccatggttcggtggcggaaatgtacttgttgatgtcgccgaccacacgcatcgcctcggacagggcgtgcttctggtggtgggtttcgatggaggagccgaccacgtcgaacgcggcggaagcctcttccagaaggccacggtcttcgttggtcatcgaatcctcgtccagcggcggaatctcgccgaagttcttgttgatgaggttggccacgcggttcaccaggttgccccacgaggaggcgagctcctcgttgttgtggcgcacgaactcggcccaggtgaagtcagaatccgaggattcggggccggccacggaaatgtagtagcgcacggcgtccacggggtagcgggcgaggatgtccttgacgtagatcacgatgccgcgggaggagctgaacttcttgccttccatggtcatgaactcgctggccaccacctgctcaggcaggttgagcggacccatcgggccggtttcgccgcccttggagcccttgccgttgtatgcgagcatttcggacggccagatctgggagtggaaggtgatgttgtccttgcccatgaagtagtaggccgggcagctcggatcgttccaccattcacgccacttctccgggtcgccctggcggcgggcccattcgatggaggccgacaggtagccgatcacggcgtcgaaccacacgtacagcttcttgttcgggttgtcgatccagcccttcacctgcaccgggataccccagtcgatgtcacgggtgatggcgcgcggcttgacctccttgaacaggcccagcgagaagttgatgacgttggtgcgccagcccttgcgggtctccagccatgccttgttggcttcggcgagcgccggcagatcgaggaagtagtgttcggtctgctcaaagcgcggggtttcgccgttaatcttggagacggggttgatgagctcgtccgggtcgagctcgttgccgcaggcgtcgcactggtcgccacgcgcaccttcggcgtggcaaatcgggcactcgccctcgatgtagcggtcgggcagggtacggccggtggacgggctaatcgccacctgctgggtgcccttgtagatgtagccgttctccaagcactgcttgaacatctcctgcaccacgtgctcgtggttaccggtggtggtgcgggtgaacaggtcgtagctcaggccgaggtcgcacagatccttggcgatcacgcggttgtaacggttggccagttcctgggcagtgaggccttccttctccgcctcgacgagaatcggggtgccgtgctcgtcggtgccggacaccatgagcacgtcattgcccttcatgcgctcgtagcgcgcgtagacgtcggagggcacaccaaatcctgcaacgtgaccgatatgacgggggccgtttgcatacggccaagcaacattcaccaaaacatgactcataaggcttgattatccggcgcggcggggacacgcccggatagctgccgcgccgccatcctcatcccactcacctatccgcccgtaacttcccccacatacttatccgtacaccgcttgcgcgcttatccgcatacgcattcgcacacgtatccgtacgtgcatccgtacacacgtccacgcacccatccgtacgcacgtccacgcacatccgcacacacttccgcctgtcgatatccaccgagttatccacatcattcgcgcacctagtgaagttatgcacttatccaccgttttcgcttatccggtggcgcgcaagccgtacttctgcatattgttcggtcatggatatcacagcaggtccgatgacggacatcacaacagtcacctcgccggcaaccgcgcagcccgcggtgccgccgatactgtttaccaaggatctgccgggaccgctcagccttaaccgtctggccgccttcggcgcgttacgtaagctcgacgattccgccggctactggatcgagcattcgggcacactgtatggtcgcgcaaaaatcgtcgcggaggtcgccccgtttggcactgtggtgtgttcgatgaccgccgcttgggtatggctgggaggccccgactttccgagcaccatagacgtgatctccacatcgcacttccgctcggcatccgtcagccgccgcatccgcgtattcaaaagattgacgttgccggagcaaatcatcaagctcggcgggctgcctgtcaccacgccagcccgtacggcttgcgacctggtgatgagtcctgaagacatccccgatccttccaccgtcaacgcactggtgtgtcagctgatgtccgcgtaccagtttcggccaaacgactgtctacaaatcgtcaaggagcatcggcatcacaagtatgccggacgcgcacgcatgttttttgaatcggtgcagaaggagattgacgaaccggctttggagcaatgcgcatgacgaggggattcattgccagaggccatcgcagaggccgccatgccgctcaccgtttacggcatttgcggcaggcgcaacggttgcctcgccacgcggcggcggcacactcatccgaatccgcatcgcgcgcaatctcggatatgaccgcgccgcctgaaccacccatcagacttacgcccgcggtggcatgttcgcccgatacggatgttgccgtgctctggcacatcgcatatcacgtgcccgaactgcgtaaatggctggttgccaatcccaaagccgacgcgcctttgctggaattggtctcgcagcgtggtgggcccggggtccggcaggcgttggaaatattgttcgagtcgatggaagcgtaacggggagataatcgccggctgctgcgctatcccttgattttcagcacagccgcatacacctgcttgcgattggccaacgatccgtcagccagtggatgctcctgcaccacttgcgcgatggcgtccttgatacgcaggccgtcctccaaagcacggtcgatggccagcacggccatgtcatccacgctcaacgtactgggcgcggccgcttcggcctcctcgttggacgcgccgccgacgaccagcaccatctcgccacggggcggatcatcaatcacactttggcgaatctcgccaatcgggccgcgacgaatctgctcataatccttggtgagttcgcggcacagggccatcgggcgattcgggccgaacgcgtccagcagatcgtccatcgaatcggcaatgcgatgaggcgtctcgtagaacacgatggtgcggcgttcgggcaacagcgtgcgcagatactgcacgcgctcggaatgctttcgcggtaggaagccctcgtagcagaaacggtcggtgggcaggccggagagggcgagcgcgtcgagcacagcggaggggccgggcgcgcaggtgacgggcaggccgcgttcgatggcacggcgcacgatggccaagccggggtcgttgatggtgggcatgccggcgtcggacacgacgagcacgatggcgccggtttcgacctgatcgagcaggccatcggccttgtcgcgctcgttgtggtcgtgataggcgatgacgcgaccgttcacatagacgccgaggcgacgggcgagatcgtagaggcggcgcgtgtcttcggcggccacgatatcggcccgctccaagagggccaccagacgggcggaggcgtcgccgacgttgccgatcggggttgcggcgagcaccacggtgccggcggggatggtcacggccgattcgcgggattgggtggcggcggattcgccggcatgaacttcatcattgcgttcaggcacttgcgtcacgctaccgtcagcgtcatactgctcattcaactcatctgcgcttgtcatactcccagtattgcccataccacagagcaatccacgacaatccatggcggaatcgaggcattctccctttgcaggggctgatttcacatgttccggaagtctacttccgtttcaaggggctcctcatccggtgaagcaccagtacaaacggctttgacgcaacgctattccgccattttggcggcgtatctacttgaccatcagcccctcgaaacgcaagtagacctccggcaaaccccaaatcagccccttgaaacgcgagatggcagaatttcaacgaagacaaataaaaagaccctctgcggtggaatgaatgcagagggtctcgtggagctgacggtagtcgaaaccgcgacctcttcgatgcgaacgaagcgctctaccaactgagctacagccccttggatgttactttgctccgcaaagcaactcgcaacaatatagtacggagtgcggtcaaacgcaatttgacgccgaagtgtcgcacacatgtcggcacggtaacgtttcggtgcaggcacccggatcaagcgccgacgcgccgcacgcactacgatggtggcatgactggcccgacacaacgaccgcacgaccgaccgccgcacgaccgaccgcacgtgcggctgaccgaccgtctgccgcacgtcgctgctttccccgaagcgctgggcaccgggttgctgctgcacaccgacgccccgctggcggacgggcttcacgaccggctcggcgcgttcatcgacacgtatgagcggacgctgtcccgattcagggacgattcgaccgtgagccggatgcgcacggccgcgcgcggcggcgtcttcgactttcccgactgggcatcgggcctgttcgacctgtacgacgccctgtactcgggcaccgacggggccatcgacccatgcgtgggcgaggatctgatccgactcggctacgacgccgtctattcgttcaccgtcgagcccgacgcccgcggcgggcgtctgggcgccatccacggccggcccacctgggacggcgacgtggagcgacatggcgccacactggtcacccggcgtcccgtcgcactggatttcggcgcgtgcggcaaaggatatctgctggacctgctcgcggggatgctgcgcggcgaccggaggcgaacgcgccagtcggcgcacgatgaccgccaatacgtcatcgacgccggcggcgacatgctcatacgcacggtcaagccgatcaccatcgcccttgaggacccgtccgacccctccaacgccgtgggattggccgaactcaaccggggcgcattctgcgcgagctcccccagccgccgccactggtccgacgccgccggccaccagctccaccatctgctcaacgccatcgacggtctgccggttgacgatgtagccgccacatgggtggccgtcatgccgcacgcagcatctttgagcaccgcactggccgacggactcgccactgctctgttcaccacctcggccacccagctacgcgctcatttccccttcgaatgcgccatcctcaacgccaatcgtgccgccgcccaatcccccaattttccgggcggttttttcacacactaatgtacgaaatcatcagtatcacatccagtggagcattccctcgggcggaccgatgggttgctcccttcagtcagctacgttgacggctcccctcggagaggggagccgagtatagctaatctgctaatccgctaacgcaggaaacaatccgtcagtcagcgagtgcgaactggctgttgtagaggtcggcgtaaaaaccgcccgccgccagcagctcgtcgtgcgtgccgcgctcgatcacgtcgccgtggttcatgacgagaatcatgtcggcgtcgcgaatcgtggagaggcggtgcgcgatcacaaagctcgtacgccccacggtcagcgcgtccatggccttctggatcagctcttcggtgcgggtatcgaccgaggaggtggcctcgtcgagaatcagaatcggcgcgtcctgcaccatcgcacgggcgatggtcagcagctgcttctggccctgggagagcgacgacttgtcgtcgagcacggtgtcatagccgtccggcagcgagcggatgaagtggtcgaggcccacggccttgcacgcatcctcgatctgcttgtcggtcacgccgggcttggagtaggcgatgttctcgcgcacagtgccgcggaacacccacgtatcctgcagcaccatggagaactggtcgtgcacgttccagcgcggcacggacttggtgtccacgccgtcaatcgcaatcgagccgccggaaatctcatagaagcgcatgagcaggttgaccatggtggtcttgccggcaccggtcgggccgacgatggcgaccttctgcccggccttgacggaggcggagaagtcgtggatgatcggcttgcccggttcgtagccgaactgtacgtggctgaattccacgtcgcccttcacttcgtggccgttggtcccaagcaaagcggacttgccggattcgtcctccatctccggctcctcaaggaagccgaacacgcgttcggcggccgccgcgcaacgctgcaggttctggaaggcctgggcgaactgcgccaacggctgggtgaacaggcggacatacatcatgaacgccacgatcacgccgaactcgatctgcccgtcgagcgcgagcgccgcgcccaccacgcacaccaccacgtagccgaagttgcccacgaaattcatgagcggcatcatcaggccggagaggaactgcgacttccagccggactcgtagaggtccgagttgtacttctcgaagcgacgaatcgaatcggcctcgccgttgtatgccttgacgatgaggtgaccggcgtacatctcctccacgtggccgttgacatcacccagcgccatctgctgccgggcgaagtacttctgggaggacttcatgatggccatcatgatgatcaggccgatgaggctggcaccgatggcgcacagggtcatgatcacgttgttgtagaacatcatcaccagcgcgcccacgaacagcgtcaccgaggtaatcagcgagccgagcgactggcccagcgtctggccgatggcgtccacatcgttggtgatgcgcgacagcacgtcgccgtagctaaccttgtcgaagtatttgagcggcagtttgttgattttgaccgagatggactcgcgcagtcgctgggcggtgcgctgggtgacgttggccatcatccagctttgcacgtagccgagcacggcgtagcccacgtacagggccaccaaagtccaggcgatgtggcccaccgtgccgaaatctaccgagttcatcaccggtctgccgttgacgatggcgggcagacctttgacgatctcgttggtcatgtccttgagcttgtccgggccgacgatctggcagacggtgccggccgcgcccaggatgagcgcgatgatgatgacgggaagatagttgcggcagtagttcacgagtttgcccatgactttgccgaaatcatggggcttttcgacggcacgcctgccgcccattggtcctcttggcatttgttttactccttaaaagtccgtattgacctccctctgatgagggaggtggcgcgaagcgccggagggagagaagccgtacgcgactacccctcagtcagctgtgctgttttattcgctcgcttatcagctcgtcttcgcctgggaacagcccactgggctgttccctttacggctcagcccctgacatggggagctaccgctgccgcccccccctacgccgtaagctccgactggctgagctgggattcggcgatctggcggtatacgtcgcagttgtcgagcagttccttgtgcgtgccctgacccacgaccttgccgtcgtcgagcacgacgatgcggtcggcgttcatgatggtgccgatgcgctgggccacgatgagcttggtggaatccttggcctcgcgggcgagcgcgtcgcgcacttcgcggtcggtcttgaagtcgagcgcggagaacgagtcgtcgaaaatcaggatttccgggtgacggtacaccgcgcgcgcaatcgacaggcgctgcttctggccgccggacacgttcgatccgccttgggcgatcgcggcggaatacccgccgtccatgcgcgccacgaactcgctggcctgcgccacgtcggcggcggccttgacgcgattcagctgctcggccggtatatcggcaccttccgcggcctcgccagcggcgatcaacgcggcctcgcgcttgcgcccggccggggtggaggtatcggccatctcgacctccgccgggtcgcccggctgatcgccgtagctcacgttggaggccacggtgcccttgaacagcacggactgctgcggcacgtagccgatcttgtcgcgcagggccttcaggtcgtagtcgcgcacgtccacgccgtcgaccaacacctggccttggctggtgtcatagaagcgcggcacgagattgataagggacgacttgccggagccggtggagccgatgaacgccaccgtctggccctgctcggcggtgaagttgatgccttccagcatcgcctcgcgcgaatccgggtaggtgaagctgacgttgcggaattccacggtgcccctctggccggttttggccacgttggcggcggttttggtgccgttctcgacgattggctcagtgtcgagcacctccatgatgcgctgcgcggacacgtcggcgcgcggccagagcacgaacaccatgctcatgagcaggaagctcatgatgacctgcacggagtagttggagaacacgaccatgttggagaacacggtgagcttgtccttgagcccggcggcgtcgatgaggtaagcgccgatccagtagacggcgagcatcaggccgttcaggacggtgttcatcaacggcatcatgaacgccatgacgcggttggtgaacagctgggtctcggtgaggtccttgttggccttggtgaatttggcttcctggtagtcctcggcattgtaggcgcgcaccacgcgcaggccggtgaggttctcgcgggccacgaggttgatgttgtcggtcagggtctgcatgaccttgaacttcggcatgaccatggccatcatgacggtgatggacaccagcaggaccgccacggcgatgccggtggcgagcgtccattcgaagccttcgccggcgatcttgcacacggcccatacggccatgatcggcgacttgacgatgagctgcaggcccatggtgatgaacatctgcacctgcgtgacgtcgttggtggaacgggtgatgaggctggcggtggagaacttgctcatctcggccgggccgaaggactcgaccttgcggaattcgagcgagcgcagacgctgggtgaacgaggcggccacgcgcgcagcgatgtagccggtgatgatggcacacgccacggatccgagcgagatgagcagcatcttgccgcccgcgatccagatgtccttcatgtcgctgcccggcgtctcgaccagcgtggtgatgtctgacatatagtcgggcagtttcaggtcgaagtagacctgcccgacgatggtcaccagggcgatgagcatctgaccgatctccgctttggagaggtatttcatgatgcgaaacattggtttccccttgtgttggttgggttggttattggttattggcgattggttcttaagttggctgggttatcggtgattatcggttcacgatgtcttaatagtttccattgtttgattacttacactgtgagatattatacgcacttctgtatgttcgctgtgagcgtcctcaatcacctttacctccctctgacgagggaggcgtcaccgcgcagcagtgacggagggagagacccgccagcgggaggaagctagtctcgctcagcctccgcgcgcttagctgccatgtgttcagccacgcgcttgtcccgctccacgaatgcctcacgcacttgttcagccgtcggccgaggccgccccggatggcaaatcgacatatatgtggtgaactcagacaccaggtcaacgaattcgcgcgtgcgccgctcccccatttgcgagaaaatccagcaaattgcggaacgcatttcctctatcatccgatgagactgctcgcgcccggaatcagtgagattcacgcgaataatgcgccgatccttggaatcaatgtcacgcgtgacccagccttttttctccagagacgacagcacagtggagatgcggccggaactggcctgcagcgccgatgccaattgcgacggcgtttgcgtccccttcatggacagctcccggagcacgaactgctcaccatgggctccacgagtgaattccctctgcatcgtcgaacgattgccccacacgctggcatacagttcactaactgcttcctgctcaaatcccataagagcaccatccattcccattcgccacacggcagagcgccgcaaacacccccaagaatatctcacaccgtaaacaattcattactagaaactatttttggaacgcataatgcacacactccacgctctttgatattctgaaagccgcatagatattcacttcggggcgtcgtctaagaatatttgctgggccaacggtagcgacgttggcattgtgctccatgaggtatctggtcgaaaaggcggacgaagacagaccagttgggcggagcgcgcccatacctcaaaaccattgcaattattggctttgaccattttcgtggagtcacgaaaatggtcatgaaaaacataaggacacacccatgaaccgcgacgaaatcacacgcaaaaccagcgaactcagcactatcgcacacaccaccgaggactccaaagttgagtattggtatgcacgcgagctaatgacctatatggggtacgacagatgggaaaacttcagcaaagctattacacgagccaagcaagcttgcgacaattccggcgtatccgttgaatcccatttccgtgacactacgcgagacgtgactctcggcagcggtgccacccgctccatcgcggacgtcaagctcacccgatacgcctgctatctcattgctcaaaacggtgatccaaagaaagaagaagtggcacttctccagagctattttgccgttcagactcgcaaaacggaaatcattgagcaacgcatgggagaaatcagccggctcaccggccgagaggcccttgccactgcagagaagaaactctatccgtatacccaaatcacacacaacaaaaccgcacaagagcacatgtacacgcccaaccacgccgcagaacgccggcaaggatgtgatacaggccacagaaagcgttgtaccgcctaggcaatgcaacaattgtccgctatgctctgaaggcagatggcggcacggatgccatcccaaagagggggtatgaccatgattcggggtatgaacctatgcagcatcgccggctgcacgcacgaagcagaagaagcgggcatgtgcaacatgcatttcacatcggcgctggttcacggagcgctgcactacactgcggacggacgtccgtcgcactgctgagcgcaacaacaaagcaaaacaaccagtaacgctcaacggcttccacatgttcatgctctaattgcatgtacttgcagacacaatggccggtctgagccagctgccctcgcatggagcagctggctcagaccggccattattgttgctttgtactgtttgcactgtattgcgcctgcattgcgcaagctcgggcgcactcgggtgcactcgctgagtggcgtgaatcgcagattgctcaatagcaacgcaatccacgccactcagcagttgccatggttatgcgcggcgtttgcggatgacgagcaaggcaccagccgcagctgtcagcaccacaaccacgaccgcaatggcagccacggcaacacccgtattcgaaaggggctcagcgccattagcagccggcttattcgtggcagtgttaccgggcttagcagtgttgccaggattgttggtatcgccgggcttctgctctccagggccgggagtgacctccgtggccgtgaccgtgacttcgaacgtcgcgttcacgccacgataagagacggtgatggtcttcgtgcctgcggtggcagaatcaaagccagtgaacttcagatcaccatcagttggatcaatcagcttgcgcagcgtttcggtatcgccgactttgtaaatggcggataccttcacatcggcagcgttgaacttatcgcctacctgataggaatccttggtcacttccacagcaagctcggccaactgaggcagttcgccgaatgtcactgtgtaggtttccgccgtgccatcctcagcagttacagtcaccgtggccacgccgctgttctcggtcgaagcctgctccacctgcaccgtagccttcgcgtcagcagcagtc

SEQ ID NO: 459 - DNA, 26645 bp, Unknown
  R48_24m  MAG No. k141_25130
gcaggtcggggccggaggtgtcgaaacggagggaacctggagggaaccgacaatcggaaggaaccaaagcaaaaccccggaaaccgaatgttttcaacggtttccggggttccaatccgggcggaggatacgagattcgaactcgtgaggctgttacaccaacacgctttccaagcgtgcgccatagaccactaggcgaatcctccatgctttgcagcgcgcagttgaactgtgttccgcaggcaactcgaataagttaccacaggtttcggataagtgcacgcttcggcgtggcgcgtgtcgcgacgcggatgtgaagaatgatcactgcgagtgaaagactcactggaaagtcccgcgcaacacccgcacaaggaccgcatacttgtgcagggcccacacacccgcgcgcacctacacaaccccccggtaaagaaatcaccgtatccgggtgaattttcgatgttcgcccggcgcgcgcccgcaatcgcgcctaggctgtggagtcatgaacgaggggacggcggccgacgtaaccgcagcacatggcggccggtcgcgccaatcgaagaaacactcaaagacgtaccgcagcatatccgcgatccttagttggctcacggcccgccgcccgaccacgttatccacatcgctgcgcgcgcgattcctctcttacctgctcacgatcgctatcgcctggctgccgtggctcatactcactcggccgggttcgatgcgcgacgatacgcttgcccaatatctgcaatcgtccggtctgcaccactactacacccagcatccgctgtttgatacgctcacgttcggcctgttctggcatatcggcagcgcactcggctcccccctgatcgggcaggccctgtacaccgtgacccaagcggttctactcgccgccgggtgcgcgcttctgctgtgctacatccgcaaaatcggctcgccgcgctggctcatcggtctcggccttgtctatcttgccaccaactatgtggtggtcggcgcaatcaccacgatgggcaaggactcgttgcatgccgtgttctatctgccgttggccgtgctgttcgtggaggcttgtctgacgcgcggctcggtactggctcgccgcccggtggcattcgcgttcgtcatcctgttgttcgccaccatcgtctccaagcggacggcgctcataatcgtgctatgcgccggctgctgtttgctcgccgtctgcacgcccaaaggcgcgcggcgtcgtgcgttcgcgtgtcttgcggttgccatcgttgtgacgcagggcgtgtggacgccattaagcgcggccgccacgcatgcgaatcgatcgcccggacgtgaggtgtggggcctggtcacccagcccgtggcccggctcgcgcacgatgatcccagtgcgatagacaagattcagcggcggcgactgaacgcgatcatggatctcgactgggccgccgccggcatcaacccgcaccgcaccgatgagaccttccgcactctgcgcgagcaccctaggccaaccgcggcgcaacaactcgcggccctgcaggtctgggcgcagctcggcctcgcgcatccggttgaatatgccacggcctatgccggggtgactcgcggatggtgggacccgcgcgtcaatttcgcgtaccccactgattccgactacctgttcacgcctagctatctcaggcaatgggcgtctttcctgactgaaggtgcttggaagcatacttccgacggagatgccgataccgtggcggccggacggcttgccgccatcgaacatgaccttgcgccgctgaggggtacctccgacaagccgcaatggcagaaaaacatattgcgggcgattcatcggtgggtgcattcggatggtcatgtcggtgttcgcaaaggcaatccgctgacttcgatggccctgtacgtcacgtggattccgctggctgctggtcttgcgctggcggtgcggcctgcgcgacgacgctacggccccgcactggccgcttacggcttgctggcattcacggtgctgtcgctgtatgcctcacccgtggcactattttggtatccgattccggtattcctcacgttgccgctttttgtggtgttgccgttcacattccgggaaagccatcctctctgagcatagttatctcagatagtgaaataattgcggggttgaaaagcactaaaacgccttctattacctcgcacccgtcaaaaaatcaagactgttgttcaagaatttttttctataaagttcatagttgtttttggaccattcgagtacttgaagtgagaggaattcagcatggttcgtcgcgcctgcgcgcagtccgctgaaatgaacacgatgcgggaacgtgatacgcgcgttgccgtttctcgcgtgcgcgcgaagtcgggcagcgcctgtcgtctgcagtcggccacggtctcggctcgtgcatttgcggtcatcgtttttctgtttgcgatgatcgccgcgaccttcctcccctccgccatcattccgcagtccgcgttcgccgtgacgccggcaaccactgccactgctgccaccgtcaagagcgacgacatcaccagcgtcgattacgcgacctgggccgacgttgccaaggccgtcgaagcgcagttgcaggaaggccttaaggaatacaaggacggcaacccaatgggtgccaagtccgatttcggggctgcatacaccaccgtctacgtgacgtccaacttcaacaaagtggtgagcgacaccatcggcgcagacaagcagaccgcgcagcagcaggccttccaggacctgcaaagccaggtgttcacgtcagaccaggccgatcagcttacccagaaggtcaacgacctgaccgccgacctcgacgccacggcccagcagctcgacgccaacaccagcctcgccaacccgaagcagtactccgaagacctccagaagcagatcgccaaggagcgcaaggagctcgacgccaagaagaagcgcaccgaggaaacggccaagacctggaaggaagtcgcggatgcgatgcttccgatcctggacaacgcctacaaggcctatgagggtggcgacgccgccaagggcgccacgctcgtgaacgacgcctactaccagcactacgagaagctcggcttcgagaagaccgtgctgagcgccatcagcggcaaccgcgtctcccaggtggaataccagttcaagctgtgccgctcctcgatgaacaccggcaagcctgcttccgaagtcaagaagtacatcgacgacctgaagaacatgctggccaccgatgccgccaagctcgacggcggcgcggccgatgaggagggtggcttcctcaagttcatcaccagctcggtcggccaggcgttcctgattctgatccgcgagggtctcgaggccctgctcgtggtcgccgctgtggtggcctacctcgtcaagtccggcaacaagcgcttcaccaagtggatctacgtgggcgtgctcgccggtctggccggcgcaggcatcgtggcggtcatcttcatgctcgcgttcggcggctccggcccgctgcaggagatcatggaaggcgtgtgcgcgctcgtcgccatgtgcatgctgctgtggaccagcaactggatgctcaacaagtcctcggtggaagcgtggaaccgctacatcagggaaaagaccgaagccgcggtggcctctgtctcctcgcaggtcgaatccggcgagaaggtggcttcccgcacggtgatttcgctcgccatgctgagcttcctcgccgtgttccgtgagggcgccgaaaccgtgatcttctaccagtccatctacacgatgagccaggatacgcatggcatggtggtcggcgcactcgccgccgccgtggtgctcgtgatcatcttcctggtgattcgcttcacctccgtaaagattccgattggcccgttcttcctggtcacctcgatcctcatgtccgtgctggtggttgtcttcgccggcggcggcgtgcacgcgctcatcgagggcgacctgctgcccgccaactacctgccgggcgttcccaccaacgactggctcggattctacccgtacgccgaatgcatcatcgcccaggtactggcagccatcgccgtcatcgcgctgttcgtggtcggctttgccaaacagcgtaaggccaaggcccggcttgcggccggtgcgagcaagtcggacgcgaaggctgacgaggagagcgcgcaggcgtagcacaacgcccggtgcgaccatctcgcgcaacacaacttgcgacatggcaacggaagcgattccagcccacgccgccacaactaaaaacagataagtcgtgaataatccattcaccacaacagaaggaataagagaaatgatgaagaacaagaagcttgccgctctgctcggcgtgctgctcgccggctccatggctgtttcgatggctgcttgcggttccaccaacaacgcttccgataccaagtcctcgaccagctcctccgacaccgccaagaaggacgactccaagaaggccgacgccccgactgagacctccggcttcgaagaggtcccggtcggcccctccggcaccgccaaggagcaagacaaggccgctggcccgctgaccgtgggtgccgtctacttccagcccatcgacatgtaccctgcttccatgggtctgaaggctgctgacgcttccttccacctggaagccgacatccacgcctcccaggaaggcaccgactacggctacggcaagggcgacttcgtccctgaccttactgtgaactacaccatcatcgacaagtccaccggcaaggaagtcgagggcggccaggccacctccggtaccttcatgcagatgaacgcctccgacggcccgcactacggcgccaacgtcaagctcgacaaggccggcacctaccaactcaagctctccatcgagtcccctgagaagaacggctggatgctccacgttgacccggagaccggtgtcaagaaccacaagttctggaccgagcccatcgaggtcaccttcgacaactgggactacaccccgcgtcagtggtgattgaataagcagacagccccctcgtcagagggggctttacgccgctttagggagataattcttaggacggtctaaaaactcccctcagtccgctttgcggacagctcccctcagggaggggagcctaagatgaacagagaaaggacgcgaatgcttgaacaattcgtggcagtgatgccgggcaccttggcccccgcattgctggtgatgagcctgagcgtgatgctcacggtcggcgaggggcgagataagccgataagctcgcattggcgtctcatcggcctgaccgtcggcctgatcgccgctatcacattcgccggcctgcgcgcctcggccgtgatcaaccagcgcacgttcgtcaactatccggtgctgtggtgcgcgatcattgccgacatcctgaccatcgtcgtggtggtgttcgcacgccgcatcaccaccaattggcagcagcacaaggtgttcatgcacattgcgaacgccgtggccgccatcgacatcgcgctcaccctgttctacgcgctgccggacgtgatcctgcagctgaccatctgggtggagcccggcgacccgatcttcacgtccgacatgctgctgcgcgcgctcggcttcgcgctgggcctggccatgtcgatcatcgtggccgtgatcttccgcacgatgcgttcgaccgcggtgcgtgcctcgttcaccgccgccgttctcgcggtgctggtgattctgttcgtccggcacctgaccggtgtcatgcagatcctgcaggcacgcggtttcccgataggccacacgggattcgtggccctcgcctggtcgatcaaccacaacgactggatgatcatggcccaggcgttcgtgttcctgattccggccgtcgcctccgtggtggccggcttccgtataccgctgaccggcgcgaacgaagccatcggccgcaagcacaaggcgttccgccgccgcgccgtggcctccgccatctggagcctcgtggccatgatcggcgtcacgctgaccctcaccgtcggcgtcgccgcgacccatcagaccatcactctttcgccgccggaagcctactcgctcaaggacggcgtggccaccattcccttcagccaggtcgaggacggccacctgcaccgtttcgaatacaaggccaaggacggcaccgtcatgcgcttcatcatcatccgaaagaacggtggcgcgtacggcatcggcctggacgcctgcgagaactgcggcgacgccggctactacgagaaggacggcaagatcatctgcaagaagtgcgaggtggccatcaacctggcgaccatcggcttcaagggtggctgcaacccgataccattcccgtacaagaccggccacggcaagatcaccattcagactacggatctggacgcgctgagcgcccacttccagtgagtcaggcaggaggcaagaatcatgttctttctgcgtatgattactcgctcgttcacccgacagctgcgccggcgcctgcttatcgcgctgaccgtatgcctgtcggcgaccgtgtccgtatcgatgctgggcgtcgtgttcgacgtgggcgacaagctcaacgccgagctgtccacctacggttcgaacatcaccgtgcagcccaaggcggacgcggtcgtttccgacctgtacaacaccgagtcgggcggcgcggcgtccaccagcgacccgaccgcctttctgaaggagtcggacgcggccaagatcaagacgatcttctggtcgttcaacatcacccacttcgcgccgcagctcaacatccacgccacggtgaacggtgccaacgtgccggtcgtcggcacgtggttcaacaaggacctcaagatctccaccggcgagaccaccgtcgtgggcgtggaaggcatgcgctcgtggtggcagctggacggcaagtggcccaaggacgattccgaccagggcgtgatcggcaagacgctggcctccgaactcggtgtgaccaccggcgacaccatcaccctcaacaagaccaccgcctcgggcaagaagaacgagcagaaaatcaagctcaccggcgtctacgattccggcgacgaggacaacggctcgctctacatcgcctcctccacggcccaggtgctcgccgacctgcccgattcggtcgacaagatcgaggtcaaggccctgaccacgccggagaacgacctggcccgtaaggccgccgcgaacccggccgcgctgagccaggaggaatgggagacctggtactgcaccgcctacccgagctcgatcgcctaccagatcgaagaggtgattccgggcgcggtggccaagcaggtgcgtcaggtcgccgcgttgcagggcaatgtgctgcagaagacgcaggccgtgatgattctgatgaccgtgctgagcctgatcgccgcagccgtggccgtggccaacctgatggtcgcctcgatcggcgaacggtctggcgagctggcactgctcaaggcgctcggtgccaccgatgccgcggtatcccgcctgatgctggccgaaacggcggcaatctcgctgctgggcgcgattgtgggcgcgttgcttggttccggcgtggcccagctgataggccgggtggtattcggttccggcatcacgatgcggccgatggtgttcgtgctggtgttcgtgctgctggctgtcaccgtgctgctggcgtccgcctcctcgattcgttcgattctgaatctcaagcccgcggaggtgctccatggccgctgagtttatctacgtaggtgtggaaggaggaaaccgatgaccaacaccggtatgttcttcagaatgctgttcagcgccgtgttccgccggcgttcgcgcgcggtgatggccgtggtggcgtcgctggtcggcgcggccacactgttctgcctggcgatgatctgcctcgccgtgccgcagcagatgaacgaggagatgcgtgcgtacggcgcgaacctgattgtcacacctaccgaatcgaccaatgccgacggcaaggccggcatcgacaaggcgatggtgcagcacaccactgaaatggtcaaggccaagggttccgcgaaatacgccacttaccgctacgagaacgtgcgcgtcaacgcctcgccgtacgtgatggccggcgtgaatgcggcgcaggtcaagaacctcaaccatcactgggtggtcgacggctcgtggccgaccgacggcaaggtgctggtcggacgtgacatcgccgacgccatcggtctgagaatcggctccgccatcaccatcggctaccgtgcatccgataacgccagcaccaacggcacttcgtcgaactcctcgatcgaccagcaaaccaaagacggccgcgtttccagcgacatcatggacacctccggcaccgaattccgcgtggccggcatcgtggacaccggcggcagcgaagactcgatcatctacgccaccaacgccgacgtcaacaagctcaccggcatcacgcgcggcgtggacgtcatcgagtattcggccggctccagcgacctcgcaggcctggtgtccagcatcaacgacatgacctccatgcacgtcaaggcgcagcaggtcaccaagatcaccgcctccgacacccgcatcatcaccatgctgcagacgctgttctggatcgtctcgttggtggtgctggtgctgacgctcgtcggcgtcggcaccacaatcagctcgatcgtctcgcagcgacgcaacgagatcggcctgcgcaaggccctcggtgccagctcgcgcgccatcggcaccgagttctacatcgaatcatcgctctacggcctgatcggcggtcttatcggcaccgcaatcggctacggactcgccagttggctgtgcgtggcggtgttcgaacgctccatcggattcaactggtgggtggcgctgatctccgtgctgttcagcgcgctggtcgccatcgtcgcctccatcccgcccgtccaccgcgccacccgcatcgaccccgccgtcgtgcttcgcgaagaataaagaaagagaaacgtcatgctacttgaactcgaccacatctcgaagatctacggcgacctgcatgccgtggacgacctcaatttgaccgtgccggaaggcgaatggctcgccatcgtcggctcctccggctcaggcaagaccacgctgatgaacatgatcggctgcatggacacgccctccaagggctccgtgaagctggaaggccgcaagctggaggacctgaacgccacgcagctggccgacgtgcgcaagaacctcatcggactggtgttccagaagttctatctggtgccgcacctgaccgccgtggaaaacgtgatggtggcccagtactaccattcggtggtcgatgagaagcaggccatggaggcgctggaaaaggtcggcctgaaggaccgcgcccaccacctgcccggccagctctccggcggcgagcagcagcgcgtgtgcgtggcccgcgcgctgatcaacgacccgaagctgattctggccgatgagcccaccggcaacctcgacgagaagaacgagaaaatcgtgctcgacctgttccgcaagctgcacgagcagggcaccacgattatcgtggtcacccacgatgcgcttgtcgccagctgcgcgcagcgcgagatcatgctcaaccatggcgtgctcgtcggtgagaagtggaatgacgaggatgcgcgcaaggcctacgaggcggccggcggcaagcccgcctccacgggtgcacaggtcgagggcgcgcagaacggcgagaccgccattggtttcgctgaccccaccaaggccgcgaaaaccggcggcgaggagtagggccgtcaggggcatcgagcagtatgtgaggaatacatggcaagctgatggtctctcccccagtcagcttcgctgacagccccctcgtcagagggggcttaaggagcgtgaatatgaccgaaaagaatacgttgaagaaatccgcgacattggcggcggccggactggtcgtggctggcgcgctgctggccgggtgcggcgaatccaaggccacgccgatggacgatgcgtacgccggcaactcgggcgagaccgagaagtcgcaggaagagcagtcgcaatcccagtcgaacggctccgatagctccgacggctccgattccggctcatcgcacaacgacccgtccaccaccacgtccgacaagaaggacaccggcaactacaaggacggcaactactcgatcaacggccagtacggcccggtcggcgaggattccatcgacgtccatctgaccatcaaggacggcaacgtcgagaccgtcaaaatcattgggcacccgttcaccacgatttccaagaaccatcaggacgacttcgccaaagccatcaacggcgtagtggacggcaagcccctgaagggactcaaagtggacaaggtcgccggtgccagctggacctccgacgccttcaacaaagccctcgaagtcgcccgccaggaggcttcgattcaggagtaagaccgctacttcagcaatgctggccacagcagatcggccatgcgcgaggcccaggcggtgtcgtcgtccatcgctttgccctcgatggcctcatacgccaccaaagatccgataatcgtggacaacagcaacttctcgtcaacgtcctcgcgaaacacgccctgcgcgactccctgcttgaggaacgcccccacatgctccagccacggggtcaccacctggtcgacgatgtgctggaagaactcggcctcgctggacaatacaatgcccacgcgcttgacgtcgatgtcgttgtcgcgcacccaatcgaccaatcgctgcaatagttgcgtgaaatgctcacgcgtggggctgggcactgggtcggaatccgggatggccagatacatcgcgctgatctcgcgcagcagctcgtcggcattatggtatcgacggtaaatcgtggttttggccacgccggagcgccgggccacctcctcgatggtcacgccgctgatgccgcggtccaccgcaatctgcagcgtggctcgcatgagcttgcgatccgtcgcctcgcgcgtgcgctcaccgcgcggtgtcgccgtcgtacctgtcatctccgtcatctcttctctccgaaatatgctcccgtacgctcccgttggcgggagctggctggcaaagccagactgagggtggtaagtccatgccgtttgtaggcaacccccggataatacctactagcccagcactttagtgctctcgactttggccacataccactggttgaaccgcaccagtggcttcctgagcaacagtccaagcaacagtagcggcggcacgaacgccagcagcattccggcggcccgccagtaatccatgtcgtagatgccggcgatggccgcacgcatcatcgtcaccgcatgggtgagcggcaagaacggactgactttggcgatgaagtcgggcaacatctgcaccgggtaggcagcgttcgcacccgaaatctgcacgatgagcataagcacgccgattgccttacccacattgccgaaactcaccaccatcgtataggtgaagaacgagaacaccagcgaggccagccatccggacaacataaacagcagcggatgcacggcctgcacgcgcaggaacagcagatcgccgccgagcgacaccgtggattgcagcagcgcaatcagcgcgaacaccccgtaatgcccaaggaagagccgatgcggccgcggatcgcccaaggctttgcgcgtccggcgagacacggtggttttcagcgtcaccaccatcagcagcgcgcccacccacagcggcagcagcgtgtagaacggcgccatcgacgaaccgaaattcgccaccgggaatacggccttgcgcctgagctgcaccggcgcggccaacgtactggccagcgtttcgggatcattgcccagcacctctttgaccatgctcatatcgccactgtttagtgcgttgctcagtgtgctgttgaacgaggccagttcggcaccggcggaacgcagtttgccggacaccttgtccaacgtggtgcgagcgtcgccgagcatatcgctggcgtcgtcggaagtccttttcaggtcgccgagcgtggagcccaactgggtggcgccggaactcagtatgccggaggcgtcagagacggtggacgacagggagtcgatttgcggtttcaccgtggccgtgaaatccgacttgatattggcgatactgttctgcgcttgatcggccagatccttgacctgcgcatgctgatcctgcgcgttctgattaccttggcgaatattggtcgccgccgtattcagcgcttgccgcagcctgttctgccgtgcgattgaacggtcaatcgccgtgatgatggatgagtcgttgcccagtatgccggccaacgtgttgcgaatttcagtgtatttctccgtctgcttgccaatggccgtggcttgacggtccaattcgtcggcggccgtggtggcaccatcattcgcgtcggaatacagcttgtctatggaatcggacaccgcgccgaaactggaggcgctcgcgtccagtgagctgctcatcgcgtcagcggtggtgcccagggctccgaccacgtcggtgactccctgcttggcgctggcgagatccttgcctccttgtttggcggcagaggaaacctgcgtgatcagcgagttcgaggtgtcaagcaaggcgccggccgtatcggtcaatgcgctgtatgtgccaagcaaatccgccgtatcgtcaagccgtgtggcgaaatcggcgatattggcgttgaaggtattcagttgctctttggcttcgggcttggacagctgatcggccagcgaagacgcgatttccagccctgccgaagtgatggtcttggcgaacgtggtgttgatttccgccgccacctcgtccgtgccctcgttgagcagattcggtgccagcgcgttcttcttctcgttgcggtaataggtcagttcggcatgctgcacatcgtcggagaagaaggtcatcatgtctttgctgaacgacttcggaattacgatggccgcgtagtatttgccggatcgtgcgccctcgacggcatcggctttggacgtgatcgtccaatcgagctgactgttggcgcgcagcgcgttcaccacctgatcaccgaccgtgactttcaccgggatcaggtcggaacgatacccctcatccacattcgccaccgcgaatttcaggttcttcatattcgagaacgggtcccagcatgcggccacgttgaaccaggtgaacaggccgggaatcatcaccaagccgatcacgatgatgatggagaccacgttgctggtcaggcgtttgatgtcgccggtaaatagtttccacatggtgttcatcgtgcgtgcctgccttccttggtcggcggaatagtggggatgattgcggtaacggcggcgctcgggtccgcttcttcgtggcgttcggcggaggtgtcgcgacgcttggccttatgcccgtacagcatggcgcggatcgactcgtcggagaggttgccgagctcggtttggcggcggatggaatcgcgcatgaattccacgaccatcaggaagcccatgatgatgagcacccatgccagccatgtgcccatgaccacgattttctcgctggtggtcagcacaaacacgataatgagcgcggccggcaccatgaatccggcgataagcgcacccagcagcagccggggatactggtaggcgaatttggcggcccgacgttcgatggcatgacggtattcgtcgcggtcggccagtgccgcaatggcctgagtgacacggtattcgctgccaggcaggtgcaccggctcgccgataatcatgtcgctttccttgatttcccgcgcgaacaggcggttgagattggccagtttcggccgggcgccgaggccaagcgcaaaggccagaaccgcgaaaatcagcaatttgccgatataggcgaaccagaggccgtcgtagaagccgccgatggtttcacgcattgcgtcaatcgaataggtgaacggcagcagcggatagatggcacggaagaacgcgggcatcatttcaatcgggtacaggccggaggcgcccggcacctgcagaatgaccagcgccacgcacacgcctttgcccacgtgcatgaacgtggtggagagggcgaaaatcaccgacatatacaccagtgaggtgatgacgcaggtgagcagaaacaccggggcgctcgcgcattgaatgccgatgacaagatcgccgatggccgtgaccaggccttggacggcggccagcgtggccagcagcaggaaacggccgagatagccttgggttggcgtgagatcgtcgatgccctcgtcgtcggtttcgagtttgggaatgaccacgagcacgaacgcgcccacccacaaagacagggtggtgaacagcggtgccatgccggaaccataggaggcgaccgggtagacggcccgttcgctgataacagtgggggagagcatgaagtcggcgattgtggcggcatccagtttgccgtcggtgccgatcagggaactgagtgaactggagatgctcagggctttgatgtcggtggtcagcgtttcgagcttggtttgcatgccggccagcgccttatcggtgtcgtgcagggcggtcaccgtggtggaggcggctttgtcgagttgatcgagggtgctcttcgactgatcgatgagtgagccttgcgacgtgatgccggtcgacagagtgttggcggtcgagctgagggtgttgaggccggtgttgagctgaggaatggcgccggaggtgatggtgccgcgagcggtattggcctcgcgcaccgtggtttgggtggcggtattgagatgctgcgccaatccggcggtgtctgtggaggcgttgccgatagtggtgttcaggctatcgaggttgcccagtgcgccggcaagctcgctattgcggctttccagtgtggcaatggcggattgcagcggttctcgatcggcgttcggcagccctttgagttggtcgatgatgtcggcgttcgcttggttgatgtcttccgccgtattgatcagtccgcctacctgctgattggcggcgctgatggttccggctaccgtgcccacgctttggttggcctgtgctgcggcctggctcagcaggcttgagccttggtcaagcgcttcggacgtggaggtgacgaagccgttcagactggcttgggtagtgccgatcagggtggagacgccggccagaccttccgcggtgtcgatgccaagtgcgcgcgcgtcgtccagcgcctgacgtgcggtgcgtgtctgctccggggtatcggtgagtttggtggtgagcttggcgatggtgctgcgtgtgtgctgcacgtcgccggaggcctcggcaagggccgtgagggccttggctttggtggtgtcttcggtgctgatggctttgccgccaaccgtattgatgacttcggtaagtacttcggatacggtggagacgaatgtggaattgaccgtgcggtccacagtggacgcgcctacgtcggtgactttgggggcgatggcgctggctttttcgttgacgtaatactccagagtgggccgactcttgccgccggtcactacgccggcgagatcgtcggaaaagtctttggggatgatgatggctgcgtatgccttgccggattccacctggtccatggcctcggcttcggtgacgaaggtccagccgagctggtcgttgcttttcagctgcttgacgatttgatcgccgaggttttgcttgccgatgagcgcgttgtcggtgccgtcgtcattgttggcgatggcgacggtgatgcctttggtattgccgtacgggtcccagaagccgacgatgttgtaccacgaatacagtggcgggataaacaccatgccgaacaggatcacccatgcggccggcaccttgaacaggcgcaggaagtcgcgtttgaggaccttgaagatattgcccactgatacctccggagcttggtgttgcttgattgctacgttttccgtagcgatacgttaatcgtagcgctacggttgtagtagcgtaatacggctgccggagattattggggtgattgatgatggttttggcggaataacgccgctgcccagcggcttatcgtgtgtcgctgggcagtgtgcctaattttttgtggctggggtgctgtgtggccgggtgtgctgtgtgtgttggtgtgaggctgccctccatggggcggtaaaaccttcattgggtggtaagtggcccatggggcggtaaaattcccatggggcggtggcttaaaatggctttattccgcggaatgcggttttgggctaaccgccccatggggtaattaccgcctcatgagagagctaccgccccatgggtaaaccgttgtatcagctttcgatggtgccggattgaccatcaatggccgactgctcgttctggctggatgactggtcggagttggagttaccggaagtatcagaacctgtgccggagctgctgccggtgccggactggccatcagtgccttggctggagcgaaaggcgttctggaacttattgacaagatttctggatggtttttggatgtttcctgaaagcgagcgggctcggtgtccggcaatgtagacagacatgtaccggctgtccatcaagttcggcaaaactgcaatcgggtgatagtgtaaggggacgctatgtggggaggaaaccatggttgaattcaaggacgatggcacggccactacccctggcaagccgcgggagaaccgtgacgccgagtccgcagtcgtggctgatctggtggccgtcgaactggacgacgccggcttgaacccgaacgccaagcgattaccgattctggcgcgcatctatggcgcggtcgtgctgctggacggactcgccacattgccgattatggtgatttccatcctctatgccgtgcgcgagattctggatggtcatgtgcacgtcgatgcgatgagcctgactttcatcctgtccgcgattcatgcggttgtgctggtagtcagtgccgcatgcctgattgtgttcggcgtgatgctgctgcgcaatcatcgccggtatgccgcgcgctggacctacgtgctgatgccgttgacgttggccgacggcatgctgtcgctggccctgaccggccttggcttcaacctgctgctgccgctgattcagatgattattctcgtcgtgatttcggtgaccgccgatccctccctgagcgaggaacgccgtttgcagcgcgcgctcaaacgcatggacgatcgcgatgattatgaatcggcggtggcggccggcatgctgggccgcgaccaatccggcaagggctatattgcactggacttcttcaatatcttctggctgtttaccatcgcttcggtgggtggcctgattatggagacgatctaccatatggcgctgtataacggtgaacttcaggaccgcgcgggtttgctgtggggcccgttctcgccgatttacggctgtggtgcggtattggtaaccgtgtgcctgaatcgcctgtggaaggcgaatccgttcttgatcttctgcgcttcggcggtgatcggcggcgcgttcgaatactgcaccagctggttcatggaagtggcgttcggtattaccgcgtgggattacaccggccgttggctgtccatcgacggacgtacttcgggccaattcatgttcttctggggactgattggtgtggtgtgggtcaagtggctgttgccgcgactgctggctctgattaatcgcattccatggaaagtacggtattcgctgactgcggtatgcacggtgctgatggtgatcgacattgccttcacgctgatggccttggattgctggtatgggcgcatggccggccagccgcaggattcaccggtcgcgatgtggttcagcgaacgctacagcgacgcttacatggccaatcgcttccagaccatgcatatcgacccttccaaggccgggcgtatgtgaatggctggcaagtaattacgcttcgcgggcagaaggtgcgtagaacctaagacagccttcgcgtgtgggtggtaagtgggatacactttcaagcgttgaaggaatgattccctccgctgatgtgctgttttgtgacgcgcgtgatgacgatgggacaatcaaacgaaaggcaaggcgcatggccgaagctacagcaaacattggtgtgattggactggccacgatgggctccaatctggcgcgtaatctggcgcaccatggcaacacggtggcgttgttcaaccgtcactactcgcgtaccgagaagctcatgaacgagcatggcgccgaaggcaacttcgtgccggccgaaacgctcgaggaattcgccgcgtccctgaagcgtccgcgtaccgccatcatcatggtcaaggccggtgctccgaccgacgcaactatcgcgcagctggaagaggtgttcgaaccgggcgacatcatcgtcgacggtggcaactccttcttcaaggacaccatcaagcgtgagaaggaagtgcgtgccaagggcttccacttcgtgggttgcggcgtgtccggtggtgaggaaggcgcgctcaacggcccgtctctgatgcctggtggcactgcggaatcctggaagaccttgggcccgattcttcagtccatcgccgccaaggtgaacggcgaaccgtgcgtgacccacatcggcaccgatggtgccggtcactttgtcaagatggtgcacaacggcatcgagtatgccgatatgcaggtgattggtgaggcgtatgacattctgcgccgtggactcggcatggataccgaggagattggcgacgtgttcgctgaatggaacaagggcgaccttgactcctacctgatcgagatcaccgctgagattctgcaccacaaggatgccgagaccggcaagccgttcgtggacgtggtcgtggatcatgccggcatgaagggtactggtacttggaccgtgcaggctggtctggaatttggttctcctgtggctgctatcggtgaagccgtgttcactcgtgcactgtcttcgcacggtgagctgcgtgaagacgctcagaaagaaggtctggctggcccgaacaagaccatcgatctggccggagaagacaaggccgcgttcgtcgaggacgtgcgcaaggccctgttcgcttccaaggtcgtggcctatgctcagggcctgaacgagattcaggacggtgctaaggaatacggctgggatatcaacctgtccgaagtggcccgcatttggcgtggcggctgcattattcgcgcccagttcctgctcgaccgcatcaccgaggccttcaagggcgataatttgccggcttccctgttgttcgatccgtacttcgagaagatcatcggcgaatcgcaggatgcatggcgtcgtgtaatcgtgcgtgccgtggaggccggtatcccgaccccggtgttctccagctccctggcgtactacgatggtctgcgctccaagcgtctgcccaccgccctgacccagtcccagcgtgacttcttcggtgcccacacctacggccgcgtcgacaagcccggcgtgttccacaccctctgggcgcaggaaggccagcccgaggaacagcaggcttgagcgtctgcgacaatctgtgggccgggcccctcattcagggtccggcccacaggaggcgccatcacaactcggtgacggtttcttcggtggagaaccaggtgaactcgtccactccgttggcgtaggaggacgggtaatccgggttgttgggccgctcgaagacatgggccagcgattcggctttgccggcaccggcggcgaagaaccatgtacggcgcgagcgggcaatcagcggcgcggtcaacgagacgcgcaacggcggcatcttgggggagtggttcacacccacggtgagcctatcggtaaccttgacctcatcatgacccgggaacagcgacgcatagtgaccgtccggtcccatgccgagaatcatcagatcgatgaccggttccggccccaattcattcaccaactcgcgctcatagtcgctcgcggcatcgtccagcagcgcatcattcgcggcatcggcggcggcgcgaacggaagcgtcatcactatcggcctgatccatcacatcggcgatgtcatcggctgaacgggtatcggccgccatctcatgaatattcgattcaggcagcttgccatccgccaccagctggtcaagcagcaggcgacgggcctccagagcattgcgatcggtgtcgtaagccggcacaaaacgttcgtcgctccaccagaaatgcacgcgcgaccaatcaaccgcatcagccagtggatcgttcagcgccaaacccaacggctgtgcggccgaaccgccagacagcgccacatccacacgtgtgcgatgcgtgccatcaggcaatcgttcggcgagcaaatcgagtagcgccaagacaaaacgttgcgcgccagcctgaatcatcagatctttattcggatacacaatgagttttcgagttgccatgtatggtccttatatggggtatgtgtcgtactttgcaatgtggattgtgttgtcagttgacaacgcataatacgggtggcatgccgggaatccagccatttgcagcaatgaaatgtgttgtcagttgacaacacaatgtacattgtgcgacatcgcatatgtcactttattactccgcggtcatgagcttcggcatcgcatgaggtaggaaacgatgagcaacggcgttggcatggctcgaccacaattgccgaactcatgccaacgccgctgtggcaacggttctaccgacttcagtgacgaatcagatcccagccttcgttgatgacctcggcgtagatctcatcgggatcgatgcggcgcagttcctcggtcagacagtcctcgatggtgcgcatcggcacggacacttcctgcggagtctggccgggcagcgagatcagcgcttggtcctcatacgggcgttccagtgagatcacaccgtcctcacgggtcaggtacacgccggtcacggcctgcgcgtcgggcacgaactcagtttcgactggtacgccgagtttcagacgcagccatgcgcacagcatttccagaggcaggaagtcggccttgccggtcaccttcacggcggtgatgggcaggtgcggcggctgatcgagcatcgaggcgagcattgcgcgccagacggtcagtcgtgtccaggacaagtcgatgtcttccggtgtccaattgcggcgcaaacgctcgatcgtggcctccggattattggagtgcagcgcgtcggtgatgcgactgcgggccatcgcacccatcagatccttggccgggttcgacggcggtgtggtcggccaccacgccactacaggcgcatccggcacaagcagcgggataaccagcgtatccgggtggttgataaggccaccgcgcggacgcaagatgataatctcaccggcaccggcgtccgcgccgaatcgcacttgggcgttcaggttggaatcgttcggatcgttcgggccgtcggtcaaatcgacggccggattatcgcgattcgcgctcacctcggcggccacttcggtctcgttcggttcgccttcgccggactgatcggcaggattggtatccggtactacggcaatcacgcggcacgggtgctcacggctggccgagttcgcgatttccagcgcatgctctaggtccgcgtcctcggtggcgatgagtagcgtcagcacgcggccggtcgccgattcgccgcgctcctcgtgcagctgttcgattttgtgcgcaatctcgcgggtgcgggtgttcggcatatcgatgatcatggcatcctccagtggcggccgtcgcgcgccagcatttcgtcggcctgtgccggaccccacgtaccggcgcggtaggcctgcggctggccaagcgtggaccagaattgttcaatcggatcgaggatctcccagctgaggttcacctcttcggtggtcgggaacaacggcggatcaccgagcagcacgtccagaatcagtcgctcataggcttccggcgagttctcggtgaaggagcggccgtagctgaagtccatgttcacgtcacggacctccatggtagagccgcccggcaccttggctccgaagcgcatggtaacgccctcgtcgggctgcacgcgaatcacgatggcgttcttgccgagttcgcgcacggcggtctgctcgaacggcagatgcggggcgcgcttgaacgccacggcgatttcggttacacgcttgccgaggcgcttgccgcaacgcaggtagaacggcacgccagcccagcggcgggtgtcgatatcgaggcggatggcggcgtacgtttcagtggtgctcttggggtcgatgcctttttcttccaagtagccgaccacttcgtgcgagccctgccagcccttggcgtactgaccgcgcgcggtgttggcggcgaggtccttgggcaggcgcacggcggaaagcaccttggtcttttcggcggtcaggtccttggcggtgaagctcaccggctcctccatggcggtcagagccatgagctgaagcaggtggttctggatgacgtcgcgtgcggcgccgatgccgtcgtaatagccggcgcggccgccgatgccgatgtcctcggccatcgtgatctgcacgtggtccacatagttggcgttccagatcggctcgtacatggcgttggcgaaacgcagggccagcaggttctgcacggtttccttgccgaggtagtggtcgatgcggaacacggagctcgggtcgaacacttcggataccacgctgtcgagttccttggcgctggccagatcatggccgaacggcttctcgatgatcacgcggcgccatgcgccctcggacgagcgcgacaggccggaggcggccaactgcttggcaacctgcgggaaggcgcgcggcggcaccgacatgtagaaggcatggttaccctgcgtgccgcggtcgcggtcaagctcctgcacggtggcgctcagacgctcgaaggcctccggatcgtcgaacgtaccctgcacgaagcggatgccggcggccagattgcgccaagtcgactccttgaacggcgtacggcaatgcgcccggacggcggccttgacgaattcgatgaaccgctcctgtgtccagtctcggcgggcgaagccggtcaggccgaagctcggcggcagtaggccacggttcgccaggtcgtagacggccggcagcagtttcttttgtgccagatcgcccgtgacaccgaaaatgacgaggctgcacgggccggcgatacggggcagtctgaggtcgcgcgaatcgcgcaggggattgctccaattgggggattcactcataatgtacaagggtagccgccggcggctatctatcgctagaggcgatatgcgatttgggctgcgatttgggccacattgcgtgtgctgtgccgtgcgttgggccaatcgcgtacgcaaacgtgtacgcaacgccgtagttgaaatatcccaaaacggtgtgtattttagaagagttgcccctttagctcaacggttagagcagcgtccttttaagtcgtgggttgtgggttcgaatcccacagggggcacaacaaatccttggaatcgcaatggttccaaggattttttgtttcgaccagcctggctcctagagtggtgccccatgtcatgcaccacgattcttgtcggcaaaaatgccagttacgacggttccaccatcatcgcccgcgatgacgattcgggctcgggccgttacgatcccaagcgcttcgtcgccgtcgcccccgacgaccagccgcgccactaccgcagcgtgctgagccatgtcgaaatcgaactaccggacaatccttgccggtacaccatcgcaccgaacgtgctgaataatcgtggcattctggccgaagccggtgccaacgaacacaacgtggcgatgagcgccaccgaaaccatcgctgtcaacgagcgcgtgctcggtgcggacccgatggtcgagttgcggccggctgtcggcgggccggacagcaccgattatcaggccgagcagcccggcggtatcggtgaggaagacatcatcacccttgtgctgccgtacgtcaccaccgcgcgcgagggcgtcgcgcggttgggcgaactgctcgaaacctacggcacctacgaatcgaacggcgtgattatttcggatgcggacgagatctggtacgtcgagaccatcggcggccatcattggatcgcccgccgagtgcccgacgactgctatgccacgatccccaaccagctcggcatcgacgacttcgacctcgccgatgcgttcggcgagcagcgcgaatacctatgcagcgccgacctgcgcgagttcatggtcacgcatcaccttgaccgcacaatgggaacgtcggtctcttccaacggccgtcacgtgcatagcgccggattcggaacaaccgttgcccttcccacccgcttcaacccgcgcaaggccttcggcaccgcgacgccgaaggaccatatctacaacacgccgcgtgcctggtacatgcaacgccgcctcaaccccagcgaggactgggattcgccggccgcccgctacacgcccgaatccgacgacatcccgtggtgccgcgtgccggaagacaaggtgagcctcgaagacgttgatttcctgctgtcctcgcacttcgaaggcacgccgtacgacccgtacggcacgaccggcacggcggaatcgcgccaccgttaccgtccgatcggcgtgaaccgcaccggccatatggtggcgattcaggtccgcccgtatgtgccggcggccaatcgcacggtgatgtgggtatcgttcggctccggtccgttcaccgccgccgcgccgttctacgcgaacgtcaacgacacgcctgcctacctgcgcgacaccacgcccgaagtctccaccggcaacctgtattggacgaaccgcctgatcgccgtcgtggccgacgcgcattggtatgagacgaaccggttcatcgagggctatgcggaaggcgtgcgcgcgttcgggcaccggctcatcgagcgcacggatgagcagttgcttgctcgaagcgatgccgaatcgacgggtacgaatgcatggccgctcgatggcggccacggcgatgagaaggatgtgcagggcgtggcggatgtgctcgaagcggccaacgacgagatggccgactacctgcgcgagcatacaaccaagctgctgaacgacgtgctatacacctccagcaacctgatgcacaacagcttcgcaatgtccgaccgttgggccgagtagcaagacctcggctggggaggtaatagggatgccctgctgataacgcgtcagcagggcaaagccgtaatccgaatcagttgaagccgacgatgcgttcggcgatgagatagccgttgcgcacgatccagcggccggttttaccaggcagattgagcgcgcgggacatcagcttcgagcgcacatccttgccgatggccggagaataggcgtcaatcgcatcccacagctcggttttcttaacgtagttggccggatcgcgcgagagaatcaggaacgccgaggtaacgcatgattcgatcgtcaggaagtgaatcatgtaccggtacagcccctccggcaccgtaccacgttcgggcgtggcctcggtcatcagccgattgacgagccgcagctgatccacacgcttaatcatcacgtcggtctgcacgctctgaccctcgcgcccgatgaagtagtggtagaacggcacgtcgagatactggatgcgcttcacccacgggaacggctggtacgagtaatagaaatcgacgtagaacgtatgctccggcagcttcagcccggaatcgcgcaccacctgcgtgcggaaagtgagcgcatgcatgatgatgtactgcgccagaccgaacttgcccaggtcatcccagccgagcacgcggccggcctccatcacatgacggaagttcaccacgatcttgtggcgcttggtcactttgtcatacacatagttggtcaccagcatgtcgatcggctcgctggcctcacgttgcgcgcgcaacgtggccagaaccgtgtcgatggcctgcgggtcgacccaatcgtccgcatccaccaccttgacatacatgccggtcgccgccgcgataccggtgttcaccgcgccgccgtgacccttgttctcctgatgaatcgcccgcacgacgcctggattggtgcgttccagcttacgtgcgtactccaacgtgccgtctttcgaaccgtcgtccacaatcagcacttcgaggtcgcgggtgtcgctcgccgaaagcagcgagttcacgcaacggtcgagataggactccatattgtatgcggggatcacaaaggtgagcgtctttgccgtgttggccatgaaagtcttacgtcctcacatatttagtcgttctgttcagtttcctgttcaaaccgtagcacttcggcttccggc

SEQ ID NO: 460 - DNA, 5130 bp, Unknown
  R48_24m  MAG No. k141_26068
ccgagcccccatgccaccgccacgccgatggcatacagcaggcaggatgccgccaccactgcagtggtggcgatgttccgttcctcgatcttctcggagatcggcccagcggcccaggacgcgagcgcagcaccgatgagcgttgccgcggccatgccggcgatgaggaggcccgcgggaatggtcaatggcgcggaagtgaacaccacagccttgccatacacccaaaagcgcacgagataccacagaaagaccccggtcagcccaacgcccgtcatcatgcacacgcgagcggcgaacacacgggcgaatgcaggcgcatgtgccggcggacgcagctggtcaaacacctggctcgactcgaatcgttgatgtggctgctcctggctggaaggctccttgggcagcatgatcacggtcaggatgccggaaaccgcaaacagcacggcggtgtaggcaaacggcgtgaaggagtcgaacatcacgccgagcgcacccatgcatacaccaagcgcttggccaagcatcacgccgataccgtgccagcgctcaatgcgcggacggaatttgtccggaacccgttcgctgatggcgctggccaacggcacggaaatcatcgcataggcaaactgcatgagcgcccagaagaaacacagcactacgaggcctgtgttccgccccagaaccagcgtgatcagcgcgcacagcacgccacccgccaccatccacggggtacggcggcccagaggaatacgtgtgcggtcggacagcgcggagaccaagggcatcgcgaacatggaggccaccacgccaacgaccaccagcacggccagaggcaccaccaagtcagtggcgacgggcagcggacggctggtggacggattgatggtgaccgatatggcagaagcggtgtcgtagtcgaacaatcgcgccacggcgttgggcatggcgatggtgttcaacgccgcccaaggcgcgccgaccagaatcgaagccacgaaaaagccccaattaagacgggaaatctgaacagcagtgggtcgctgaccattggcggcgaccatcggatcgcgcatatcgagatatgcagacgacagatcaggcgcaggggcatccacgctggccgcggcagcggcagcagccgacgaaccggcagccgccagacgcacggcctgggcctcgggctgatcggcggatgcctcgggaggacgccgacgatctttgatggccagtcgggccacggcatccttgtcttcgggactcaatgccttgtcgagatccgggcggtcgtcaatacccgggcgcacgtacggttccaacatgtcgctgctctttctttgctctcatcaccggcgggaggtaccggccagctccgactgagcatgacccgcaaccccgccacatgcaaaaccgcccgagcgcactagcttcagtgcactgcgggcggattgttttccatggacccagcttacgccggacgcactacttggagcgcgcacagcggagtggcgtttatgggccaacggttagtcgatatcggcaatcggcgggttgctcagcagatcatcagtctcgtggtcaccggcggcatcggtccaggcgaggctggcgaccggagtggtgttatccgtgccgagtccgcggccgggctcgaagatgagggcggccttggtcttgccgtcggcagcgatccagcggaaggtgatggatgtgtcgccgtcggcttcgtagctgaactcgccattgaatgcaggcagttcgttgcggaacttggccagggcgttcagggccttcaccaccgggcgctcgaggttttcgtcgatttcggcggtggagtagtaatggcgattgatgtcacggccgttgttggtcttgcgcagcagttccatgtcgttgcggccggcgagcgcgcccacgtagtagacctgcggcactccgggcaggaagaactggaccgcgcgggcggccagatagtgctggtcgttacagccgagcgcggagtagtacgtgctgttgacctgatagaggtcgaggttgctggcggcggcaccggtggcggcctgggattcgccgtgggtgttggcgtggatggtgttgaccagattatcgacgtcctcgtcgggcacgaggcccttgaggctgcggtcgagctgatcggagccgatgtcgatcacgccgatgccgtcatgcgtatcgagcacggtgacggcgttgttcgggcggatttcggtccagtggaccacgggttccacgtgaccggtgaacagcgagtgcaggagcagcggaggcagggcgaagtcgtagacgcggtccaccttggaggcgatttcaacctgcttcttgtagtagctatgcacctcaatgagaatttcgaggcctcgcttgacgccttcctcgcgtaggcgtgagatgagcttaaaggtcttgggggtcatgaagcagctggtgccggcctccttggcgccgtagcccacggcgtcgagacggatgtagctgacgtgggatgcggccatctgatcgaagatggacatgaggtattcccagcccttgtcggaatcggtgtcaatatcaacctgctgcggagtgaagctgacccagaccaggcgggtcttgccggcgaacttgtagtgggtgaacggcaggcccgggcgcgggcggtagatgccggccagttcctcttcggtggcgccgttcgggaagacggagctcatggtcagaaacatcgggtaatactcggattcctcacctttttcaagcacgtcttggaactgcttggattcccagctcatgtggttgacgatggcatcgaccatgatgccgtgggtcttggaaagttcagcgacgtcgtcccagctgccgagacgcgggtcgactttggtgtggtcgatcgggtcgaagcctgcatccgcaccatcgaacggagtgaagaacggcaggatatgcacgccgtcatacacgccgtcgaagcgggtgcgcaggatgtcagtcatcgagctaagagtgccatcgccgagatgatcggcgtaagcgatgagctgcactttgtttttcatgggacctcccttggttcatggatgcaggtgcaatgtgtacgcagtgtatgcgtgcttttacatacttatacgtatcgaaccggtttgatattacctcgaaagggacgttgatgtccagtaataccgcaaaatgcgcgtgtcgaaccggtttgatgcggtgttctacacaacccagcctgtccgaccccaatgtgtccgtttctgcaaaatcggacatccaaacatctcacgcatcacacatgaccgattctccggaatcagacacacagaacacttctttcggaacttagacgtccgattcggcagaatcggacacatgtgcacaagtcggatgatgagcacgactatcgacgggcgttcgctggttgtggacgccgctgaaatcgatgcgatccacaccgggcacacgcatgaagacgcgcagcatcaacgcgtggtatcgcctggcaccagcgtcatgggaataagcacgttcggctcgaacggcttggggatgttcctgcgtgaagcgttagccgcagccacttcctcattggcaatagcctgcacgatatggtcggccgccgactgtgcgatcgccgagaaatcctgcgcgaccgcggtcagcttcatgccagccaaatcagtcaaatacgtaccatcgtaggcaacgatctgcagctcgtcaggaatggaaattccgcggctcaacgcttcgcgcacgcagaacgacgcgccaatatcggaactgaccacggcatcgacgccgtcggccgtcaccttgtcgagcgcattgctgaccgcacgatgatagccggcaaaatccatcacttcgccagcttcaacgtactcgtatttcacgcctgcggaggtcaattcctgttccaacgtgaggtaatagcgcaccgtcgggaacgtggtctttcccaaatcgaacggtccttcctcgacttctccgcgcgcagccaaatcgaagaattgatctcgcggaccgccaatcatcaccacatgtttagcaccattgcggatcagcatctgcgcaatcaatcgcccaccctgctcgtggtcggatccgatcgacgaaataccgtctccaagcacacggtcgaacgcgacgatcgggcgatgaatcgacgtccaataatcgccgggatgcgaagtgtgagcacacatgacgatgccgtccatcatgtgccgacgcaacatgtcgacatactggatttcgccgtccgcctcatctgcggtagagcacagcatagtgcgtaatccttgcgcggcgagcgcatgctgcagatgtgcggtaaacgtcgcaaagaacgggtggcggatggtgggcacgatgacaccgaccagattcgtgcaatcatgatacagattgcgggcaagctcgttcggcacataattgagggcttgcatggctttgcgcacacgttcgcgcatgtcatcagacacgtacccgttgccgttcaccaccagcgagacggtgctcagagacaccccggccttcttcgccacatcgcgcatgccgaccatgatcgcaccttccccgtcatcactgttctatcgttgtatgctcacgtgcttaccacgaaatattacattcatttacattctctcgaacctgttcgacagtccggcaacgaaatacagcttcttagtgtcgactcccgcggaggcgaaggccttcagcagcggcttggtctggtcgaatgcaatcaccagcgttgcatccggactggcggccttgatggcggttgcgctcagatttctttcacgttactcagcgaccgtccgtgtaacgtgaaaattacgccggattggcaagcagcgcaatgccgaaaccggcggccacacaaatgagaggcaccgcgacggttgctattccatagcccagagccagcgtaaaacgacgctggcgaatcaatgaaaccacttcgttgagcgccgtggagaatgttgagaaaccaccgagaaatccgacaacgaacatcatgaccgtgtccatatccaccgattgcgaatagtaggacatcatggcgatgcccgcgcatagcgaggcgacgccgttgatgacgagcgtggatagcgggaagttgcg

SEQ ID NO: 461 - DNA, 3174 bp, Unknown
  R48_24m  MAG No. k141_26196
ccggaaccttaatcggcggagtcagagggattcgaaccctcgagccgtttacacgactaacaccttagcagggtgcccctatcggccactcaggcatgactccacgttacgcaataatgcgcaacagcaaatcactgtaccacgtcctgcggatacgacgtgccgaacgacacattattgaccgtccgcgggcgcggcatcgccggagaacgtaacgataaccgcgcaaatcaccaacgccacaccgatgatttcaccaacgccgggaatctcgccaaacgccagtcccacggccaccgccatggcgggattgatggattgcattaccgaaaatgcgccggatgtggtgcgtcgcagcgtgatctgctccaccacatagggaatgaacgaggccatcagggaaatcacaaacagcagagccagcagcttcagcgagccgccgggctcaagcgcccacgtggcatcggccttggggtgaaccacatgagccacagccggcacgccaaggaacagggactggaccagccagccgatggtcacggcgatgcacagattatccagcgaattgccgccagccgccacgcgccggccggtgatgatgtacatgccccacatcgacccgccgatcaaaatcgcaatcagaccatacaaaaacgtgcccttgccggacggattggccaatgatatgccggccaacagcaccacaccgaccgccgcgatgccgataccgacccgctcacgccagcttttgccggtaatcaccgccaccgaaagcggtcccaaaaattcgatagacacggcaatgcccatatccatattgctgatggccacataaaacagggtattcatcagcaccagcgagcagccgagcagtacgaccagcccccagccgcgggcgtcgcggtgaaacagctgcgctcgcttagccttgctccagggcctgcaccacagcagcaacagcaccgccatgaatcccacgcggtaccacaccgaatacagcgggtcgagctgggtgaacgcaagtttggcgacggccgtagccaaataaatcaccagtgcctcaccaatcacgataagcaccacgggaacacggttgaggataccgaccactgccttcttcacgaggtttacgctactcggagagtcgggacagcgcgcagcgacttggaaggcgttacggacagtgacgcaatgtggacgattccgtggaatcgcacccaccatgcgaaacagccgcacagtgcgcaaacccttggaattccggcgatatttggcattacgacaatgagcgccgcgccatgcgcgccacatagtgagcatgacctcgttcggcattcctacaatggtggcatgagcaccgcaccgagacttgaggccgccaaacgcgattggggccacgacgagaccggatgcaccgtgctgcatatcgacatggatgccttctatgcctcattggaggtggcgcgcaaccccgggctcaaaggcaagccggtgatcatcggcaccgggccgcgcgcggtggtgtccgccgcgagctatgaagcccggaaatacggcatcaattcggcgatgccggccgcgcgcgcccatcagttgtgcccgaacggcgtctttctgccggtggatatggcgtattaccgcatgatgtcgcaccgaatcatgcacgaggtgtttttgaccgtcaccgaccggttcgagcaggtttcggtggacgagggctatatggatgtgtccgccgcactgctggagtgggggcggccgagcgcaatcggcgcgtggattcgcgctcaggtggctgagcgcttccacgtgacgtgttcggtgggcatcgcctgcaacaaactggtggccaaaatggcctcgaccaatgccaagccggacggcatgctgctgattccggcggcctgctcggctgagttcgtgcagatgatgccattgcgtggcattccgggcatcgggccgtctttggagaagcggcttaatgcttggggcgtgcattcggtggctgaattggctcagctggatgaggctgcattgactcgtgccactggctccccggctgcggcacgtggattatgggcggcctcgcacgggttggattcccgcgaaattaccacggtgcgcgaggagaaatccattgggtccgaggaaaccctggccgaggatacacgcgatatgcgcgtggtgtgtgggctactgcgttcggcctgcgacgaagtagccagcacgctgcggcgcaaggggctggtggcgcgcacgctgacggtgaagttgcggttcgccgacctgagctatcagacccggtcttttacgatggagcggccgaccgatacggccggcgtgctgtacccggaatgcgtgcggcagctgaaagtcatgctggggctaccggcctcggcggagtctgccactcccctgcccaaaactattcgcttggccggcatgagcacgtcttcgctcagtaaggcggcggctacggccgtgcagccttcactggatgacatgctcgaagaggccgacaatgctcgcggccagacctcacaggcacgcttgcatgatgccgaggccgcgctggatgccgtacgccgcaaattcggctgcaaggccgcccagtttggggcgtgaacggctcaacgccacttacgatctcattacgccgtgagacgttcgcaggcggagcggatggcctcgtcggtggcggtggcggagaaacgcaggtaggcgggagcgccgtagaattcgccggggctggggatgatgccgattttggcgagctcggccatatcggcccagcagtcgccggacttggccttgacccatacgtacagcgcgccggagggcatttgtgccgaatagccatatgccttcagtgcgtcaaccagcgcggataggcggcgacggtaacgcccccattgctcgtgcacagcggctgtgtccttcagacctgcggccatggcggcctgcaccggtccggggataatctggccgatctgcttgcggtattcggccatttccttgaccagccggtaatcgccggcaatcagagccgtacggtagccggccatgttggactgcttggacagcgagtagagcaccaggatgccagctgccgaaccttcacacacatgtgaattcagggcacatggcgtggcggagagactgaatgcggtatcg

SEQ ID NO: 462 - DNA, 4572 bp, Unknown
  R48_24m  MAG No. k141_28685
cggcgcagcttggtgtcgcgcaggttgaagcccagcggctccaccagatgcagaatcgtgccggtcactgcgcacaggcggatggccgaaccggtgttgccgggaatacgcggcgagtaatagcacaggtgcggcgtcacggtttcggtggcggcggccttctcggcggaaagcatcgcgtccaccacggagatggggttgccgtgtgcgtcggtcaccagctcgtccggcccgtaattcgacttgcgatagccgtattcgaacattttctcgactttggtttcgggatttgctggattcggtgtgctctgggggttgtgttttgcctcgttcgtcatagctgctaagaataagaacgatgaacgacacagcaatttctttgcgattgggagcatggtgggaggccaatgcgcgtgacttgccatggcgcttcggacgggccacgccgtggggcgtgctggtatccgaagtcatgagccagcagacgcagatgagccgtgtggtgccgtattggaacgattggatggcacgctggcctgacgcccgtgctcttgccgcagcacctaaagccgatgtgatcaccgcatggggccggcttggctatcctcgccgtgcgctgcgattgcaggaatgcgcccgcgtggtggccgagcagtacgccgacaaactgccgcgtacgtatgacgaactcactgcattgcccggcatcggcgattacaccgcctccgcggtgctgagctttgcgttcggcgaacgaatcgccgtgatcgataccaacatccgccgcgtgctgagccgtgtgttccttggcgtcgaatcgcgcgggggagcggccagcccggccgaacgcgcgctggcgaaccgcatgctgcccaaagacgagattctcgggcgcgatgctgacgtcgccgataatgccggtagcgccgaacataccgtgaacagcactatccgtggcggcaaacgctcccgactgcatcgtggcgaacgcccatcggtcacatggaaccagtcggtaatggaactgggggcggtgatctgcacggccaaatcgccgttatgcgacacctgcccgattgccgacgattgcgcgttcctcaaggccggccgccccggactgggggagcgtcgcacccgcccacgccaacgattccaaggcacggatcgacaggtgcgcggtctggtgctcgccgcgctgcgcgagcttcccgctggagtcacgttgcccagggaagatgccgacaagctttggaaggaccagattcagcttgccgcctgcatcgccagccttgacgatgacggcctgatcgagattctggacggcggcctgcgattacccagctgacattgtgaaaatggcgggctccccaagcgtgtatgggtgtggtgaccgtagactggaagggttatggcagtgcagaggaacacatcaggcgcgagaacggcacgcggagccggcaccggggacaatgggccatccggcgggcccgcccgaaacgaccgttccggcaagccgcgcaagcgcaggatcagcaaaaagcagcaggccatctatcgtcgtcggcgtatcgtggccggcacggtgttgctgctgataatcgcgctgattgtattctgcgtgtacagccttggccggggtatcggtgccgtgaacacgatgattcaccatgacgaggtgtatgcgatttcccgcgacgccacgccggctccgaagaaagtcagcaatgtcaaggattgctcggccagtgatgtgacattgcagctttccgcggcctcccaatccgtgccggtaggaggatcgcttgatttcaccgcgaccatcgtgcacgaggggtcaggcaactgtttggtggacggggccgattccggccgtgtgctcaccattacttccggtcaggaaacgatttacaagtccgatgtgtgtccggcggattcacgtctgctgctgatgtccaagggtgataaggacgttcagaaggtcacgtggaataccgatgcgaacgccacgctcaccgaatgcacggatgagtcggattgggccaaggtcaatgcgggaacgtacgtggcgcagctgagtttgaaggatcatccgaaggtgaagagcgatccggtgacgtttacggtggggtaggacctgcggttggtgtttggacgctgggtctctccctcagtctcgctccgctcgacagctccctcgtcagcggaagctaaaaatgtcctcgcatatcagtattctgttgactttgcatgaggtgtgtcatattgcgggcatgccgtcgacaatgaagcgtccgcataggcatatggtggccatgccggcgctcccaggggaattaccacatattagcgagcgataaggaacgtccattggctactgagtctacgacgaacaccaccaccatcatcgcacgcgccgaccagcatgacattgatctgcacaaggcgtcggatcgcgtgaacttcggttccatcaaggaacccatcgatgtgccctacctgctgggcgtacagaccgacagcttcgattggctgatcggttccgaccgctggaagaagcgtgtcgaagaggatgaggctaacggcaccaacaccgtggcccacacctccggtctcgacgaggtcttcaacgagatctccccgatcgagaactttgcacagaccatgtccctgaccttctcggacccgtacttcgaggagccgcgccacaccgtgcaggagtgcaaggagaaggattacacctactccgctccgctgtacgtgaacgccgaattcgagaacggcgacaccggcgagatcaagtcccagaccgtgttcatgggcgacttcccgctgcagaccccgcacggcaccttcatcatcggcggtaccgagcgagtcatcgtctcccagctcgtgcgttccccgggcgtctacttcgaccgccagcaggaccgcacctccgataaggaagtcttcggcgcgaagatcatcccgagccgcggtgcatggctcgagttcgagatcgacaagaaggaccagccgcaggtgcgcgtggaccgcaagcgcaagcagtccgccatcgtgttcctcatggccatcggcatgaccaagtccgagatcgcccaggccttcaaggactacccgctggtgctcgacgccctggagaaggaaaccctcgagacccaggacgaggccctcgtcgacctctaccgcaagattcgtccggccgacaccccgacccccgaggccggcaagaacctgctggactccttctacttcaacaccaagcgctacgatctggcccgcgtcggccgctataagatcaatcgcaagctgggtgtcgaggccgatttcaacgaccgttccctccaccaggaagacatcatcgccacgatcaagtatctggtggccctgcacgacggtgcggcgaccttcccgggcaagcgcaatggcgaagacgttgacctgcgcgtggacgtcgacgatatcgaccacttcggcaaccgtcgtatccgtcaggtcggcgagctgatccagaaccagctgcgtaccggtctgagccgtatggagcgcgtggtgcgcgagcgcatgaccactcaggacgccgaggccatcaccccgcagtccctgatcaacatccgcccggtgaacgccaccatcaaggagttcttcggcacttcccagctctcccagttcatggatcagaacaacccactgtccggtgtgacgaacaagcgtcgtctttccgcactgggccccggcggtctgtctcgcgaccgcgcctccatggaagtgcgcgacgtgcacccgtcccacttcggccgtatgtgcccgatcgagtctcctgaaggcccgaacatcggtctgatcggctccctggcgaccttcggccgcgtcaacccgttcggcttcatcgagaccccgtaccgcaaggtcgtcaacggccacgtgaccgacgaggtcgagtacatgaccgctgaccgtgatctcgaccacgtcatcgcccaggccaaccaggaacttgacgagaacggcaacttcgtctccaagtccgcccttgcccgagtcggcgaggaagaggcggtcgatgtgccggtgagctccgtggattacatggatgtctccccgcgtcagatggtctccctcggtgcctccctgattccgttcctggagcatgatgagggccaccgtgcactgatgggtaccaacatgcagcgtcaggccgtgccgctgatcgaatccgagcgcccgctggtgggtaccggttccgaatggcgcgccgccaacgattccggcgacgtcatcaaggccgacaaagacggtgtggtcacctacgtgtccgccgacctgatccgtgtgatgaacgacgacggcaccaccagctcctacaagctggctaagttccagcgttccaaccagaccacctgctacaaccagcgcccgatcatccacgatggcgagcgtgtggaggccggctcggtgctggccgatggtcctgccatccagaagggcgacctggccctgggcaagaacctgctcatcgccttcatgccgtggaacggctacaactacgaggacgccgtgatcatctcc

SEQ ID NO: 463 - DNA, 19875 bp, Unknown
  R48_24m  MAG No. k141_29218
ctacgatgcgtggccggtgactcgggcgacatgcatcgccaaataagcgatttcgtcgtcgctgatatccgtgtcgaggcgcagttcgagcagggaggcgatggttcgcgcgcatcgcagcgcagcggggtaggactcacgaatcaccttcatcaccggtgccggctcgtccgtcagttgctggtgctggtggatgcgtacgaacagatagcgcaggtgggtgatgaaccggcccacgttcacggaactgcggtccaacgtgatgccgtagctgtggtcgatgatgtcaagcagttgctggatcacgcccgtcatcgtgtacgtataggacaggtcgccggtggcgaagccggcgttgaccagatgcatggcaagcgcggtggcctcgccgtccggcagcgtgacgtcgagccgtgcattgagcgatgcgagcatcgcacgcccctgcgcgtattcctgcgggtacaggttgctcacctcgccgagcagcgggtaggtgatgtcgatgccgcgccgcacccgctccaccgcattcgccacgtggtccgacagggccatgaccagcgtggtgctgccggtctcgcgctcccccagtccggtctcctgcatggattcgacgaccacgcggatgatttcgggcggaatgtccgccagcatctgcgccagatggtcagggtcgcgcccgtccgatggcacgaaggtgcgcacaactttcgactcgtcgaccgtctgccccggcttggcctggaaccccagtccgcggccggtgagaatcacctcaccgccgtcgccgcctttggcgagcacgacgttgttgttgaacactcgcagtatttccatggcatcctttcgcaacgtcattgttccacatcgatgatcgggctgccggctgatacggttttgcagtcgccgccgttgtcgtcgctgctaccgtcgccgatcaacggcgtgaccacggtcagttcagcggcgttgaccaccgtcaccaccaccacaacgctgtgcccggccgccgcgactttgccgaaatccacggtggccagtggctctcccgccgcgatccgctcgcctttgcccacggccacgacgaatccctcgccatccatattgacggtgtcaatgccgacatgaaccagcacttcgatgccgtcatcggttttaatgccgaaggcatggccggtccgggccacggttttcagcgtgccactgaccggtgccagcacggccgtctcgccggccgtctccggcacgacgcctacaccctcccccagcgcgcgggaggcgaacaccggatcgccagtcgcttccagattcatcaaccggccggcgaccggcgacaggatggcgttggagtcaggagtccgatcggaggcaggccgcgatggggaatcttccgcagactccgcatccgacgatgtcgcgccaatccctctcaccgcatcctgcgagcgtacgttctcgcccgccgagaccatctgcgcctccgtggcgcgcggcggcgtacggtacccgaacagcaccgtcagcaccatcgccattacaaacgcaacggcgatggacagcgcgtacacccacattctgtcaaacaccggaatcgtcagcaacgaggagaaggcgaacgccgtagtcgtgacgccccggaccatctgaccggatggcagcacggacgggaacagccagccaagcaccgcgctggtcacgccgccggccgcgcagccggcgagcagccagcggtagacgcggcggtgatgcagatggatgccgtacaggctcagttccgaaacgccactcagcaatcccgcgagcaacgcccccaccgcggtctgccgcatggccgaatccttgccgcgtacggccagcacgagcacgccagcggtggcaccgaagcaggcaaagttccatacacccatcggaccttggacgaaatcgtagccgagcgcctgaatgttcatcagcatcagggcattcaacggccagtgcagaccgagcggcacgagaaacgggtagagcatcgggatgatgagcgcgaataggaacggcacgtgcgcgttaagccatgctgtggccgctcccagcccaccgccgagccatattcccagaggcccgatgaccagtatggtgagcgcaaaaacgacgaccagtgagaggaatggcacgaacaccagctgtacgctgtcgggaatgacgcgcttcaacccgtggtagaccacggcgagcacggcagccatgagcaacggcacgaagacgttgccgccgtagtcgttgagttgaatcggtatgccgaacgccgacacggtgcaggtttcggcgccgaatacggcgttggccgagcattgaatcgccccggagagggcgctggatacggacgtcccggacattccggacattccggacatcacgccagtaaactgcggggtcatcagcgcggccataatcgcgccgccgagccaggggtcgacgtccagtttcttggccgcattgtaggcgatcataatcggcagaacggtgaacacaccctcccaaatcgccttgagtagtatccagccggcggaggtctcgccgtcaggcacgatgccgagtgcaacgatcacgttgacgatggcgatgaccagcgaggcaccgagcagtacacccagaatcgggcggaacgagtcagacaggtagtcgaaaaacgcggcagcccaagcgcgggcggcactgccccactcgcggacggtacgaggcgtgaagtgacgggatgtattggatgggccgcaactttgttcggcgtcggtggcagtatcgcgcgatggtgcggcatcgtcggaaaggtacggcgcggactgcgcgggttgcgtgggctgtgtggattgcgctgactgcgcgggctgcgctggctgagtgggctgcattgactgagtgggctgcattgactgagtgggttgcgttgactgcgacgctgactgcatcactgccgatggcaattgcgctgccggcatcaatcgcgccgtccgcagccgaacgatctgctcgtacaccgaggcgaccgctccgccgatgatgacctgataacgattgccggctcgcgggaatgcaccgaggactccggggacggattcaagaccgtgctggttgacatggccggcatcggccagttcgaagtgcagtcgcgtggcgcaatgggtcaggctggtaatgttcgcggggccgccgacggcatcgacgatgcgcgccgcaatcactgcaggcgttgcgttcgatgcgttcgccacggttcctccttgctgccgtatgccactgtgttccattatcggcgctgggtgccccaaaagcacggcaatgccggcaaagcatcgcgaaacggcaactatgcgctacggtgctccgcgatggtgtcccgccataatgttccgcgatgatgcttcgccacacccgttctccgtatttgccgcagcgcccattccgacatcattccaccatgcagaatcctgcaatcgttgtcaaaaatcatcgttttttgccgcctattcggagtgtcgcgactgcggaagtcgtattctatctttcacacacgttgcgtagcagggttgttactcaaaacgaggcaagacctggagcgacgtggaatttgcgtatcgtgatatgcgaattccacgttgttccaggtctttttttgttttcgggcgactgcagacaatcgaagcctgaccttgcacgcggcagaggggccacgcaacaggcgcggtccgtcaacggcgaaaggacaaggcaatgacgacgacaacggcatcacccgtatcgaaacagacggcatccgcggcgcaggaaaccagcgcaaccggtgcggcggccaccgcaatcgaaaccatcgaaaccggcgtggccggagtggcgggcgcggccacaaacgcggcagccaacgcaatcgaggacctcgaagccgccgaatcgcacggcttctccacgcgcttcccgctcaacagcgcattcatcttcaccttcggcgcgctcggcggcatgctgttcggtttcgacaccggcatcatctccggcgcctccccgcttatcgaatcggacttcggcctgagcgtctctcagaccggcttcatcacctcctcggtgctgatcggctcgtgcgcaggcgcgctgtcgatcggcgcactgtctgaccggttcggccgcaagaagctgctcatcgtctccgcgctgctgttcctgctcggctcaggcctgtgcgcctcctccaccggattcgcgatgatggtgtgcgcccgcatcatcctgggtctcgccgtcggcgcggcctccgccctgaccccggcgtacttggccgaactggcgccgaaggagcgtcgcggctcactgtccacgctgttccagctcatggtcaccttcggcattctgctggcctacgcctccaacctcggattcctgaaccacaacctcttcggcatccgcgactggcgctggatgctcggttcggcgctggtgccggccgccttgttgctgctcggcggcctgttgctgcccgaatccccgcgttatctggtgaacaagggcgacacccgcaacgccttcaaagtgcttacgctgattcgcaaggacgtggatcagacccaggtgcagattgagctggacgaaatcaaggccgtggccgcacaggacaccaagggtggtgtgcgcgaactgttccgtatcgctcgtccggcgctggtggccgccatcggtatcatgctgttccagcagctcgtgggcatcaactcggtgatctacttcctgccgcaggtgttcatcaagggcttcggcttccctgaaggcgacgcgatctgggtgtcggtgggcatcggcgtggtgaacttcgtgagcaccatcgtggccacgcttatcatggatcgtttcccgcgcaagggcatgctgatcttcggttccatcgtgatgaccgtttcgctcgcggtgctcgccgtgatgaacttcgtgggcgacgtggccgtgctggcagtgccgacgatgattctcatcgctttctatatcctcggctttgcggtctcgtggggcccgatcgcctgggtgcttatcggcgagatcttcccgctgagcgtgcgcggcatcggctcatccttcggctcggcggcgaactggctgggcaacttcatcgtctcccagttcttcctcgtgctgctcgatgcgttcggcaacaatgtgggcggcccgttcgcgattttcggcgtgttctcggccctgtccatcccgttcgtgctgcgcttggtgcccgagaccaagggcaagtcgctggaggaaatcgagaaggaaatgaccaagcgctagacaaccggcacacgattcgcacaaaagttgacaactcttaacataagagtacccaaagtggcgaaaaacgtggcagaatagggaacatggtagcaaacaatgcgggtcagcccgccaccccagcagatctgattaatgtcgatgaggttatcggcaagtactatgacctcgtccccgatcccgaagtccccgagcagcgtgtcatcttcggcacctccggtcaccgcggatcgtccctgaagacctcgttcaacgaggcccacatcatcgccatctcccaggccatcgccgaataccgcaagaaggccggcgtcaccggcccgctgtacctcggctccgacacccacgcgctgtccggcccggccaagaagaccgccatcgaggtgctcgtcgccaacggcgtgcacgtgcgcgtcgactcccgtgacgacttcgtgcccaccccggtggtctcccaggccatcctgacccacaaccgtgcggtcgacggcacccagcgcttcgagggcgagggcctcgccgacggcatcgtcgtcacgccgtcccacaacccgcccaccgacggtggctttaagtacgaccccgtcaccggcggcccggccccggccgagaccaccaacgccatcgccgctcgcgccaacgagctgctcggcgacttcaagtccatcaagcgtgtgccctacgaggaggccatcaagtccgagtacgtcgagggcttcgacttccgcgagcactacgtggacgacctggagaacgtcatcgacttcgacgtgatccgcaactccggcgtgcgtctgggcatcgatccgctcggcggcgcttccgtgaactactggccgctcatcaacgagaagtacggcctgaacatcggcgtggtgcgtcctgaggtcgacccgacctggcgcttcatgaccatcgaccacgacggcaagattcgcatggacccgtcttccccgtacgccatgaagggcctggtcgacgagctcaacgccggcgcttgggacaagtacgatctggtcggcggcaccgacccggacgccgaccgtcacggcatcgtctgcccgaactggggcgtgatgaacccgaaccactacatcgccgtgtgcgtggagtacctgttcggcggcaaccgtccgggctggcctgagggcgcagccgtgggcaagacgctggtctcctcttccctgatcgaccgcgtggccgcatcgatcaacgcgaaggtcatcgaagtgccggtgggcttcaagtggttcgtggacccgctgttcagcggcgaagtcgccttcggcggcgaggagagctccggcatgagcttcctgcgcaaggatggccgcgtgtggaccaccgataaggatggtctgatccccgacctgctggccgccgagatcactgccaagaccggcaagaacccggcccagcttcaccaggagcaggtcgagcgcttcggcgagtcttggtacaagcgcgtcgacaccccgaccacactggagcagaaggccaagttcgccaagctgaccggtgatgatgtggccgccacgcagctggctggcgaagacatcaccgccaagctgaccgaggcaccgggcaaccacgccaagatcggcggtctgaaggtcaccaccaaggacaactggttcgccgcccgcccctccggcaccgagaacatctacaaggtgtacgccgagtccttcgtctcccccgaggctctggacaaggtactcgacgaggccaccgtcgtggtcgacaaggccctgagcgagtgaaatcgctgcgttagtcgcgttcaccgcaaccaataaggctctgcattggattcatacaatccactgcagagcttttttagcgcatatgcagttcgcgaccactgaaacacgcaggtcaacggttctcctcatgcaccatgactgcattttctcaacatcactgcagggcaggacggccagatgaccgcgaaacgttcgactacctatattatgaccgagtttcccatcatcattgtggggtcacagcggccagatgaccgccgaagcgttcggtcggcttgcatcatggtcgagttttaacatcgttgtgggacgccacgacgaatttgcccattccagagctgccatcccacaaaagcgtgggacaacagctaagtcaatcgttttacatttcccccatcccacacactcaaactggaaaccccggaaagacgccattcctgccacacccgtcacagccattacccgaggggccgtgggacgccacgcaaaaatcggcaaaacatgcgtagcgtcccacacccattggcgcaaatccacgctcaatgcaccgacaacacccccaatcgaccactatgacacatttccctccacaatcgaacactagtcattcacgaaatccatcactacgaggcatcgcaatcgaacggcatgcaatatcaagcacacaccacaacaacaggtcgcacaaatattgcctttacatcagtccgtttcggacatcatggtcacagcaggctctgcgccaactcttcaagagacatggctactacatgaaactcgaatacggcaccgcgcgaagcaagcgccctcgccacgttgaaagcgaattcagcacgagcatcctcgttagcgatacttgctgccgtggcgacgaagaccagccatctccgcccgaccagcacaccccttttctcttggtcacggcgccattgagtcttactcgtacgatgatgatcgccatcatattcaacagcgaccttgaactccggccacgctaagtccaacgttatgggagctccagatgcaaaagccgcgtccggcaccacatagttcgcaaccggccgtggaatcccatgcgctaccagagagagtcgttcttctgattctttgggcgaatcagcaccaggtgatatcagaggcaatgctcgaacgcaggacgggcgccctctgaatcgggtaaattgctccacgaacttcaccagatcctgatagattgcagcagcatcacgatccttggccaatactggctgtttgctcgtagcagcgatgacggcatccccgagcacaatcagggactcaaaagaaacatacggggcaagttgagcccatacgtgaaacaggtccagcgcaaacacgtgttggttcatttccacattgtcggctttagccgcatgtttccaaatatgcgtttgcagtggtgcatggcgtgtacgaaaccgcctgctcttaacgctggatacagtgtgcagcttggccgagtcgaggtcgcaatcggcgggaatcggtacggattgcagagcgagggaagtggtcatgccgaaaagcagcttcttgcccgcccgtttcgcttcctcagtgcagcgtgcgaccatgtcgcgtctgcgctgggcgaggctttcgctcatggtcggtgtcgctgcagaatcatgtgcaccactgttcggcgatgacgagtcgcgagaagtcgggtatttcgagtcagtagaaaatgatcccgcaaattcgggcggaacaaaaactgcctccgattcttccggaggctgatcgtatatagagcctggcagagctccatagttggtgatgccgtcggtcatcctgttcatgacaccaccatatgggtagtgggtgcggaaacggaagccgatccgaggtatgtggtcctagcttcacttacgcacattcattgtggataaccatgtggacacctcacttatacacatagtcatccacctcttcaaccccgatttgacacactaactgtatctgatatgattacagtatcataactgtacacatcatagttacagtatcgactcggtaaggaggtcgtttcatgaacggcgaccattcactggcagtgcacgcattggtctaccttgaccatcgcgccacacacctgcccagtcagatcctggccgagaacatatgtaccaatgcggcgcgcgtgcgcaaagtaatgcgaccgctcgcctcagccggactcatcgccactaaagagggtgctgaaggcgggtacgctctggcccggcccgccgccgaaatcactttgcgcgcggtagcggaagccaccggcaccacttttgtgaaagtgaactggacaccgggcgacgtacacgaggactgtctggtgtcatcttcaatgggcgcagtgatgaacgacatctatgccgggctcaaccgcacttgcctcgaacaactcgaacacaccaccatccacgacatcaccgaacagatattcagcgagcgcaaaggctaataatcccgcgcgtttcccctagccagcatcagtcgataacgcttcggcagtcaaagaagaaaacagacgccgcacggcacacaacacatcagcacaacgcactcttatcactcgaatacgtaaggaagtaaccatgtccatcagcacacccaatgccatcagcacacccagcacctcccccactatcaccaccgacgccctgatcattggattcggcaagggcggcaaaaccttggctgccaagctcagtgcagccggccgcaaggtcgtcgtcgccgaggcaagcgccgacatgtacggcggcacctgcatcaatatcggatgcttgccgtccaagtcactgattttgtccgccgaacaggcgcggcgggatggcgcgaacagtactcccgaaacccgcgaagcagcgttcgaggctgctatcaaggagaagcgccgcgtcacttcgatgctgcgcgacaagaactatcacaagctcgccgaccaagacaacatcaccgtaatcaccggccgcgctcacttcaccggccctcatagcgtggaaatcgccaccgctgagggcccggtcgccgtgaccgccagcaagatcttcatcaataccggtgccacgccgcgcattccggatattcccggtatccacactacgcccggcgtctacaccagcactggactgatggatctcgacgatatgccgcagcgactggtgattatcggttcaggattcattggacttgagtttgcctcgatgtttgccgatttcggcacggcggttaccgtgctgcagcacaatgccgagttcctgccgcgcgaggatgcggatgtggcggccgcgattcgcgcacagttggaagcgcagggcgtcaagttcctgttcaacgcggataccaaggccatcgcgcctgctgctgacggcggcgtcaggttgtccgttgcggtgaagggtatgactcgcggcgcatcgcaagcttgcgattccacccccgccggcaccgggaacgctcataccgatatcaccggtgccaccgacgccaccgacgccaccgacactacaacaaccaccagccccactagcaacccgaccgatcacgccacgatgtcacacgttcaaacgaaaccatcagacgatggcgagccgcggttcgccgagccggctgaagcccgattctgcctgaccaccgacgcggtactggtggccaccggacgtacgccgaacgtcgagggactgcatcttgaggcagctggcgtggagctcaccgaacgcggtgccgtgaaagtcgacgagcttctgcgcaccacagcagccgacatttgggctctgggcgatgtgaacggcggcccgcagcacacgtacatttcgctggatgactatcgcgtggtgtggtcgcagctcaatggttccgaccgtccgtacacggtgaaggaccgcaagcatgtgccgtcgagcacattcctcgccacgccttactcgcgcgtgggattgaatgagcgcgaggcgaaggcggctggattggattatgtggtcaagcgattgccggtggccgctgtgccgaaggcccaggtaatgcggcgaccggatggtctgatgaaggcgattgtggaacgcaatactggccgcattctgggtgcgatgctgctttccgtcgagtcgcacgaggtgatcaatatcgtcaagttggcgatggatcttgacgcgccggccagcacgttgcgcgatatggtgttcacgcatccgacgattgccgaggcactgaacgacttgttcgcgtagtttgtccgcatagcacgcccgcgcagcatgacccgcgtagcgcagcccgcaacagactcccctaatgcgcgcgaaggtcctcatcgacgtaaaccgatgaggaccttcgcgctgtcgtcatgatccgtacgtgacagcaatcacgtccgaaccagccgttacttcaagccgagcttacggtccagaatgtcggaggcatccaatcccaagcggcgtcggatgaaccagccaagaccgagcggcaggccgggagccaaggccatgccgcctggaccgagtgccacggttttggagttgcctgcgataagcatggtgcccttggatgcggccgtggccgtcgaaccatcgctgtccgcctctggtttgaggatttcgatgttgccgtcactggttttgtacagtcccttattctcattccagataccggatgcgccattgttgccggcctcacccgcagagaggaaatgtcttgtttttcttgtgagcgctcacctattcacgcgcgatggcatgtttttcaagcaaagtcaataggtgtgatgttattcacactcttcactacgttgttttgcctcgcactgggcaaccccacttcagcaagagattgcacaacttgcgttagggtggagaacatgactatcacagtatccacagatgggtccgcattagggaatccaaacgggccaatgggctgggcctgggccgatcatgagcagaacgccggcggcaagcccggccataagcacgacgaccatggttatgatgcgggcggcgcgaccaacggcaccaatcagattggtgagctgtgcgcagtgctggaagctttgcgagcgcacccgggccctgagccattgctcatcgaatcggattcgcagtacgccatcaattgctcgaccaagtgggtcaaaggctggaagaagaacggctggaaaaattcgcagaaaaagcctgtgaagaacaaagagcttattcaggcgatcgaccgtgagatctcacaacgccctggcccggtggatttccgatgggtcaaaggtcacgccggcaacgagggcaatgagttggtcgatgaactggcacgcacctatgcgggcgattgccgttcgggtgcgcgcgacggctatctgccgattgaaggctggcagtcgctactgggctccgaatacgcacatggcaccgatgtgcctccagacgtgcagttggtgctggatggcaaggcggatgcggcaagtttgcgcaagccggctgcggcgacggattcgacggatgccacaaggccagagaccaagtcttcgtcacccttagcgacacaatcagcgcaacctgtacaatcagcgcaccccgtacaccccgcaaagccaagcggactgacggtatccggtacgctgaccttctcccccgcgccgaaaacgagcccgtatttcaacgggcagccgatgccgatcaaaggcagcatcgaaatcgaaggctatgtggacggcgacggcaacctgaccatcgccaacgcaccattcgtacgacactaacacccaaacacacgaatatgtaccgcaatcggacacgatgacacaaaatcgctcattcgcgttaggataggagataaggcttcacgccgttgatccatgcggcggaggcaaggatggcaaaggagaaaccatggataaggcacagcaggatgcgctgaagaaggcggccggcatcgaagccgccaagctcgttgaaaacggcatgatcgcaggcctcggcactggttcgaccgtgaagttcctggtggacgagctcggccgccgtcatcaggaggaaggtcttgagttcactggcgtaaccacgtctcgccgcacgcaggtccaggctgaaagctacggcatcaagatcgtggacatcgacgacgtggaccacatcgacgtgaccattgacggcgccgacgaagtcgacaagaacttcaacggtatcaagggcggtggcgctgctctgctgtgggagaagatcgtggccaccaactccaaccagatcgtgtggattgtggacgagtccaaggttgtggacaccatcggcaagttcccgctgccggtcgaggtcattccgttcggcgctggccacgtcatcaagaagttcgaggaccgcggctacaagccggtgcttcgtcttgacgccgatggcaaggaagtgcgcaccgacgagaacaacttcgtggtggacctgcacctggagcgcatcgatcacccgcaggagctggccgaagacctcatcaacacggtcggcgtggtggagcacggcctgttcctcaacatggtcgacaaggtcatcgtcggcgacccgaacggcccgcgcgtgttgaccaacgccaacaagtgatcgtctcacatcactgaacttttccaagcccgcatctgtacatcgcaggtgcgggctttactgttgcccgaacaaggcaaaggagccaaaaagagaaaccccgcgaccataacgatcacggggtttctaatgccttgattgcaggtaagactacttacgctggtggcgggtcttacgcagcagtttgcggtgcttcttcttgctcatccgcttgcggcgcttcttgatgacagaacccatctgaagcctccatttcgattaatcgtaaaagttgcaacttgcaccataatacacgtgttgccagacagaggaaaccagtatgttgtcgatagtccgcatatgccctgaacgcagttggggcatccacatcagcaatgtggatgccccaacgttcataagtttgtgcagcagctgacagccgatactagatactacatcgggaacttctggtagaagcgatcgaccgcttccttggtgccggtagcttggaagaccacggtatcgttctgccagatggcagcggcgttcttgctgttggaggcatcggccttcaccacgtacgcgcccgtgacgttgccggaaaccttgacgttgccggatgccgactcatcgccggtctgcgcagcgaccaacgcatcgtactgggtcttggcattgtccgccgacgaccactgcgcggcgaccagcgtgacatccttggcggcatcaccagtggagtaggtcagagtgtactcctcgagcggcgacgcggaattccacgtcgtggaggcatccgccttggtacgcgcgtaattcagcacgctgtccggcatggccttcaacagctcactggcatcatccggcaaagctgtggcgtcgatggtcggcttgatcggctcggatgattcggttttctgctggctgttttgggtggtagtggaggtgccatcattcttctggatggcccaacccggccacacaaaggccgaaagcactgccaggataatcacaacagctgcggcaaccaccactgcaatcaacttgccatgggattgtgtggtcgaggagttctcactattagtcataccccgattctctcacagccgcgtgacgctagacggccgtaatcttagtcgttgtgcgcaagccgcgtgaaactcttgtgaacggtaaaaatttaccgtccgctggtgtttgggttagggtgagaccatggcgaaatcaagtgtgcagtatgtatgttccgaatgcggttggaacgggccgaagtggtacggccgttgccccgagtgtggtcagtggggcacggtcgaggaatttcacgaggctcggccggcggcaggctctcgcacggccgctcccggccgaacatcacgcacgcagtcggttacggttgccgacaacgccagatctgcagcccgtccgattaccgaagtgggcacggaaagcgtcgagcggctcggtaccgggttttccgaattcgaccgtgtgctcggcggtggcgtggtgccgggttcagtgacgctgatagcgggcgaaccgggtatcggcaagtcgacattgctgttgcagacggccggcaatatcgcgcgcgttgtggcgggagacagtacattccgaggagccggtcagcggtctgcccaacagtcgggccgggcgcagggcggcacatcaaacacggtgtcggtacagggcaacgcaccgtcggtacatgccaataccgtgctgtacatttccggcgaggaatcacaggcgcaggttcgtttgcgcgcttcccgcatcaacgcggtggagccgaacttgttactggcctccaccaccgatctgtccacagtattggggctgatcgaacagaacaagccggccttggccattgtggattcggcgcagaccatcgtctcgcaggaggtcgatggcatttccggcggttcgactcaggtgcgcgaagtggcaagcgcgctgatagataccgctaagacgcttgacattccggtatttctggttggtcatgtgaccaaggacggttcgattgcaggcccgcgcacattggagcatctggtcgatgtggtctgccaattcgaaggcgacagcgagaccgcgctgagaatgttgcgagcggtgaagaatcgttttggtccgaccgatgaagtcggctgtttcgacatgagcggtgagggcatcgaagaggtcaccgatcccgccggattgttcctgtctggagacggccctgatgcggccaacgcggcacccatggaaggcacctgtgtgacgttcacattggatgggcatcgcagtctgcctatcgaagtacaggctctggtcaccacgtcggtgctgcccacacctcgacgtgcggtcaatggcgtggaccccagccgtatcgccatgctggtcgcggtgctctaccgtcacagcaagctcaacctgctgtccaacgacctgtatatctccactattgccgggggccaggccaaggagcccggttccgatttggcgatagtggcggcactggcgagcgccgccacgtcaaaacccattgcgcgagccacgtgcgccattggcgagatttccctgaccggtcaggtgcgcccggtaccgcgtatggaatatcgccttcgcgaggcctcgcgccttggctttacgacggcagtcattcctccgctgcgcaagccggtgcatgtcgagggacttcggctggtggagtccaacacattgtccgacgccttagatgccttgggagtgcgtaaatagccctgagatatgcctcaggcggtaagacgcttggtctcttcgacgttgcgcttgagttcgtcaacgagttggtcgggaccatcaaacttgacctgcgggcgcaggaaaccgacgaattcaacgcgaaccttatggtcgtacagatcaatccactcatcggtgatgcaataggcctccaccacgcgttcgttgagtcctgttttctcgctgaaggtgggtttggtgccaatggagatggcggcaggccagcggttctcaccatctaccagccaaccggcatagacgccgtcgaccggaatgtagcctgcaatgtcggagccaagattggcggtggggaatccgatggtgcggccgcgctcctcaccgtgtaccacttcgccttcgatggcgtgcggagcacccagaatggcgttggcatcctggattcggccatgagccagcaggtagcgcacattggtggagctccaggcgcgcattgccttggcctggttcttcttgctccatgcgcggcgctcggccttggtggcattggccagcgggtcgacgggctctccccattcgctcggggcttccggcttgaaatcgcgcggaatgcgcacttcacctgggccacggtcatcgaccacatcaagttcgaatacaccggtggcggcggcaagattggcgatatgcttcacatcaccttctcgccccttgcccatggcggcatcctgcccgaggaccagcgtacgcatgcccagcttgccggtgagtctgccaaggaagaaaatgtatgacatggctgcgaaggccagcgtgtagtgcaccaccaacacatggtccacgccgaactgttccatgcggtgcagtcgatcatccacactggtcaaggcttcggcatccacgttctgcaccgcgggttcctcgccatggtgcgaggcggcccagccgtgcacgaatgcggggcgcgggtcaaacagaatcaccacggaaaaagcatcatgctggtgcgcgagttccaccacacgcttgatcaccgcctgatgtcccaagtgcatgccatcaaatgcgcccaatgtcaccacggccttcttgtcgttactgaacgagggccattcaatcgaaccttcggcgtcaggggtcaggtgcgtgatatccatcagtgtgctgttccttttatccgtgcgatgttattcatgcaatataggcgttgttgtgcgcggcctgtatcaagctgcacttttcaccgcgtctactttacgcgagggggaatacggtgaccggcttggcctgatgagcgttggcacgctcgataatcgccgccacatcatgcgtttgcggcacaatggcggcagtgggctcgctgattgtacgctcgatacggcggccgaagcgcaattcgctggcttcctcaggtgtgatgtcaagcgccggcatcgcgcctcgagcggcctgttccatggtgagggcatggtcaagcagccagttgcggcgctcgtcaccggcaagaccttcaggagtgttcaatacgcacttgttgcgcgtgacggtttgcccttcccgattagtgaacgtcttctgatcggtatgtgcggtgacggtatgggttcgcgtgtcaagcatcgcctcagaggcgataagtccgctggtatcgtccggcaacgcgaatcggccgactcgcgtacggcgcaaacgggtcaggtatccgccgacgccaagttcattgccgaggtcgcgggcgagcgcgcggatataggtgcccgatgaacagctgacccgcacgtcaatatcaagtgcgggaatcgttcccgtgttcgcgtcttcccgcaatggttcagcggcctgctcccctgctacgaatccgctgcggatatccagcacggtgaattcgctgatggtcaccaggcggggcttgagttccacatccttgccttcgcgagccaagtcgtaggcacgctggccgttgattttgatggcggagaacgtattgggtacttgtccgatatcgccggtgaaattggtggcgatggtgcgagtgagcaggttttgccatgaggcagttggtgacgccgttggttcgccgctctggccgccctcagtcagctgcgctgacagcgtttgccagcgggagcgggcttcatcatcgacaagcgcctcgccttcggcatcgtcggtagtggtgcgcaggccgaggcgtatggtggcctcgtaggttttgtcatgcgccacgatggcgttgagcagtcgcgtggcgtggccgaaggcgatgaccagcgtgccagtggccatggggtcaagggtgccggcgtgaccgaccttcttgatgtgcaacgcgccgcgcacggcggcgacggcgtcgaaactggtcacgccttgcggcttgtcgatgatgagtaggccgctgggtgttgtatgaagcacactactcctcgtcggactcgaactcatcgccctcggcttcggcctcgtcgtcgtgcttgtacggatcggcgtcgccggcgtactgggcggtggcgcgggcgcgggcgagttcttcgtcacgcttcttggccacggcgagaatgtcttcgatctcgtgagcctcgccgggcacttcatcgaacacgaattggagctgcggagtcaggcgcaggccagccttgtggcccaccagagaacgcaggtgacccttggcctgatcgagcgcctgctgggcgcgcttgcgttcgccttcctcgtggccttcgtggccgagctgggtccagtagaccttggcgatctgcagatcgttggtcacacgaacttcggtgacggtgatgctggcgagtcgcttgtcatgcagttcgcgctcaatggaggaggcgacgacacgctgaatcaaggccgcaatacgtgcggcgcgcgggttggttcctgccataggaatttccttttctagacttgagccccctctgacgaggggctgccgaacgcagtgaggctgggggagagaaaatcatggaactaccatgtctctcccccagtcagcctgcggctgacagcccactcgtcagagagggcttaacaatgactacttgcgctcgacttcctgcatctcgaaggtctcgatgatgtcgccgagttcaatgtcgttgaaggtgccgaggttgataccagcctcgtagccttccttgacggactgaacgtcgtccttgaagcgacgcagcgaggagatctcgaggtcgttgaccgtggccacgccgttgcgcaggatacggcacttcgtaccacgcttgacctcgccgtcctgcaccatgacgccggcgatgttgccgaacttggaggagcggaagatctcgcggatctcggagtgagaggtgacgacctcttcgtattccggcttgagcatgcccttgagggatgcctcgatgtcttcgatcgcacggtagatgaccgagtagtacttgatctccacgccctcgcgctcggcgaggtccgcgacctgacggttcggacgcacgttgaagccgatgatgacggcc

SEQ ID NO: 464 - DNA, 10067 bp, Unknown
  R48_24m  MAG No. k141_29243
caaagcccccggtgccctgaacgaaagagagggaggtagacatgggagcgattgattccggtaacaccgcatggatcctgacatccgcgtccttggttttcctcatgacgcctggtgtggcgttcttctacggcggtatggttcgtgccaaggccgttctgaacatgctgatgcttgaggcggccgcgctgtcggtcaccatgattatttggactttgtggggttggtccatcgcatacgccggttccgacatcggcggtattttcggcgacccggccagcggcttcctgctcaaggattccatggtcgcgcaggacggcgtgttcaccgccaccggtctgaacggcaacaactacccggtttccgtggacgttgccttccaggtcgctttcgcgatgattaccgtcggcctgatctgcggcgccatcgccgagcgtgtgaagtacagcacctggatgatcttcgtggcgctgtgggttaccttcgactacgctcctatggcccacatggtctggaacggtggtctgctgtctgctgacggcgccatctccaaggccatcggcgcggccgcccacgatttcgcaggtggtaccgtggtgcacatcaacgccgcagtcgccgccctgattatcgtgctcatcatcggcaagcgtaagggcttcggcacgcagccgttccgcccgcacaacgtgccgttcgtgatgctcggcgccttcctgctgtggttcggctggttcggcttcaacgctggttccgccttcgctgccaacggcaccgctggctacgcttgggtctccacttccgccgccactgccgctgccatgctctcctggggcttcaccgagaagattcgctccggccactacaccgctatgggtgccgcctcgggtatggtcgccggcctggttgccatcaccccggccgccgatgtggtttccccgctgtgggccatcgtgatgggcgccatcgctggtgttctgacctgcctggcctgcggtctcaagttcaagttcggttacgatgactccctcgacgtcgtcggcgtgcatggcgttggtggtttcaccggcactgtcctcatcggcttcttcggtgaaggcactggtctgctggctggtggcgactggaagcagctcgtcgttcagctggtcatcgctctcgtcgccatcctctactccgcggtgatcaccgcgatcatcgccttcgccctggagaagaccatcggttggcgcgtcaccgaagctcaggaagtcggcggcatcgatcttgccgaccagggcgaacgtgcttacgattttgctggtactgccagctctgttctcaaggaggtgaggtgagatgaagctcatcaccgctattatccagccccataagctcgacgacgtcaaggaggccctcgcggccgccggagtgcacggtctgaccgtgtccgaggccaacggctacggccgtcagcgcggccacaccgaggtctaccgtggcgctgagtacaccgtggacctgattccgaagattcgcgttgaagtgctgtccgatgacgcggatgccgagacgctggtcggtgtgatcatcaagtccgccggcaccggcaccatcggtgacggcaaggtgtgggtcgctccgctggactccgtggcccgcgtgcgtaccggtgagatcggttccgccgcgatctgataacacagacgtccatgcctagcaggggatggactgcatgggaaaggtccccgcacgccgcgaattgacgccgtgcggggacctttttggcaatgaaagatgaagcaatgacttcagcagtagatggcttgaaacaacgattcatggatatgagccagccggatgacgatggtgtctaccggaatggtgcgaccaagcgtaaagcccgcacggaactggccatgcaatgcctcacggagctgtggaatgcggcctgcaaggatgtctctttccccgtgcccgactccggcatcggcttcgccgcggtaggctcgctggcacgtggtcaactgggccccagctccgacctcgacttggtcatcatctacgagcctcgcacgttgaacgaccagcagctcaacgagttggccaacaaactctggtacccgctatgggacagcggtctggacctcgaccactccatccgcacgcgcgcccaatgcgaggaagtcaccgaccatgaccttcccgccgccatgggctggctggacgtgaagcccatcgccggcgacactgctctgattaccaccaccgccacatccatcctcgaacgctggcgcaaggccgcccgcaagcgcctgcccgaactgctcgactccgccaaagcccgactcgacgaattcggccgcctccaatacgtcaatcagcccgacatcaaggagacccgtgggggtttgcgcgattcggtgctcgtctccgcgctcgccgtctcatggctggccgaccgcccgcacggcatctacgacgaagccgtggaacgtctgctcgacgtacgcgactgcatccatctggtggccggcaaggataccaacctgatgctgacgccctatcaggccaaagtggctgccatgcttggccttgccgatccgacttggcccgaaaacgagcgtgccgcctactcgatcgacgatttgcagacgctgcttgcccgtatcggccggcgcatctccttctcgcttgattccaccgcatcccgcgctggacattcgctgacccacgaaaagccgcgattcgcgttcttccagatgttctctcagcgctctggcggcaagcgtgaagccccgcaattcgacgtggtggctcccggcgtggccaagcacgaaggcgaattggtgttggcacccggtgccgagcctgccaaggatgccaagctggcgttgcgtatggccgtggcggccggcgaattcggtttgcccatcaatccgtctaccttggttaatctgaagcactgcccgattcacgacaaccagtgggatgacgaatcgcgcgagctgtttattcgtctgcttgcatgcgggccgaatcttatggaagtgtgggagagcatcgacttcgtggacattccgggtcgatggatgccggaatggctcggcgtccgcaaccgtccgtccgcctcggccgcccaccggtacaccatcgatcggcatatggtggaggtcacgtcgcgtctgggtcgtgagacaccgtccgggggacggtatgatgacgatcatttcaaggcgttgctgttggccggtattacccatgacatcggcaagcgcgcgttcgtggccgatcacgccgccgagggtgcccgccatgtgccggtgattctcaagcgtatgggctacgcgccggacatcgtcgactgggccaccgtgctggtgcgtgagcatttgaccctatccgaatttgccacgggtaaggacccctatgatccggccgtggcggaggagttggccgaccgcttgcaccacgacaagatgctgttggatatgctgttcgacctgacccgggccgacggctcctcgctcggtgccaccgccggtgagaccatcaccaagcaatacggctggtccaagtggcgcgaacaaatcgtgcgcggcatgtattccgccgctcgcgccgcgatgtaaacggaatcgcccagcacttcgcgcggccgatacctacttcatccatgcgtccgagcgcacgcgcagcccgttggacaggccgcgcccgcccatgagcaccacgttgaacgcggcccagagcacggcggtacgcatcaggtcgctcgtcagcgccggcgtcaccatattggccagtatgagtatgagcgtcacatacaccacggcggtcagcgtgcaggtgcctgccagatagcggtagtcgcgcgcgccgataagaatgccgtcgattgccatcatccagccttgcagtgggaagaagatgcccatcgtcaccatgccaacggcaatcaacgtctgaatatttggcgtaggggagaagaagtgcccggcgaacaggccgactaccgcaaaagccgtgccgattaccgcgccggtgaccagccccgcacgcccggtcgcccgcgtcaaccgccgcgcctgctgcacgctgccagcgcccagcgttgtggccaccagcgtctggccggcgatgcccacggaatccagcatgttcatcgcaaaattccaagaggagttcacggcctgaaacccggccaacacggcagtacccatgcgcgcggcacaggcgaccgtagccaccatggccgcacgaatcgccaatgtacgaatgaacaatggcagtccgtcgcccccggctgccgcaataccggccaaacgaggccgcagactcgcaccgtccgcccgggaccacagaatggcggggattaccaggaacagccccatgaaccactgagctatcagcgtcgccactccggagccggcaatgccccaattcagcacaataacgaacaacacatcaagcgccgtgttcaccaccgcgccgcccaccgcagcgatcagcgtgatacgaaccttctgcaatcctcggaaaatgccgttcgccgcatataccatcagcatgcctggcgcacccagcacgattgcgcgcgtataggtcacggcttgttccaatacttcgccctgaccgcccagtgcccggcataatggctcggcagccgcgaacaatcccaatcccagtacggtgccgatgctcaaggccagccacaggccgtcaatgcctgcctgcagtccctcgcgacgacgacccgctcccagcagatgcgccacctgcgcagtggtcgagtaggccaggaatatgcatagtccgactgccgtgaggatgatggtggagccgattgacaggccggccaaagcggcatcgccaatgtgaccgacgatggcggtgtcaataaggataaaagtcggttctgcgatgagctgcccaaaagtcggtagcgccaacgcaatgatttggcgatgaatgctggtggagttgctatgcacgctcacacgcatatcatgcttagctacgttgcgcaagcacctagtgcagccgtacaaagttatcctcagcttgtccaccaagttatccccaatatgtggataaatgagtggattatccccagacttatccccaaaatgtggataactattttttctatccacatttgacgcttcagcgtgtcgccgcgctgaccgcaaggtgaaccaacgatgaaattggtgcgcgatgattcggcacgacttgcactttcacgcgttcattaggtcgattgtgcattcattaggtcggtggactttgagagatattgatcgagcgcctcagaatgccgccattccaagcgcatggtttgtggtgttaccaagcacagtgacctaatgagtgaggaatcgacctaatgaacgtagtcgtgcgatatcttccgctcgccacgccacctcctatacttgagggctatggcagaaggaagtgaacactcgtatcagaatgggttcggcagtggctcggatcgtggcgatcgtggcgaccgcgcgggccggggcggcgcgcaggcggcggcagctggcgacccgattttcgaccgcgtgcccccgcacgatgacgacgcggaaatggccgtgctcggcggcatgctgatgagtaaggatgccatcggcgaagtttcgcagaccattgacgtcaccgatttctaccagcccaagcatcagacgatctataacgcgatcatcgatctgttttccgccagtcagccggtggacgtggtgctcgtggccaaccagctgttggcggatggcaacctcgacaaggtcggcggcgcggactatctgcacagcctcgtcgcatccgtaccgaccgccgccaatgccatgtactacgcggagatcgtccatcagcgggccattttgcgcaatgtgatcgccgccggcaccaaaatcgcccagctcggttattccgccgagggatcgcaggctgaggatgtggttaacctcgcccagtccgagatctacgagatgtcgatgggcaaggtgcgtcaggactatgccgccatcggcccggtggtccacgacgcgctcgaccagctggacaaactgcagcagggtctcgtcaacaagggcgtgccgaccggattccgcgacatcgacgacgtgacccagggcctgcagcccggacagatggtcgtcgtcgcagggcgtccggccatgggtaagtccaccctcggcatcgacttcgcccgcgccgccgcgttgcaccacaacatgacttccgtggtcttcagcttggagatgagcaaggtggagctcgctcagcgtattatctccgccgaaaccaatattccgatggccgccctgcgccgcgccgacgacatcacccccgaacgctggaacaccctgaaccagttctggaccaagatgcagaatgcgccactgttcattgacgacagcccgaacatgagcctcatggagatccgtgcgaaatgacgtcgtctgaagcagaccaacgatctgaaactcgtagtcatcgactacctgcagctgatgacctcgggcaaggccgtggaatcccgtcagcaagaggtgtccgaattctcccgtgccctgaagctcttggccaaggaactcgaagtgccggtcgtggccctttcccagctgaaccgtggcccggaaatgcgtaacgacaagaagccgcagctctccgacctgcgtgaatccggctcaatcgaacaggacgccgacgtggtgttcctggtccaccgccctgacttctacgacaaggaagaccgccccggcgaggccgatatcatcatggccaagcaccgtaacggcccgaccgaaaccttccacctcgccttcctcggtgccacgtccaaattcaaggacatgccgcaggactacaacagcaatcagggggtgtgatgatgacaagcaacgtttcacgcgatgtttcgcaagaccaatcgtccgtggtgcagacccgcaaaccgtggtatgcgttcgccaccgtggccgcaggccgcttcgtgcggtttgcatcccgcgtcaccaaacatggcggttcggctttgcccggcaaagtcgtagaaaagattgaccccggcttcctgacccgtacgctcgggcagttgccgcttggcgtggtattggtgtccggcacgaacggcaagaccaccaccacccgcatggtcgcctcgatgctctccgatctgggattgaaggtgttcaccaatccgaccggctcgaacttcgtgcgcggcgtggtctccgcactgctcaccgaagtcactttcggcggcaaattggacgcggacatcgccgtactcgagctcgatgaggcgtacgccgtccacttcgtcaagcaggtcaagccccgttatgcgttgctgctgaacgtgatgcgcgatcagcttgaccgattcggtgaaatcgacaccacggccaaactgctcagccatgtggctgcggcgactaccggcactgtggtactgaaccgcgaggacccgcgtatcgccgcgctcgccgcgaaggccccggctggcaccacagtgcgatacttcggcctcgccgacgatttgcgccactatttcccgtccgatgacgacatggccacgaccgtgtcggtggaaggtatggccgggccgctcccttcagtcagtactcccctcagtccgcttcgcggacagctcccctcggagaggggagcttccgcaggcacggcagaactccccgccgacgtgacacttaccgccgtgggcgaccacaaggccaccttccagatggacagccaggactacgccaccgacgtcaaacttgaaggcgtctacaacctgtacaacgcggccgccgcgctcgccgtggtacgtgcggtgatgcaagacaatgccgccgcatccaaggccactgccgcagccaacgcctgcgccgtgtccgccgacgagctcatcgccgccgtttcccgcgtcacgccggctttcggccgtggcgaggtcatcgacgtcaacggttccccggtcgaactgctgctggtcaagaacccgatgggcttccgcctctcgctcgccagcttcgacccggccaacgcggacaccatgatcgccatcaacgacgaatatgccgacggccgcgacatgagctggctatgggacgtggacttcacctctttgcgcgcgtccggtgtcgccatggtctccggcgtgcgcgcctgggacatggcattgcgcttggggtatgaccaagtgccagtcgccgatacgaacaccgacctcgaacaggcggtcatcgcattcgtcaacgccaatcccggcacacgcaagcacatctactgcacctacaccgccatgctcaaaacccgcgccgtactgggccgcatcaccgaagtacgggatgcgggcgtgggcaagtaaccaccctctagcgcccgcgcgccacctcccgcctgcgggaggacatggtgaggaataagacttccccttagcgggaagacatcgacaaggagaacgcgacatggccagaacaattgatgtggtgtccctgtatcccaaagacatgaacatctacggcgattccggcaacgtgctgactatccgccgccgtctggaactgtacggttacgaaccggtcgttcaccagtacaatcaaggcgacgattggcccgaccaggtggaccttattctgggaggcggcggccaagacaccggccagaagaaaatcatcgacgacttctaccatcgcgccgacctgctgcgttcgcttgccgcagacggtacaccgatgctgatgatctgcggcctgtaccagctgttcggcgagtactttgaaaccgtggacggcacccgtctggatggcatcggcgttatcggtgcttataccgtgggccagaacgtgcgtatgatcggcaatcttgttgagcattccgaccagttcggcgatgtgattggctacgagaaccactccggccagaccttcctgcgcgaaggcgttcagccactcggcaccgtcgatcaggacggccgaggcaacaatggcgaagaccataccgagggcgcgcgcgtgcacaacgtgatcggcacctacatgcacggctcgttgctgcctaaaaaccccgccatcagcgatttccttatcgaaaccgccgtgactcgtcgttacggtacgttcgatacgtccgatcagacccccgaacaagccaaggagctcgcccggatcgatcaagtagccaccaacgcgcgcaaggctgccgccgaacgtcctcggtgaattctcggtgagtcctcggtaagtaccaatcagcgaaaaatcagtcgaaatcagtctgagggtctagtacattgccctgttgtttgcgctaggcttggtggtacgagacatggcaccaggccatgtcggacctcgaaggaggggtatcatggctgattttgatcttctgggtgatggcctgcgcaaggtcctgctggcgggcatcggagcccttgccaccggatacgagaagagcagcgagctcgtcgacgaactcgtcaagaagggtgagattacggtcgagcagggcaaggcgctgaacaccgagctcaagcgcaaggtgagcgagacggtggatgacgccaagaaggccgccgccgaagccggcgacaaagctgctgccgcagccgacaccagtgccgccgacaagcccgctgacgagggcaaggccgagtgaccaagctcacacgcactacgccggaatcagagtcgaccccgctttccagcagggtcgaccctattctgacgcctgcgaaagccgaacgtgaggcggcggcgaaccggtccgtcgacacgtcggacacgctcaagcagaccgttaccaaggcgactccgagcgtatccgacgaaacgctggcactgttcggacgcaggaacgatttcgccacgcgctaccatctgacgcgccgtggcaagatcaaacgactggggcagatcaccagaatcgtcgagcaattcgacgtgctgcacggcctgactccggtcaagatgcgcctcatgttcgaggcgctcggccccacgttcgtcaaagtgggccagattctgtcgatgcgctccgagattctgccgcaaagcttctgcgacgaa

SEQ ID NO: 465 - DNA, 13839 bp, Unknown
  R48_24m  MAG No. k141_29308
gccatgattcagaccctctaatccactggcaattgtgccttgcacttccaaaaacgtcagtcgtccggcgtgtcgcggccaagcctggcggcgacgtcgcgcagccggtagaccggctgccccttgtcgttacgcccgctcgggtcaatcaggccacggtgcttccacgagtagaccgtatcgacactgacacgatagcccgcgccgcgcaatagccgtgcgcactcccccgccgtaaacgccttgccgctgcggatgctgcgctccaaaaggtcaaggcgtacagcgctcgccgtctgctcgcgtccgcaggtggggcaggtgacgatggtggcgtttgcgctggcggtgatggtgagcccgcaggtcaggcattggccgatcggcgtcacgggctcgggcgggtcgatgatcccgagcgtcagcggtttgagccggtggaactgcgcgacatacatgccgacgtccggcagctgcgcgagccgcggatgcatggcggcgtcggtgaggcatccgatgatgtccgggcacaggtcgcgcttccaatacaggatgtcgacgccctgcaggcgccgccacagtccctgggcgatcgaggcgagcaggtcgatgtggtcgagcacgtccaacctcagcggggtcggcgcgaccggtgtgatgatcctggttggctggtggcctccgggatgcagggtcgcatccaggctggcctccaatgcgtggacccatggcacgtactggtcgagcaggagcgcgaacgacagttcgcacgcggggcacagcgtgtacccgggttcgaccggccgatcgcaggtttgacatgtggcgactgacattcccaactccttcgtctatcatgtgctccgatgccataggagccctggtgttcgaaggaatgccggggtttccctctattcgcccattttctcattctctgcggccttcagccgtgcgcgacgcctcgcatgacacagacgcgacgcctcacgattccgagcttccctcgcctcacgccgatccgcctcgatgtccgattcctccacgatgcgctcgccggcacgggcacgtcgcaccagttccgccagctccggatcgttctgccagtcgatgctcatgccggcatcctgtccgagaacaatccattgtcatcgttgttgatggcctgctcgacctggatggcgagcgcgagcgcgtcgtcccatccacgtttgtagccgagcgtgtacgcctcggcgggtatcttgctgacactgccttcggcctgcagcgagcttaacgcctttgcggtgatgtcgatgctcatatgagcgtcctttccctgtcggccgcccacggatccttgctgagcgtggacgggtctcgacgtttattcgaacatcggttcgatgaactccggcccgtatttcggcttcgggacggtctcggccagttccgggtgcaggatgatgctccgacactcctcctcgccgatcttcagcaatctggagatctcgcccacctcgtagccgtccttatgccatttcaggatcatctcggccttcgccttgctgaccattcatcttcctttccttcaatcgttcccggtatctccgagaggattcacggttcttctccggattccgcttctgccacgccctcatgtactcggcacgctgatcgcgatgcgactcccgatatctccgatccgactccctcacccgatccgggtgcctgagccgatacctgcgacgccgttccctggcacgctccatgtcaagctcacgctgctcggccgccagccgacgactccgcgccgaccgctcccacggatccaatgcctcaacgccgggagtcctgcaatcggcgatgaatccagaccagtcggctagcgcgatgctgttttcctcggtcataggttgtcggcgccgtccacatgcgaccagtcgcagtcgatgccggactcgtacacgacgacgcagttgacgcggcgcgtgtcccggagcgtggcctggcagtcgtagacggtgtatcccgctgccaaggatccaagattgatgcaatcggccttggcgctgccgtcatagtcccggactgcggtgccgcaggcggcgagcgccagcgtgatgattgcggtggtggcgagtgcgagtggttttctcatttctggcgtcctttctggagtgtgtggcttgggcagaatgcggtgccgtcataacgtgtcgtccatccgttctgttcagcgtcgatgagcgcctgcgagcgagacgcggccgcgacggcgatttgattggcgcagcgaggacggtcacacgagattgcccatatggtcgcgccgctggtcacgctcatttcgtatccccttccgcgagcgcggtgatcttatggaggatggtcttgtattcctggatgtcgcctttgaggcaggtcgtgaccctgtggtcggtggatggctcgaagtaggctccgagcgtgaccggactcatcaggaatcggagcgtggtcaggtcgagcttccggtaatggagcatgtcgagatggagctcgagcctgctgcggatccatttgatgtcgaagttcacgttcgtgcccgccggatgcagggtgtactttcccgcccaatcggtcagcaggctgttgatctgcttggcggccgtgtatacgccgaccgcgtcgtcgccgaacgtttcgccgatgagcccgttgcgcgtgtgcacgtcgaccgcccacgcggtgtccggacacaggcggatggcgtcgtgctcgatgacccaggtacggatcagcctgtcatccacgtcggccggcgtctccccgtccatgcccgtgacggccatgccgacctccagcagctggccgcgggtcggatccaacgccgttgtctccacatccagccacagcagcatgtccggcttattgcttgtcatatcagtgtcttcctttcgttggcttcgatgatttccacgtgcccctggtcgtccaggagcacccacccatacaaggcgtggagcatcggcgtcttcttcgggttttcggtggagcggagcagccacccgtactcgcgcgcctcctccggatgggcgtgcacccacccatgacagccggtcgtgccggtgccgcacaggtcaatgagattcgccggtgaatgcacctccgcccggctcgcctgcgagcgccgtttccggtgatgcctggacgccggattcccgatcaggtatttgccgcagcgcacgcagcaggattcgtcgcgcaggtccacgagctggcaggtcaatcggcttggctggctcatagcgcctcctcgatgcgatgcgtgggacagtaggtcctgccgcgctgtacgcccttgtcgccgatctgccagccgaagtcctccaccaggacggcgagcgcatgctcgtagccgcccacgggttcgccggtgtctgggtcgcggatgacggtctgatcgttgtcgcagtcgtaggcatggcagtggaattcgtagcggcggtagttctcgtccgtggagcatgggcagtcgcagtccgtgtcgtcgcagcaggagcagtccaccacgatccgtggcttgcccgcatgcaggagcggcgtgccctggaacacctgacggcccaccctcgcgtccagaccggctgcgcgcaggatccgctcgatgcggccgatgttcacgccgccgtccttgtcggcttggacggtcatcgtgatcgtgtactcgctcatgccgcctcccaccattcgtggtcgcgtagttcgagcaggtcgtccacgatcgcctcaggatcgtcgccgcgtttgagccgttgggcgacgcgtccggcggtgtcgtcgtcgtggctgatgccgaccctgtcgaggatcgcctgggtgtgcctgcatgcccacgtgtgctggcaggtcttcactttcggggtctccctgccgccgagcccgagctcggccccgcgtttgagccacaggtcgaacgctgcgtcgatggtcgcggggatcgcagcgttgacgagcagacggtcccggaacttgcttgcctcgtagtccacgtcgagcttgagatcgtaggcgaggtcgtggtggtcgaggttcggcttccagtcggcgagcgcctgggtgcggtctgtgggttggttttgggtctcgcgcgcgtgcgcgtactctctcggtttatatggttcttccttatattgggtttgtgtgcaatcatgttgcacccctgttgcaccgctgttgcaccccaaggagtcttttcggggtgcagtcacgttgcacccctgttcctcggtttggtgtgcaatggttgcacccctgtgggccggttccgggtcttggggtgcaatggttgcacccctgtcctcgtccatgaccaggtcatacaccacgggacgtttgttgccaggcaggtgcttgaccagccgctggtctccccttcggatgatgcccttgtcctgcaggtgccgcaacgcgtacctcacctgcctaaggctcaaccggctcagcttcgagatcttcgccgcgccaagccacacgccgcacccctcggtgtccgcatgatcggccatcaccagcaggatgcggaactccgactgctccagctcgtccgggtcgatgtcatataagacccagttcatcgcctgcaggctcatgattcccctccgttcaaaagttcgtcggcgagcgcgtcgcctttgtcggtgatgcggtatccgtcgttcacgaccggttccacgaggccgagtcggtggagggcgtggaaggttcgtgcctggttgccgtccatcgggacggccagtctgacgcgtgcggtttccagcagcatgtactgcatggtttcggtgagtttcatgcttccacccgcttccatagggcgatggacgccagggtgatctcctggcgtgcctgtctgatgagggtgatcgccgtggtgtagcgttcgagcacgtcctccggcgctccgtggtcgcgcatttggttgacgtcgcccagcaggcgttcgagcgtgccggcgacctggtcgcaacggcccgacgagaccgcgcacctcaacctcaacgtctcatgatcacgactcatcgacgccatgattgacctcctcttctaaagggatgatgtggaactcgaaccgccaaacgcccttgacgccggtcggttctggatgcagttggaagatggtgcgacggatatggtccgaatcgtcatcgggccacagtcccgcgtcggtcatcccgtcgatcaggtgcttgacggtgggccataggttcggcgggtcagcgcgggacacgcgcttcgggtaatgctccatgacgagcaggtccaccagctcctcacggtgcaggatgttcaagtgcagcaggttccgcgtgcacgcgctgccgatacggcggatcatgtccgccttcctcgcgttcgcgtacacgtcgccctgcttgccgttcgacttcagcaggatgttcttgccgacggggatgatgaggatctgctcgcccatctcccggcagaaatcaacgtccagatgcgaatcaagattcatgaccataggagcatcaccagcaccctgtagcggccatccgagtccaggaacgtggaatgggcgcgccgataccggaacgccatggggtcgcatcgccaaccgtccacctcgttgtactggaagcgctccaggtcctcgcgcgccgcccgttccgacgagtacgcgatcggccatgcatgccacttgccggggtgcgcgtggcaccacaggcacgtctcgctgatcgtcctattgacgctgtcgataagaccgcccatggtctcctccttagaattccggctcatcgtccgggccgacggaagacgcgtcagcgtcggcggcccacgggtcgtgaggcccgccgatggccggctccaccggactcgactggaatgcctcctgccaggcggagccaccgaacgtggcgccacccgagtacccgttttggccgccctcattgccctggaagccgcgcgcggacggctgcttggccacggccgccgtcgcgtacctcaggctcgggccgatctcatcgaccgcgagcttcacgatcgtgcggttcgtcccgtcgttcgcgaaggtctcctgtgagagcacgccgtgggcgatgacgcgcatgcccttggccaggctacggctgatgtgttcggcgagctcgcgccacgcggtgcagcgcatgaacaacgcctggccgtcctcccactgtcccgactgacggttgaacgtccgcggggtggcggcgatcgtgaaattgcacacggacgcgccggtggaaaccgaacgcagttcggggtcggcggtcagattgccgacgatcgtcaactccgtctcaccggccatcggtcagcaccttcccgttgcgctccacgcaggaccggcaggctgccgcattgctgaccacgcccgcggccatgtcgaccagcgccggctgatgagtcagataaccgagcctgatgatgccgacagcggcgacgtacgcctgatcgcagagcttcaccccgcgatccacaaattcgtcccgcgtcaggttgcccagatcgtcacacatctccgtttcggacgccatggacggttcgggcttctccgccttcggctgctccacggtcggcgtcgcggacggaaccgtaccggatttgacgctgcggccgcgacgcttcttcggctcgggccattgcggccacgagccggtctccttcatcaccgcctcgcgcatcgtcagcgacacatccgtcgaaagcagttgggtgaccacggtcaggaccgtgtcgccgtaatccttctgcaccctggacaacgccttcgcccggtcatccatggacaggtcacgatacggcgtatccagacgtttcaggtcatcgtcggtcacaatgacctccttccagttcttgtttaaagccatacgggctcctttcgggccggcaccgggagtcgaacccggcacaccggaacggaatccgccacacaccatttcgacaacgattccgctccggccgccgtacccccttatggggcgccggccaaacgcgcggacgccacgacggctggggacacatcctgacgacgtccgcgcgatcttctgttattggcaccggtttgtacgtgttttccttcacgccgcccgacgaggaaagcagaaaaacgccgggcaagactcctactcgccgtcctcgctgtcggcgagcgacagcagcgtcacgcccagcagcccacccgcgatgaaggcgaggaagtgcaggacgctgaacgcgccgtccgccaacccggcgacccaccagaccagcccccagcccgcgatcaggatgaacagggcgccggcgatcaggcagaacgcgagcttctgctgccgctgcctcaccgtcaacggggacggtgtcttgcgatgcctcatcgcctattcctccatgctcttgatccaccgttccatcgccgctcggctgacccggcgcctgccgggcttgccgtcacggttcggcgcgcggaaactgtccagatcgccatcgtctatggcacggcgcacgccgcgcacgtcgagcgaatacacctgtgcagcctgttccgggctccatgccaggcgctcacccaacgggacacgactcgtatcagtggctcgcgccacaccggcaaccgccatgacgctcccctcctctcgtatccgatgaaggaatacgccgggcggcgttaggagaaccgcccggcccctcctaaactggatggctacaaggcccgcgtggtccagacgcggaccggccaggttaggagaagcttttatggatggatcggtaatcgcggcatgggttggcgccgcggcatcactgatcggggccgggctcaccgtatggtggccctggcacaacagaccgcaagcagactggacactgctgaagcactcgacgcatccggactttccgatctccgcaacggtccccggccttaccggctggctggaacgtcgggaagagaaagaacccgacctcatctgctccgtatacaattcgggggacggcgacgcatacgacgtgcaggtcgagggaatcgaatgcgaggcatacttcctcaccgtcagcgaggtcgccggtgacaccgagttcatgacgccaagcaagatcgcccaattcaaggcatccgaccgcttgtacatgatcgcccacttcaacgaggatgcccggatcatctcaatccaccttcactggacacagcagccgacccgtatgcagcgtcgagtgttccgtccgttcgccctgaagggcgatctaccggagcagccacgtcacccgatccgtgaaccgaaacgacatcatccgtcgatgctgcggtatcgcttcgagcattcccgtcttggattatggctatatagcaagttccctcgatgggcttggcgtacgctggtccctcggccggcatcccccaccaagcaggaagaacccagtcaagaatccccgcaccagtgaacgacatcagcgccgcattaacccacacgacgacggcgcccacgatgctgatgatcgccggaacccactccatcactcccctccttcccggaacgttttgagtgcgagaatggtgcacgccacgcaaagaagggaggtgagagcatggaacgcgatccaatagattccgcgaacgacgccaagacctacgccagagccggcgacacggcccgggcgatcgcttcgcttgccgatgccgtgcagggcatcgcggaataccagcggtacatcaggaacgaccagatgaagatcaagcggaggcttggcatcgactgaccgttcgccgtccgcgcgtatggcctccagctccccgcggacggcgtcccttaccagaccgtgcagttccgggttccgccggatgaactcctcggtcgagactgggttcgtcccacggtccacgagaccacgcccgtccaattcctcgccgacgatgcgatgcacatcccgacggatcagatcgcacaacccctgatactcccgctcgatccgctccgcggacttcggaacggcaggaggaacgttaaccgttctgacatcagccatctcactcccctccttccgcgagcgcctcagacttgaactgcttgccgtcgacggactgctcgacctcggagaggactccaatgaagttcaagcccagcgcgtcgcaaatcgatatcacttccggaatcgtcaagaaggatttctccgggtgatccaatctccggcagaacgtcgtccatggaatgcctgacgcctgggcaacctgctgctttgttttaccggattgctcaatggcgcgagaaatcatttgagccaacgtcatcgaataggtcagagtatccattcggaacactctactatccgtttggatagtatcaagcacgatacgcccatacggatattgcagcatattcattcggatagtaatttatccatatggatatcaatgaggcaacggccaaagctctccaagcggcaagagctgtcagcggcctgacatttgaagaattgtccgctaaatccggcgttccggtccaaacgatataccgcatttttggagcgaagcgcgacatcaagcttccccaactctatgctctagcccaagcacttgggatcacagtcgtagagcttatggaagatgcggagcgcatcagacagcgcgcccgtcgcgccgatgagcagcttgccgatgatatcgcgtcgaatcctgatttgtacgatctggccgcgaatcaggacgagaacaaggaacttgaggcggaaacgccaagggattagacaatcggcagcgtgaggggcagacgatggggttgttatcgagcattctcaaattgtttggaatcggaatcaccggcaagcgtgaaaccggtcatccacaacgagtaaacgcttcgatgccgtctgcctcgtatccgccgtacagggcggaacgagacgcacggtacttcgcgggtgcgaaagctaagttggacaggtttcgtgttcaggcgtcggttgccgatcagatggtgctcgatacggaaaccaccgggaattcaaatgatgcgcagattatcgagatcggcgcgattctcatcagggacaatctccctatcgcggaatacgagcagttgattcgtccgtatgacgggctcaggttatcctccacgctgctgtccggtataaccgaggatgaacttctggatcagccggatgcggaattcatcatccccggttttcttgaggccattcgatcgttgaacgtcatcggtcataacgtcgccttcgacatcaacatgttggccatggaatcacgaagatacgggtgcccgccgccggatgtctcgctcacggacacgcttgtgctggcacgaaggatgtttccgaacgcgccgtccctgtcattgcaggagctcatacgtcttcttggcatcgatgagacggaagaccaccgtgcgttgtccgacgcccggcaaacatgagcatgctggcaacggctgaactccatgagcgctccggtcatactgactcgcgaacagcaggaggagtcggcgaatcgggacctcagggaaaaacggcggaagaatatgatcttcgccaaaagcatatacctcgatggcatggacttggaaccggtcaacgaacgcccctgcgatgtggaggtcaggacgttggaccaaggggtcgaggtctccggcgatgagaaccatcaggacagtctaagaccttacggatacgatgcttgggtctgggtgtatgtcgtcgagggaaagataccgaaggggaaatacgaaggttatcccacgtattgggtgtatctggacggcgaggaaatagggtacatcagcaaatatcagatggaacgccattgcggtcaggtgcccggtgatggcgcttcgatgattgcccatatacccgatcgcgcgaaggaccgcgaagtcgatcgtctgcaattgaggttgcacatgcccttcgagcatgaaccagtcgacctaagttcgcaggtcgtaaggagggagaagcccaagagcgtcaaacgtccgaaacctcaaaaccgccagcatgctaagtccacgggcgtggattccggttttctcaatccgaagccgcataagcgcacgctcggccatggaggtggatgggtggagatcgactcagtggatgggatttcggatgtgctttccgagtttcccgatgggtcccatgtgtgggtcgttgtcaggaggaactgcaccgtcagacttggtggtgtcttgttggggacgtgcgggctattgtcgtcgattgatgattgcgatggcgatgggcttgtagctgccgccgttatcgagcgtaacaacaacgaaaccacagtgaggattgaaatgcatgaagaaaataatgaacaatgcatcagccggcgtatcgccgagaaacgggaacaggtgcaaggtgaatcttcggtacgggaggtgtgattggagggatttctttctgaggcgttgctgttgggggtccgcgtcgaggagcggcgtctgccaagcggactgtgcggcttctactacgaacccgccaggctgatcgtattggatgagtcgatgccggacttccagcgacggggcacgctctgccacgagctcgtccacgcccggtaccacgacaatggctgtggaaccccgtatggcgtcaaggccgaacgtcgggcacgcaggcagaccgcgctgcgcctcatcgacccggtcgagtacgcgagcgccgaagcgttgtgcgagggtgacgcgtaccgtatcgcgtgcgagctggacgtcacgctgcaggtcgtcagggattatcaggacatgctgcacgacacggcacgcacgtgaaaacggttcggtcctgcaaccagcatgggtgcggagccaattacacgtttccaccgcaagcagaaagttccggcatccacaaataagacacaccgaaccaatcactgcaacttcgcggttttgcagtaaaacttgtatcgtgatatcctatgcgcctttgacttttacaagtgcaaaagatatcatataagtatggtgagcctagataggcatatctaggattgctgtccgctcggggatccctttcggatccccgaagctaattccgggaacaggtagtaggacttcctttccatgagatgagatatccccgaggttgccgtcatcgacggcaaaataatctggaccgtcttcaacacctcacggtccccgcgattctcaagatggctccggtcgattctagcagccctgttaatcatgtacaaggcagtgtcaatcgcctgaagaccagcgaaatgacgagagtcctcccatcggaacggaaacctgatgtgagccaaatcggacgccacatatccctccgtgaagccacgccacttataccgacgcatcataccttcatgcaccgtaggatcgctcaccttgtcggcaatgacttcgatctcctcgataccgcagctctccgcataataattgacacgttccaggcaatattgcaaggccaccgtgtgtggctcgtgcgcatatcgcccataacgggttttaagctgacgctcctgtatgccacggacgcatatcagagccccgctctcggcgatcaccctcattaattgccgatatacgccaatcgacgcacggtgctttcccttcattacctcccaatcatcctcatactggaacatacagcggccatggaattcggcgtcagctggaacaccgaaccttgcactggccgacgcgcgcacctcgtcgagtccatgttgaattcgctccaactgatcgtcatcgaccagcaaacagccgatatagtacacgccgtatccgaaacgttccggctccacggaatcatggggagattcagattcatcgataaacgcgtaatacatacaagcaatcctacctttttgcaaaacacccaactggataacctgatgatttattgtattgcctgtcctcatcgtcgcgcaggtcgggtatcgcggcgaccatcagccgccccaacgatgcggcgtccctgtgggtgtagtgcatggtcatctgcaggctgacgtggcccatgatgctgatgcgcgcgtcctcgggcatgccggcgcgcgcggtcatcgacgccatccagtgccgggcggagtggatccgcacctgcggcaggcccgcggcctccaacgccttcagccaatggtgtcgttccgtggcctcgcggaccggatggcccagctggttcgtgaacacgagctcacgcgggccgacatgcaggcgtcggatgcgcacccacagccggtcccacaatccctgcgggatgggcacgaaccgcgtggcggcgtgatggcggatcgtacgaaccgtcggaccgtcatggtggcgcttgacgcgctttccgccgtgacggtgctcgtatgcgtggcgatcttttcggccgccggtttcaatctggcggcgatagccgtgatgcaggtggtgctcgccgtgcttgacgcgatggagacgcctacggtgcaggcggcgctgccgcagatgttccgctcccatggcgaggatgtgatgcgtcgcgcgatggccgtggtgaacgtagtgaaccagacgagcacgctcgttcccgccgtgctcggcggcgtgctgtacgcggcggttggtgcgatgcccatgatgggaatcacgatcgtggggttcggtgcggccgccgtcgtggagtgtttcatccggctcggcgctcccgaccgcggcgacgccggccgcgtcaccgcggtcgacgacctgcgcgcggccggacgtttcctcacccgcgaacatcctcatgtgctgcatctggtgttgatctgcgccgcgctcaacttcctggtgacggggtatgcggaggtcggcttcccttacatggtgcggaccgtactggggttcggctccacggcgtacggcc

SEQ ID NO: 466 - DNA, 50212 bp, Unknown
  R48_24m  MAG No. k141_29447
acgacaacgagtacggcttcacctccaacatgatccgtaccctgctgtacttcgctgagatctccgagtgaaccactgcggtctaggccgctacggttcgtttgagaactaagctgtgagacccccgccttgtgcgggggtttttcgtagtagaacggtaatcatggcaaagaaaaacaagcatgataagggcgcgggttccactccggcgacagtccaactggagaaggcgggcgtggaattccacgtatacgaatacgagcactccaacgaccatatggatgacggctacggcgtggaggcggccaccaagctcggcttcgacgagcatcaggtgttcaagacgttgatggcggacaccggttcggagcgtgtggtgggcgtggtaccggtcagcggacatatggatttgaaggccctggctgcggctgtaggtgccaagaaggcctctatggccgatcccaaggtggcaatgcgtgaatccggctatgtggtaggtggcatctcgccgttgggccagaagacacgtcataagactgtgttggatgaaagcgccatgcaattcgaccagattctggtctccggcggcaagcgaggcctgtccgtaggcgtgaatccacaggacctgctcaaggtcttgaacgccgttgccgcaccaatcggcacgtggtgaccgttcttggcttccctcggtgaggggagccaaggatgactacttcttcctgcgcaactccgacggcagcacgaagtgcatgttttccttgatggtttcgacggacttcataccggtgaaacccaagttttgcagagcgtcaatcacaccggacaccagttcgtccggcacggaggcacctgaggagacccccacggactccagtccgacgaaccacgccggatcaagctcgctggcatcatccacgcgatacgctttgccgcgcttccccaagccctcctgcgccacctccatcagtcgcacggaattcgaggagttggccgatccgacaatcaccacgcaatcggactgctgggccaccagtttgaccgcagcctgacgattcgatgtggcatagcagatatccgaactcggcggctcttgaatccacgggaacttggccttcagcgcggcaatggtgccggcggtctcatccacgctcaacgtggtctgcgagagcagcaccagcttggtgtcgggcgcaaaatccaacgaatcgacatccgattcatgctcgatcaagtgcacatgttcggggttctcccccaccacgccgaccgcttcatcgtggcccttgtgcccgatatagacgatttcatacccctcgcgcacgaaacgcagcacctcacggtgcaccttacccaccagagggcaggtggcatccaccacatgcatgccacgacgttcggcttccgccttcactaccggagatacgccatgggcggaaaacaccaccggaatacccgcttgggcagcagcatccggaatctccgccaattcctggacgaacaccgcgccttgcccggccaaatcctcgaccacatgcttgttgtgcacgatctgccggcgcacatataccgggggcagcccatcctcgcgcgtccgctttccggaagcctccgcggctttgagaatggtctgtacggtaagaatcgcacggtccacacccgcgcagaagcctcgcggatcagcgagcacaacgcttttggtcatcggaacctcctgaacgtcaatagtgtttttccagtgtaaagcagggattacaggaatctgccgtcacaacttttccgcgtctcccacgaatcaccggtttccaaggaatccacgtgcttctcgcatgatggtgtgagactcgtcactccacgtattgctaccgtgtctgtacgaattgtttattatatgccggctatcgccaatccccgcctcgatagaggagacgcgctagactggggccagcgatagcaggagctaccggcccaccaacctcactacgggagtgattccatgacgagtaaaacaccacgcaccggaaatcagtattcgattcactatggcgattattccgccgtcatctgcgaactcggcgccaagattcgccgattcgattatcaaggcaaggaaattttctgcccgttcggcgtcaacgacctgacccccacctgtaacggctatgtgctggccccgtggccgaaccgcatcgaaaacggcgaatacgatttcaatggcaagcattactgcgcgccggtcaacgaatatcatcccgcaccgcgcaacaacgcgaaccacggatacgcctaccactacatgtggaagcttgaatcgttgaccgatagcgccgtgacgctttcactgcgcttccccaacctggacggatacccgttcgatgtgaccgtgaccgtcacatacgaactcggcaacaacggcatgaccgtgaccgtcaatgcccgcaatgatggcgacgagccggcaccgtgggctctcggcctgcatccgtggctggccaacggcaagcagggcgcgactgtcgccgaacgtgacgccgactccgccgcctgccacctgcagatcaaggccgccagtcatgtgacggtgaacgaggcgctgattcccaccggcaccgaaccggttaccggcatctacgacctgaacgatggcccgacgctcgaaggccgcgcctttgatgatgcctgggtcgacgtggagcgtgccgccgatggtacgaccaccaccacattcacccgcccggacggtattgaagtgaagctcattggcgatgagacgatcaatgcttggcagtgctacaccgccactggcgcgccgttcgccgagcatccgtatggtatcgccgtcgaaccgatgaccgccccggccaatgccttccgcactggtgaccacttggtgacgctcgcccccaatggcgactacaccactgtggtccgctacgaagtagtccagaagtagttccgttacgctggctcccctccagaggggagccaattttttatccttatgtgccgccgcgtcttgggacttatgcgatacgattgtgagcggtaacaatctgtttcacaaaggagtgtgcactatggctttgaagcctcgcactggtaaccaatatgtcatctcgtccggcgaatggagtgccgtcgtcaccgaactgggtgccagcctgcgcgagctgaagtggcgcggcgaagacctcatcgtccccttcgacccgaacaaggtcatcccctgctgcaacggctgggtgctggcaccgtacccgaaccgcgtgaccaatggtcagtattctttcgatggcgaagactaccagatgccgatcgacgagttcgaccgccaatcctccctgcacggctacgcctaccgctacatgtgggagctcgttgatttgcaggaatcacatgtgacgctctcctggcgttcccccgacatcgccggctacccgtttgatatcaccatcaccgccacttatgcacttgacgagaacggtctcacggaaaccttcaccgtgcacaacaacgacagcgtgaaggccccatgggcatttggcatccacccgtggctggccaacggcaagcacgccaccggtcaggccattaccgccgacaacgagtcctgccgtcttgagctgcactgcgatacccacgtgaccgtagacgaacacctgctgcccaccggcgaagagccggtttccggcatcttcgacctgcgcgataaccccacgctggagggacgtggcttcgacgatgcctggaccgatatcaccaaccgcggcgaagacggcagcacttccgccgtgttcacccgccccgacggcatcaaggtcacgctgaccggcgacaagaccatcaactcctggcaggtgtgcaccggcaacgaaatcggcgggaaggctcgtcaggccggcgtggccgtcgaaccgatgaccgcctacgccgacgccttccgcaccggcaaggatctggttgtgctcgagccgggcgatgactacaccaccgtggtcaccttccacgccgaacaaatctgaaaaaccgaataaccaagcctgacgatcatcgccacatggacacccgtgttgcatcacgtcgtacttatgtggcataattccgaaggcttatttttttactgcagcaaaggagtccatcatgggcatgcgcggacgtaagcgcaaggatcgtcgtaagaaggccgccaaccacggcaagcgtcctaacgcctgattcttcgcgtttcttatagaacgctcaaggcccgtctgatgatacatcagacgggccttgttgtatatgtcgttacttatcttcgccgcagcagtgatcaagcgtggccttgagccgggccatcagacattcgggcgccacatccgggcgcaagtaggcacgcaacgcggcaatcaacgcctgttcacgctcgtcgcagcaggtacgggggtcaaaacagtcgccctccgtaacgatatgcacgtctgtctggaccgacgcagcggccgagccggtatctactgaacgatgatgcaccgccgtgatatgcacttcggtctggcttaccgtgccatcggccgccgtacgggttatggagatatggcgagtacgctctaccggctgatcgttcatcagatctcctttcccgaaagcttgcttgaccgttgtggcgtgtgggcgtgagtcgcatgactatgtctcactacggcttgcgtgtcgccattgctgccaacagttcgttcactactttcattatggccggaatcggcgattcgaccaacgttttcgcccaacttcgcggatggtgaaccagccgacgaaccagtcgcatacccgcgctctttcgcatacgaggcgagctcacgcttgagttgcgtgcgggcgcgattcaggcggctcatcaccgtgccgattttcacgccctgctcatcggccacctgttggtaggacttgccgtcgatggcggcgtcgatgaacacctgccggcgttccggcgagagtttggcgagcgcggccatgatttcctcgggcgcgaaggcgtccaaatattcctcttcagcggacttgagcccgtccgacgtatgttcggcggcatcgtaaatgtcccaatcgtcgtattcgccggtggagtcgttggcacgctgcgggcgccgcttggccttggcatactggttgaagtaggcattgcgctcgatggtggtcatccacgcctcgaagttggagcccggctggaatgagtcgaaggccttgaacccgcgttcgaaggtgtcctggaccagatcctgcgcgtcatcgggattgttggtcagcctcatcgcctgccggtacagtgcattgacggcgggcatggcgagctgctcgaatctggcgcgcttggctgccatggactcgcccgatccggctgactgccaggattgcgtagttgcttcgcttgtcgtcacggttcaccattctaatcaaatcatgtgcccatatcgtggtcgatgacgtatgagtcacaacacgctgcaccccacctgtagaatggcgtatcggctagataatagggagtaacaattatggctttgactttggcttcggccgctgacctgctcaaggaacaccatctgctgcgtgaaatcatccaaggggatgtctggaccgacgacccggcccgtatcgcttcggcggatgaaccgttcgccggcatcacctacgacacccgcaaggtcacgcagggcaccctgctgtgctgcaagggccgattcaaggccgagtatctgaacggcatcgacgaagccggcctggccgcatacgtggccgaaaccgagtactcagccgcaaccgccacccccggcctgatcgtcaacgacgcacgcaaggcgatgagcctgctgtccgccgcgttctacggatatccgcagaacgcgctcacggtcatcggcgtcaccggcaccaagggcaagacgaccacctcgtacttcacgcaggcgcttatcaacgccgtctccggcggcaaggccgcattgttctcctcggtcgataattgccttgacggccacacctacgtcgaatccgatctgaccacgcccgaatcgatggacgccttccgcatgatgcgcgaggcggccgataacggcatgaagtatctggtgatggaggtctcctcccaggcgtacaaggtggaccgcgtctacggactgactttcgatgtggccgcgttcctcaacatctcccccgaccacatcagcccgatcgaacaccccacgttcgaggattacctgtattgcaagcgccagatcatcgccaacgcgaagtcgctggtactcggcgcggacagtctgcacgccgatctgttgcgggaggacgcggcggcagccggcatcggcgtgaccaccttcgccctgcatgacgcggataatgccggcaccaatgcggacgtcgtcgcctggcccgccgacccggagcacgcctccttccacatcgccgacggagatcaggcccttggcgactaccatctgtccatcgatggcgacttcaactacctcaatgcggcggcggccatcgccatcgcccatgcggctggcgtatcgctcgatgacgccggcgcactgcacgccatcgaatccgtacgtatcgccggccgtatggaacagttccgcgatccgcagtcgaacacgctcgccatcgtcgattatgcgcacaactacgcatccgtcaccgcgctgcttgacttcgtctacgagcgttggggcgaggaaaacccgcgtatcacgctggtgaccggatcggccggcaacaaggcctacgatcgtcgtaaggaaatcgtcgaggctgccgagaaccgtatcgcgaacttcattttcaccgccgaagatacggacaccgagccgttcatcgacatctgcatggaaatgcaaggctacatcacgaacaaggatgtggcctccacggtgatttccgaccgtccgacggccatcaccaacgccatttacgatgcccgtgcgcacgccgaccgattcaacatcctgctgatcatcggcaagggcaacgagcgttggatcaaggaccatcacaagcatgtgccgttcgacggcgacgatcacgtcgtcgaacgcatgtttggcttgtgacgggattccggtcaatcagatcctgatcggatcccgattggcccacatcagatcacgcgcaatacgaccaaaccagaaacacgacatacggatacgaacgaaaaaggatagctgaatcgtaatgatcacgttggagaaagttgacggagccacactggaagccgaagccgagaaggccggcatcacgttgcctatcgaacagaccaaggtttggtctggttttcaggcggatatcgacggacgcacgccatggggcgattatctgatcaagcgtgatggtgaattggtcgccgtgatctcctttatcgattttgagacgcacggttatcattatctgcgctcgatgcatgggccggcgtgggctgccaagcccaccgaagctgaggagcgcgaggtcgtcgacgccatcgtggacaccgtcaagaaggccgacaagaacatcgcgttcctgcgtatcgacacctggttcgccgatggtacggagaaggtgctctccacagtgccgtacgaccagaccgtggtcatcgacgtcaccggtggcgatgatgagattctggctcggatgaagcgtcgtggacgccgtgacgtgcgcaagtctctgcgcgagtgcccggccgaggttgccgatgagacggataaggcgctggccgatttctccgaatattacgatgtgatggtcgagaccggccagcgcgatggattcacgcctgctccgatgagcgactactccgatatgatcggcgcgttgggtgccgatcattgccgtgtgttcgccgcacgtattgaagaccgtgtggtggcatggtcgattgtcaccgtgaacggcacgcatgcggtgcgctactatgccggcatgcgcaacgaggttatgcgtctgcatgtgaccgacaagctgctgtattccgaatgctgcatcctaggctcgcagggtattactgaatacgatctcatgggcattggctccgatttcgcgccgtctctcaagggccttaacgagttcaagtgcaagttcaccgaggaaatcaccccggtggcccccgcccgcgacgtacccatcaagaaggtcttctacaagacgctgcagactgtacagggcgtgcgcaaggcattgcgctaataccgccccgctcccgctggcgggagctgtcgaacgaagcgagactgagggcggtctttcgatatggaccgccctctgtcacctgtggtaccagttcctgccagcgggaaccattcgtttatcgttcgagtttttgactcaccacggctgttacgccgtcggctctcatggttacgccgtaaagcgcgtcggcaatcgacatggtgcgttgctggtgcgtaatgatgatgagctgcgcatgggcgcgtagctcattgaacgcattaatcaaacgggtcaggttcacgtcgtccaacgcggcctcgacctcgtccatcacatagaacgggctggggcgggcggtgaaaatcgcgaacagcagcgccagcgcggtcagcgaacgttcgccgccggacaggaggctcagctgtttgacgcgcttgccggccgggctggcctcgaccagtacgccggtggtgagcatgtcttccgggttttccaggcgcagtcgtccggtgccgcctgggaacagcgtggcgaacatctgctcgaatgcctcggcggtatcgtcgaacgcggatttgaacacctggaccatcgtggaatcgagatccttgatgagctgcatcaaatcgtcacgtgatttgaccacatcgttgcgctgatcattgagatacttgttccgctcctcaagcgcttcgaattcctcggtggccaaagggttgatcttaccgagtgcggccagatcgcggcgagccttatcgagacgcttcttctgctcctgacggttatacggcacggtcttaaagcgggcggaatcgccgttggtgccggtctctcccccggtttctccctcttcggtcccagcctcagcttccgtctcatccaacggcacagggttgccctcatcatccagcacgggcaccggctgttcggggccgtaatcactaaccaattcctccaaagtgagaccgagttcgtcggacactttctgcatgagctgcccggattcggcggccaaccgttcgcggtttacatccaaggcatgttcgcgcccggtcagatcggtgaccttgggctcgatctggttgcgctgcgcgcgcagggccttgagttcctcgtcatggctggaggcggcggcctgcagctcgtctcgtttggcggccacgtcatgcagcgtatgctctaccatggcggccactgctcgcgcgtcatcggccacgccttgcaggtgtgcggcctgctcgcgtctgcgatcgttcaacgcctcgatgcgggcgcggcgttcggcggcttctttggcgttgtcccgcagcagcccggcctgtcggctcagggactcccctttgcggcttgcttcggtccacgcgattttcgcggcgacctcatgctcgcgagtcaggttcagtccgcgctccagcgtacgttcgcgttcatcaagttcgtcgaaatcggcatgttcggcggtggattgccgggccgatgccaaagcgcgattgagatcgtcgagcttgcgctgatgctcgttgcgattctcttgggtctcggtgattttcctatccagctgctcaagctgacgggtgaacgatgcgacgcggtctgtggcggatttcagagatttctccgcctgttgggctttgagccgggcttcggtgcgtttggcggattcctggtcgacgagtcgggccgcttcatcgcgtttggctttggcctcggccacttgctcagccattccgccgtcttgggcggccaactgtttgacctgtgccaatgccttgtctcgacgggcggccagagacaggtccgattgagagatggaagagccgccgaccgccgccacgccgtgtgtgaaggtctcgccgttcttggtgacggcccgcatggcttcgccggatgccacaatctgctgggcttcgtcggcggtgccggccactgttacatcagccagcaggagacgcacggtgtgcacgaccgcttcagcctgcgcttggttctcggcatccgggttcgcggtgacgagtgctgccagcgcgctgcccgatcgcggggcggccgccgtgttctcggcgctactctcctccgactccgtgcccggctctgtggcgggatcgccggcaatgctcgcggtcagcaccacggctttgccgagcttatcttcccgagcgcgttcgagggcgtgcaacatgttgcctgcctcgggtaccacgatggcgctggcatactggtcgagcgcgtgggccacggcttcttcccagccttcggccacatggatgaagtcggtgagtcggccaagcgaggccacgtccgtgtcgcgttccaatgatccggaggcattgcggctgcctagcgtgtcggcaagcgcatcggccttggatttgagcgagatgatcttggactgtatctcgcgctgcttatcggcgagttcgttcagtcgttcgcggcattcggcgagcgttgcacgcgcggcgtccaatgcggcaccatcatcgtcggcaatggagtccacttcgctgcgcaatgcgtccagctgttgccgggcatcgtcgcgctgggaagtcagcaagtcgcgttgggagtcataatccttggcgcggctggtcgccagttgtacggcggattcctcgcgggcgatgagttcgcgcagtcgggcgatctgcgcatcgcgctcctgtgcggttttgcgcagttcagtcaatgtctggcggactgaggcaagcttcttctcgtcgtcggcgcgttcctcggtggccttgtcgagtgcgatgcgtgcatcggccacggccttggtttgtgccgcggcctgagactccagttcctcggctcgtttgacgagcatgccgggatcctcaccgaagttggtgacgatctggccggtgagtgaccggctgcgctcttcggccaactgggcgagcgcgttcagtcgttcacgggtctgtgagaattcatgccagtattggttggccttggcgatggtcggactggattcagagctcaacgcctcgacctgttcgatgcgtactttgacttgggcgagttcacgctgggcgacggccagctggttacgcacatcgccaagctcttgacgtaccgtgtcgcggcggctcatcgagcgttgggcgtcttcggcatacaggcgtgcttgggcgtcgcgtacggatatctgaatcgcgtcggcgcgccgggagatacgtgcctggcgtccgagggggccaagctggcggtgaatctcccccagcaaatcgtcaagtcgactcaggttcgtttcggtattggccaacttgcgcaacgcgcgttccttgcgcttgcggtgcttcaggatgccggcggcctcttcgatgaacgcgcggtgaccggacgggtcggccttcagaatcgcatccaatcgtccctgacccacaatcacgtgcatctgctggccaagaccggtatcggagaggagttcctgaatgtcgagcagacggcattgcgagccgttgatcgcgtattcggagcctccgttgcggaagatggtgcgggatatggtgacttccgtgtaatcgatatcgagcgtgtgatcggaattatcgatggtcaggctcacctgtgcacggcccaatggcgggcgggaggacgtgcccgcgaaaatcacgtcctccatcgaagtgccgcgcaggtttttggcaccttgctcacccatcacccaggtcagggcgtcgacgatgttcgacttgcccgaaccattggggccgacgaccgccgtgatgccgggctcgaagcgcagcgtggtggcggaggcgaaggatttgaatccgcggagggtgagttccttgagatacatggcgtgagactgttttccgtatgtcgggcgtccgggtatccgatgtgccttggatgcgggttaccggacgtcggcggaatcgtcggtgacggcgcctgtgtcggcgctggccgtgccggtgccggcgttaccggcgtcactggcctgttccttgccgaggccgaggacgtcgaacacgtcgaagtcgtccgggctcaccgaatcctcgaggttgtcggcggcctcatcctcggccttgtctgccggccgatccgaatcgtccaggtcgaccgccggctgatggacggccatggcctgcctcatcgtggggctggcatgctcctcaagcatcaggcgtgcgtcgccggcggtgacgaagctgccgcagataagcacgccgtggccgtagcccacgcccaactcgtcttcggcatcgaccatgttgacggcagcctgaatcgcgtcgggcaggttcgcttccttgatcacacggtcacggccgaacacgtccacggcaatcttctcaagctcatcggccggcatcacacgctcgcgccacgagttctcggtgaccaccacggagctcaggatcggctccagaacacccagatattcctcgacctgcttgtcgcgcatcatggcgaccacgccgaccagctgcttgaagtcgtagctttcctctatggccttgcgtagggcttcggcggcattcacgttgtgtccgccatccagaatgatggtcggtgaggtgcggatctgttcgatgcgtccgggaatcttgaccgagctcaacgcctcgcccaccaagtcgccgtccagcgggccattgaccggaatcaccacttcagaggcggcaagcgcggcaagcgcgttgtgggcctgatgctcgccgaacttggcgatcggcacgccctcgtaagtgccgttgggcgtggtcagggtggcgacctggccgccgactgcggccatacggtcggacacggtcatttcgtagccgtcgcgcacgagcatggcgtggttgcgttcggcggcttcggtgagaatcggcatgacggcttcctcatgcggctgaggcccgatgatggcggtgcagttcggcttgatgatgccggccttctcggtggcgatctgttcgacggtgtcgcccagccactgcatgtggtccatgtccaccgggccgatgatggccgcatccgcgttgagcacgttggtggcgtcccacaggcctcccatgccgacctcgacgatggccacgtccacgggcgtgtcggcgaacttccagatggccatggcggtgagcacctcgaagaagctcatcttcggcttgccttgctcctccatcttggcgtccaccagggccacgagatccttggtctggtcccagatgtcgatgaaatcgtcgtcggacagctgctggccgtcgatggcgatacgctcgttgatcttctccagatgcggcgaagtgtacaggccggtgcgcataccgtaggcgcggcagatggcctcggccatgcgtgcggtggagcctttgccgttggtgccggtgatatgaatcacgcggaacgactgctccgggtggcccaggatgtcgagcatcaggttcatccggtcgagatccagattggtggtgttatgctccggcgggcggctcatgatgtccagttcgacgtcccgcatgctctcgttgttccgattcggatgctcgaatgacatatcctcttctgacctctgctcgtgttgctgttgaaccgttcggagtgcgtatgccacttacgtgttcgtgccattctcgtcatgtctacgcatgcccgcgtatattccgcttccgcatgcgcaggaagctcccctcgcacaggtttgccctgcatggttcgggattcttgccttcacgcgtggagccgcactccctcaattccctctatcctagccgccggggtggtttatcgtgcgcgcacagtgaaaccgtctcatatgtcgccgccgcgcgggcggccttttcctgcagcgcgcacagtgaagccatctcatatagttgcaatgcggctcttgccgtcggcttcccattcttagtcggctgcaatccaaaacttgtatgtccggcgacgctgatgctattcagcgtcggtacagtgccagcttctggcggtacaccgacgctatgatgctcttgcgagtcggtagctggccaaaacctggattaatcccgactccatcgcctctcagtgtcgcctcctcgccaaggcatgccattctgccgtcgctgagaaatttcaacatcgtcaatcgaccatgtcttgccccggaaacgactctcacaaacgtcctctacatcatcttttgaactcgcagaggctcattcactgttatgactgctctcaccgtcggcagccgtccaagccctggatctatgccgccaataaatcgcagcaaatcgtcggccacgatacaaccattggactcacgccgacgctagattccacactcagacagaagccagccaatatctgaaccagcaccgacggcgtacaaagcataagcaccgttaaccgtcaattcgccgccctctaccagctacatccgtcttcgccgatgatatcttgttcgaatccccaaagcacgttgttcgaatgacattactgatggtggataagttttgtatgttatccactattccgaattagcggcctaataccttgaaattatcgggaatatctcactccaagacagccaagctccgaggctagaaccacaatggctgaaattcatacttacgctgcttcgttccggctacgctcgacgtcatgaagacacacaaagcagtggcctcgctcatatcagccgcgcagaatgagctgagatgcgtctattcaagaaatgaagcggaacagaccgctctacgccgccgtgcccagagtggcgagttgttgaaagtgtatgacggcattcccagtctttatgcaaataccgcatactgggatggtttgacgccgccggagcgaacgttgcatatggcccgcgctcttgcgcaagagcatcctcagtgggtttttggcggcttggtggcagtaagtgcttatggattcgaacatcaatggcatttgcatgatggctgcataaccatcgtgacttccgatcatggatctcgtcaatgccatcagcgcttacgacatgtctatatgcccgatatgaacaatccgaagacgcatcacgaggcctccggcctatccctgatatcaccggctagaaccttggtcgaggccgctatagaccttgattttcggtttgcgttgccgatctttgactcggcccttgccaagggaataaccaaggaagagatagccgccgactgcgttcaatggagaatcgattatgcccgagtattccgcctgctgcgctatgcaaacgaaaggagcgagaatggtggagaatccctcgcgcgaggcaccatcatcgaggatcgcttcctcacgccgcgtattcaggtaacggtgaccgacccgcagacgaataccgagcaccgcgttgatttcgtatggaagctcgatgacgggcgcgtgatagtggccgaatacgacggcacacaaaaatacgtggacccagccatgaccgataaccgcagcattcaggaggtggtggccaaggaacgagcacgcgacgagggactgaaacgagccggtgccaccgaaatcgtccatttcacatacgccgacgtcatcgaacgcactccgctgcgggtaaaactgctcaaagccagagtgccccagatggaggcatccgcagagcagcgggtcccgtgatgcgatgaaccttcatcgcatgggttcacatggattcagcccgcaaaatatgccaatatcaatcggcaagctccagcccatgcccctccttccctaccgagaacaataaacgggcccgcattccagcccgatgcactcgccatatgggcatgtccagaagaccgtccaaattccgtacttggttttaccgtcagccgtcaatcgtggcacatcgcataaagccgactagtatgaagtgggaatcgatgattcgacaacaactacatacaggagagtggcaatgggtgaagtgatcaccgccaaggacaaggaatatgaggccgaggagcgcgctacggcgccgggcgcgaaccagtcgatgagcgaccgtgtgaacaaccgctcgctgcgcccgcagtcggctgcattcaaggagtttatgaagtccggctgggccgacgatgatccggagatcaagcctctcgaatcctccaagttcacgccagcccgccttgaggcgctgggcaaagccttcccgggcgagcgtctggtcattccggccggccagccgaaggtgcgcaacaatgattgcgattacatgttccgcccggacaccacgttcgcctactacaccggtctgggttccgattacgaggccggcgccgtgctggtcctgaacccggtcgaccccgactcccccgaagccgccgccggcaagacgcacactccggaactgttcgtggcacctcgcgccgacaactccaccgaggacttcttcatgtccgcccactacggcgaatactgggttggcccgcgtgctggcctcaaggagatgcaggcgatgaccggcatcgagacccacgacatcgcccagctggccgacgccctgtccaaggacgtgggtgccgaggccggcgccgtgcgtgtgcgcgtggtcagcgagaccgatcccgaaatcacctcgatggtcgagtccatccgcgaggccaacggtttcgccgatccggacaagaactccgcatccgacgacaagctgcacgagttcgccgccgaggcacgcatggtcaaagacggctacgaaatcaacgagatgcgcaaggccgtggacgccaccaagcacggcttcgaccgtctgctctccgcactgccggccgcgctcgacaagccgcgttccgagcgtatcctcgaaggcgcgttcaacgccgtgtcccgtgagctgggcaacgccatcggttacgactccatcgtggcctccggcccccacgccccgattctgcactggatgcgcaataccggtgtggtgaagaccggcgacatgctgctggtggatgccggcgttgaggtcgattccctgtacacggccgacatcacccgcaccttcccgaccaacggcaagttcaccgacttccagaagcgtctgtaccaggccgtgctggactcgcagcaggccggtttcgaagccgccaagccgggtgccacctattccgacatccaccacgcctgcatgcgtgtgatcgccgagcgtctgcacgattggggtctgctgccggtgagcgtcgaggagtcactgtccccgcaaggccagcagcaccgccgttggctcgcctgcggcgtggcccaccacctaggtcttgatgtgcatgattgcgcgcaggcccgctatgagtcctatcagggcgcgaagatcacgcccggcatgatcttcaccatcgagcccggtctgtacttccgcgaggatgatctgctgattccgccggaataccgcggcatcggcatccgtatcgaggacgacgtgctcatgaccgagaacggccccgaatggatttccgccggcatcccgaagcagatcgacgacgtcgaagcgtggatgcggagccgtaaagcaatcagtccggtggactgattgtaggcgacgccgaacgctgacaagcgcgaggaaaatgaaatcatgcgcgaagcgcaccatattaagcaggctgcccaagccaagtaacccttaagctccctcatcagagggagctccttttttctactaaggaggcaatgtgcctactccggaatttgtgttggaattgcgtaagaagatcggccatgatctgctatggctcaatggcgtgaccggttgtgtactgaacgaacatggtcaactgctgttgggccgtcgttcggacacgggcgaatgggcgatggtctacggcatcaacgagccgggcgaacagccggcggacacggtggtgcgcgaaatcaaggaggagacgggcatcgatgccatcgtcaccgatttggtggccgtcacctcgtcaaacaaggtgctgacctacgccaatggcgacaacaccatgtacatggatcattcgttcctgtgcgccctgaagcccggcggcaatgccgagccgttcgtgggcgacgaggaaagcctcagcgtcggctggttcgatctggatgacctgcccactcccctggcggccagcacgagcgagcggctggagctgttccatacttacatcgagaacaaaaagcacggcgacgcccacgccctgttccagttcgatgggcagcagtactagcggatataaagttagctccctctgacgagggagctccaatgctatgcgattacgcctcttgggctaggagctcgtggaggtgggcgcggtgctgctgctgttcgcgcgggtcgggcacgggcagggaggccagcagcttcttggtgtacgggttctccgggtgctgcataatctggtcggcatcgccgtgctccacgatctggcccttatgcatcaccatgatgcggtcggcgagcatatcgaccaccgccaaatcatgggtgatgaacaggcacgcgaagccgatttccgcctgcagtcgcttgaacagctccaacaccttggcctgcaccgacacgtccaatgcagaagtcggctcatcggcgatcagcagcgacggcttcaacgccaaaccacgcgccaaagacgccctctggcgctggccgccggacagctcatgcgggaaacggttcatgtaggcgcgcggcagctggaccatctccagcaggtcgcccacatagttcttggcctcggccacggaaccgtacttgtggtgcacgagcagcggctcggccacattctccgcgatggtcatcagcgggttgaacgaggagcccggatcctggaacacgaaaccaatgtccgcgcgcttgggcttgaagtcacgctccttgacgccgttcatctcgatgccaagcacgttcagggagccgccggacaccttctgcaggccggcgatggcacggccggtggtggacttgccggaaccggactcgcccaccaggcccagcacttcggagcggtggatggtgaagttcgcgccgtccacggccttgaagtcgggctgcatgagatggcccgggtacgtgatggtcaggttcttggcctcgacggcgatcggctgttcgcgccaatcggccttgcgctcgatcggtttgccctcgcggtcgcgcacgaccagcttctgaccgatgcgcggcacggcacccagcagtcgcttggtgtagtcgtccttcggatggtagaagatctgctccacgtcgccctgctcgaccacgtggccgcggtacatgacgaccacctggtcggcgatgtccgcgatcacgcccatgttgtgggtgatgatgagcacggaggcgtcgaactcgtcacgggcgaggcgcagcaggtcgagaatttcggcctgcacggtcacgtcgagggcggtggtgggctcgtcggccagaatcaggccggggttcagcaccaacgccatggcgatgacgatgcgctgcttctggccgccggagaactggtgcgggtagtagtccacgcgggtttcggcatccgggatgccgaccttcttcaggatgtcgatggccttggcgcgcagttccttcttgtccttcatgccgtgggcgcgaaggccctcttcaatctgccagccgatggtgtacaccgggttcagcaccgaattgggctcctggaacaccatcgcggcctcggaaccacgcacttcgcgcagctgttcgccgctcagggagagcacgtccagcgaatcggagccatcgcgcttggacaggtagacggcaccagaggtggtggccgtctccggcagcagcttgatgatggagcgcgcggtcacggacttgccggaaccggattcgccgaccacgccgaccacggtcttgcgcggaatggtgaagttcacgtcctcgacggccttgatggaaccggcgtcggtcatgaaggagacggacaggtccttgatatcggcgagattcttgttgtcttcgctcatctctcactccttgccttccggcttgccttcgccggtccattcggaggcgacgatggtcgggtcatggtcggtgacggtggccggtgggtcgacgttcgcgtcgagttcggcgatcacctcgttgcgtgcggacggcttctcgtttgggtcgacggacgtgtcttcgatcgatccgaccacttcgccggcggacttgcgggcgcgcagacgcgggtcggccagatcgttgagcgattcgcccacgagcgtgatgccgagcacgataagcacgatggcgatgcccgggaacacggcggtccaccagatgccggcggtcacgtcggaaaccgaacggttcaggtcgtagccccattcggcggcggcggtcggctcgatgccgaagccgaggaagcccaggccggcgagggtcaggatggcttcggacgagttcagcgtcaggatcaccggcagcgtgcgggtggagttcttgaacaggtgcttggtcatgatgcgccaggtggaggcgccgaccacgcgcgcggactcgacatacgcggattccttgatgcggatcacttcggcgcgaattgtgcggaaatactgcgggatgtacaccacggtgatggagatgccggaggccaggatgccgctccacaggccggactggccgtgggagatcatgatggccatcagaatggcgagcagcagcgaggggaaggagtagacggcgtcggcgatcatcaccaggatgcggtccacccagccaccgtagtagccggacaccaaaccaagcagcacgccggcgaagatggagagcagcacggccacgacgatggcgatgacggcggtgcgggcaccccacaccacacgggagaacacatcgaatccggcggcggtggtgccccagatgtgttcggcggagggcgcggcctgcgccgggaaggacgtgccgtcggcggccttgatctgggcgtggccgtagggggcgatcagcggggcgaagagggccacgagcaggaagaacgcggtgatcgcgagaccggtgatcagcatgcccttctgccagccgaccgccacgcgcagttccttgatgattggaatcttggtccagaacggcgtcttggtgctgacgttgagcttggtgaggcggtcgtcaccggggacggtgatcttgtcggaggatgcggtggtcatctcagtacctcactctcgggtcgataagcgcggcgatgacgtcgacgaggaagttgacgacggccacgatgatggcgataaggatcacgatgccctgcacggccacgaagtcacgggccttcaggtactgggacaacatgaagcccaggcccttccattcgaaggtggtttcggtcaggaccgcaccggcgagcatcagggcgatctgcatgcccatgacggtgatgatcgggatcagggccggccgccaggcgtgcttgttgagcaggcgcttttcggagacgccgcgcgagcgggcggcctcgacgtagccggaattgtaggtggagatgacgttggtgcgcaccagacggatgaacacgccggcggtcagcaggcctagggcgacggccggcagcacggcgtggcgcagcacgtcgacgagcacgttcatgtcgccgagctggatggcgtcgatgatgtagaagccggtcggcgataccagacgggtgaactgcatttcggagttcaggtcggagcggccggaggctggcaggatgttgagccagacggcgaagatgagcttcagcacgaggccgaggaagaacaccggggtggcgtagcacaggatggcgaagatgcggatgccggcgtcggcggcacggtcgcgtttgcgggcggcgagtcggcccaggccgatgccgacgatcagcgccacgatcagggcgaggaaggccagttcgaatgtggcggcgccgtagtgcgtaaggatgctgatcaccggctggttatcggtcagcgtcgtgccgaggtcgccgtgcagcaggccgccaagatagtcgacgtattgcacgatcagcgggcggtcatagccggccgcgtggatgcgctgctggagttcggcgggtgtcaggcggccgcccagggcggcggaaatcgggtcgccggtggcgcgcatcacgaagaacacgatggtgaccagaatgaaaacggtggggataatgaggaggaacctcgtcagcacgaagcggaagaaactacctgacagtcggttcttcttcgtcttggctttcgccggagtggtgctggaggtcgctgtggcgctgtctgacacgcgatgctccttggtgttggtaatcggtatataaagcaataaaggctcccctctccgaggggagctggcggcgaagccgactgaggggagtcatacgagttgggctcccctcagtctgccgtcgccagacagctcccccctcaaagaggggagctcatgctggatcagcccttggtgacggaggcgtagcggaagcggaaggaagcgtcgagggtgacacccttcacggaggtgccggtgacggcgacctgggcaccctgcagcagcgggatggtggagaggtcttcggtctcgagtttctggacctgcttgaggatgtcctcacgggcggaggcatccttctcgccggcctgcttgacgatcaggtcgttgacttctttgttggagtagccgttgttcacgaagttgccgtcgcggaagaacggggacaggtagttgtccgggtcggagtagtccgggaaccagccgagctggtagaccgggtacacaccgtcggaatcgtcggtgaccacgcggtccttggagtactgggtccattcggtggactgcaggtcgaccttgaacaggccgccttcctcaagctgggacttcaaggccgcgtactcgtcggcggaggcggagccatagtggtcgctgttgtactggagcttgaggtcgaccggggtggtgacgccggcatcggcgaggaccttcttggccttctcggtgctcggcttgccgttgccgtcgccgtaggcggacttcagcgtgtcatcgtgaccggccaggccgtccgggatgaaggagtacatcggggtgtaggtgcccttgtagaccttggtggagagctcttcgcggtcgatgaggttggcgacggcctggcgcacggccttggccttgttagcgtcggcgtcgggctgggattcaccatagggctgaatcttgaagttgaaggcgatgaagcgctcctcaccgcccggccccttgacgaccttgaccttggagtccttggagaggtcctcgatgtcggtcgggctcagggagcggtaggccacgtcgacctggccctgctggacggccatcttcaggttggaggcgtcggcgaagtacttgacctgcacggcggagttcttggccggggtcaggcccttgtaggagtcgttcttagcgtaggcggcggactcgttgatcttgaaggcggtcagcgtgtacgggccggcgaaggccttcttggagacgatggtgtcggcgtcggtgagcttgtcggcgtcgaaggtatcctcatcgacgatcgggccggcggggctggacatgacctgcttcaaagtcacgtcgaaaggcacggaatccttgaacaccacggtggtgtcgtccttagcggtcacggattcgacgttggcgagcagggagctcgggccgttcgggtcgttgatcttcttgatgcggtcgtaggagaacttgacgtcggaagcggtcaggtcgttgccgttggcaaacttcaggccgtccttgagcttgacggtgaattcggtgccgtcatcgttccaggtaccgtcatcggcggcgatgtccgggctcagctcggaggtgttgtagtcctgggcatacaggaacgggaacacctggatctgcacggcgtaggagccgttgtcgtaggagccggcggggtccaggctggtgatcttatcggtggtgccgatggtgatggcgttgccggaatcggcgcctgcggtggtgtcatccttcacaccgccgcaggcggtcagggatgcgatggcggccacggagacggcggcggccagaatcttcttggaattcaacaggaatcctctctcataacttgtttccacgccatcactgcgggcgtggattaccgcctgactatggtgaggatgtgttactcctgcgtttccacagccatcgacttatgtttcgcttgtggcgaccatggccggttttatgcggtatcgagcagtattacggattcttgtattacgacgtgaataacgttcaaatggtgagatgaacatgctatcatgtcaccatttgaacatgcttgtagacgaatgctttccattcgtcaaccggtcggcctactgctacttgagcttgcggcccgcgcaccacacctgttcgaccgtccaatcggtcggatcggcaaggttgaaatcggcggcgaagccgggggcgatgaggccgataggcaccccggtgaccgggttcggccggtcgaagccgaacgccttggccggcgtcaatgtggcggcctcgaccgcgtccaccgggctcaagcccagttcgcacaccgcgcgacgcacggcgacctccagcaacagggtggagccggcgatggcgccgttggagaccagacgcgcatgcccgtcgaccacgttcacgtccagtgcacccaacttgtaggcaccgtccgggcagtcggtcgcggccattgcatcggttacgaaggccgtacgatgaggcgcgaaccggaaggagaggctcaccatcgggttctgcacgtgaaatccgtcgttgatgagctcgatggtgacgcgcggatcctccaccgcggccggaatcggaccgggctcgcggtggtgcaggccgttcatcgcgttgaacatgtgggtcatgatgcccgcgcccgcgtcgaagccggctttggcggtctcgtagtcggcgtcgcagtggcccacggccggcaccacgccggcagcggcgaactggcggatggcggagatgccgtggggtagttcgggggcgatggtgatctggcggatgcagccaatcttgccgttcgccgcgcctgaagcctcaagcatgtcgtcgacgatgtcgggtaccggatccttgagacattccgggtcatgtgcgcccttgcgggccagagccaggaacggaccttccagatgacagcctaggatgtcggggcggccggactccatcttggcgcggacggtgcggatgttccggcagatcacgtccacgggattggtgatcagcgagagcacctggcgcgtggtgccgtgcacggcgtggccggcccgcgccacatcgatgccatccgacccgtcgtcgaagctcttctcccatgcgccgtgcgcgtggatgtccacgtagccgggggtcagaatacggccttcggcgtcgatgaccgcgttgcgatcggccgggtcgagccccaccgtgcggcagtagtgctcgaaggcctcctcccccgtgccggccgccacgatgacgccggcggcatcggagacgacccaatatccgcgccgttcgccgcacgcatccaccttgcgcgcgttgcgaatcgccaccggagccggcttgccctccagtgccgcggtcacgcgcgagactatctcgttcctatcagacatgttgttctccttaccgctcatgcgctcccgccaacgggagctggctcgcgaaacgagactgagggtggtccaatcgggaagcaatacacatatgccgccgccgataaccaccctcagtctcattacattcgacagctcccctcacacaaagagggaagccagcacacgataactcagatgccctgccaggccggcttgtgggtgtaggcgtagcgatagtagtccttgtggcgcagacgagaggcggcctcctcatccacgataatcgtggcgtgcgggtgcatctgcagcgcggaagccgggcagaacgcggacaagccgccttccaccgtctcctcgatggcttcggccttgccggcgccgaacgccagcagcacgaggtgacgggccttcatgatcgtgccaataccctgcgtgatgcagtgggtgggcacctggttgatgtcgttgtcgaagaagcgcgcgttgtcgatgcgggtctgttcggccaaggtcttgacgcgagtgccggaggccaacgaggaaccgggctcgttgaagccgacgtggccgtcggtgccgatgccgaggatctgcacgtcgatgccgccagcggcttcgatggcacgatcataggccgggccggccagcgcgactttgtcgccgtcttcgagcggagtgccattgagtatgtcaccgggcacatggaccttggccgggtccaggccgagcggctcgaccacagtgcgatggatggtcgcatgataggactcgggatgggtcagcggcagcccgatgtattcgtcaagcgcgaaaccacgcacgcccgaaacgtcaatggcctcgtccttgacgatcttggcgagcgcctgataggcggccagcgggctggagccagtggccaggcccagcacggcgtccggctttgctttgatcaggtccgccacgcaacggccgtagatctcgccggcctcggcttcgttcttgacaatgatgatttccggcatcggtttcctccagttccgtgcggcccgcccgatgcgagtcgctgtaccgccgcccgtcttgcggataatggcaacatccttgtcacgtccgggtgccgcgcggcgttccaaccaccgttcggcgtagcgccgattggtgattcgctatttgttaatgatagtaacaattttggacctcatgaacactcacggtgtttcctgacgcttcacacaggtacactggaatttattagtgaagtttcataacagtttcaacgacgaaattgcgcttcaccgtctaagctgtgtatggaacaacaatcgccgtccactcgctcaccatcaggtaggaggaaacatgtcatatctcggtctcaacacaacgaccgacgaccatgcggccaaggcttcccccgccgatgtgcgccgcaagaaccgccaacttatcttcaggttgttgttccccaccaaccagtattcgcgcgccgagctcggccgacgcaccggattgagccgcgtggccgtttccgatgtggtcggtcggatgctggaggaaggattgctgcgcgagaccggtcaggcacccagcggcggcaaaggcaaacgaggcacactgctgagcatcgatatcgatcgactgcgcatcatcagcatcgacctgacgcaggagcacctgctgcacggcgcagtcaccaatctgctcggccagccgctgcgtcacgccgaagtcaccctgaacaccggctcattcgtttccgtggatgtgatcatcgagctcattgagaagatgctgggcatgtccgatggcgaggtcatcggcatcggagtcgcctcccccggcgtggtagacaacggcgtggtccgctcctccacgatgcgcggctggaacaatctcgacctgtccacgccaatcgccgaacatttcggacttgaagtaaacgtcagcaacgacgccaccgcagccatgctcaccgaacgtttctttggccaaggcgggccgaatatgcttttcgtgcgcatcgaaagaggcatcggttcggcgattctgctctcggacacgccggtaatcggcgaactgcacgcggctggcgagctcggccatatttccatcgatcttgacgggccgctgtgcccttgcggcaagcacggttgcttggagacgatgatttccggaaccgcattgaagaagcaactcagcgcggcagacgtggagcagcatcagggtatccttgctcgggcgggccgctatcttggccaagccctggccatgcctgtgggccttttggatatggcagacgtatgcgtctatggccagccgaacatcatcaacgcgacgttcatcggcgcggcccagcaatatctggatgccgccacgtcctcgtccttccacaaacacacggtgattcggcgctgcgaatgcggacctgacatcaccgtacagggcgaggccatcgccgtggtcttccaacacttggccaaataaaagccggtcaccccggcaacgaaacgcgcaagaccaagcgcggcacagcacgacataaagcgatataggactgcgtgggagatggggcctcggagacaaatctgaggcctcatctcccatgccccggcactatgccaggctacgccgccatggcggcaccgatggctccgactggttggccgacaggtgccagacgcagccgggccggcaggtccagcgtttcgaggaatcggcattgcgattcgcgccggcgcagctcagccgtgatcacctcgaccaatggttcgccggttttggccatgccaccgcccaagatgatgagtcgcggatcaacggactgagccaggatttgtatggtgtcgccgatggcgcgcactaccatgtccagcacatcgacggccttggcctcccgctttttcgcgcgacgaatcaggtcgggcatcggcgggtcggcgttgggccacagacgccccacggatgcgcccgagcagactgtttccaagcatccgtattgcccgcaagggcacttgaggcgatgaggttcgactgggatatggccgatttcgccggccgcgccgctatagccatgcatcagcacgccgttttcgacgatgcccgcagccagtccggtgccgaagttcaggaacgcaatggtaccggacatgccgtccgcaccgcccaatacggtggccgcgccgacggcggcggcattgacgtcgttttccacatgggccggcacgcccgaacgctgcgagaccaacggccccatatccagcgagaccacgtcgagattcacgatattgcccacatgcccgctggccgaatccaccgtgcccggggtaccgacaccgatggccctcacctcgtcaaaacgctcacccgctgcctgatgtgccacagcgacgatgtcttcgatcacggcatcgttgccatgtctggcgggaatgcgggcggaacccaataccgtgcccattgcgtcaaccagcacagcttcgatttttgttccgcccacgtcaacaccgattctgagattgttcataatgttttcggacatcagccctcccctgttcttcatcgaacgtttcgcttgatatcagtgtgcatccgactattgacaaccatcttaacaaattcccccaagacgacactcacatgcacgacacaccgaatgacatattgattgcatcaatcaattaacagcgttaatatcttaatcaagttcagattcaaagatgagcggaacaactcgcagcggtacagacaaggaggacttaagaccgatggcaacaaacaccacccatgccacttcccaagccagtgtctccgaatccaaccgctcccgcatcgtcaagcacctgtatcacaacggcatcagctcccgcgcgcaaatcgccaaggcactggaactcacccccgcggccatcaccaaaatcaccgcacgccttatcgaggccggcatgattgaagagaccggcgatttggaaggttccaagaaccgccgttccatcggtctcaaactcgacaccacgcggttccgcatcatcggcatcaaattcgcccgctcgctggtgcagatcggcgtgttcgacctgtgcggcaacaccctgagctttgaaaacctgcccacggtgtacggcaacaccatcaacgacaccatcgtcaccatccaccagcgcgtcgaacaactgcttgacaacgacccgtccattgtggccatcggcatggcggtgcccggcccctacctgcgtaacgtaggccgcaccgccgtggtgtccagcatgcagggctggcgcaaaatcaacttcatcgacgaattcgccaccgctttccgcgtgcctgtgttcatcgaacaggacgcccgcgccggagccctcgcacattatctcttcgacccgtcggtgcacgccgacggcaacctcgcctattatctggtcggcgaaggcgtgggcctcggcgtcatcgacaacggtcgtctcatcaacggcttcctcggtgccgccaccgaaatcggacacatctccatcgacgtcaacggccgcccctgcgattgcggcaacgtcggctgccttgaacgctactgctccacccccgccattcacgacatgctcatcgccgatggcaccgtggttcccggcgcggccgatatgacccacaccgaagccgcccgcgccctgttcgccaaagccggcgacggcgacgaagcgtcaatcgccattgtccgcgaagtcgcccgatacgtcggctacggatgcgtcaccatcttcaatggatacaatcctgagcacatcatcatcggcgacatcgtgtccgaagccggcccgatactgctcgatgaggtgcgcgccacggtggccgaacgggccatccccgaaatcaatgcctccacttccatcagcctatccaccctgtccgccgacgcggcggtctccggtgccgcagcagtggcggtgacccaattcctcgaacacccctcggtgttcttcgacgtctcctaaaccaagcgccgacatcacaagatgttccatacgaaacacccggtaaaagaaacaaaggaaaggaaaccaaccatgactaccccgatcgttctgagcctcggtgaactgctgtgggatatgctgccgagcggcaagcgagccggcggcgcccccgtcaacttcgcctaccacgcgatgaagaacggcaccgaaggctgggctatcagcgcggtcggcgaggatgagctcggcgacgaactgattgccaaggccaacgaggccggcatcaacaccgtcatccagcgcaacgcctggccgacctccaccgtcgaggtcgcgctgaagaacggcatcccggagtacaccatcgtcaagggcgtggcttgggaccacatcctgtacacccgccagctcatcgacgtagtctccaaggctgacgccgtctgcttcggcaccctggccctgcgctcccccgaatcgcacgccaccatcacggagctgctcaagcacaccaagccgggcgcgatgaagttcttcgacatcaacctgcgtggcgaccactactccaaggacctcatcgaggaacttctcaaggcggccaccgtcttcaagatcaacgacgaggaactcctgctgctgcgcgacatgttcgacatccgcggcacctccggcgaagacgcctcccgctggttcatcgaggaattcggccttgactacgtgattctgaccgccggctccgcctactccaccatcatctcccgcaagggcgaggtctccacgctggacactccgcacgtcaaggtgaacgacaccgtgggtgcgggtgactccttctccggcaccttcaccgcccgcatcctgctgggcgacacgctggcagaagcccaccgcaaggccgtcaacaccgccgcctacgtctgcacccaggccggtgcctggccgcagtacccggccgagatgcccgactatctggctgaaatcggcaagtaatccacccatccccttatccgccattcgtgcgacttcacgaatcgactgatcgcaaccggtgagattctccgaacaggaaatctcaccggtttttcatatggtgcgctcacactcatgctcttcacatcctttcgcgtgtcatgaactaaagcggtttagaataatgctgttcccttgatatgtatatccctcaaacaaagaagttgaatttatgacgaccaccgcgataccgaagtcggtctcggatttcatgcagcacatcacggacctgtgtggcaccgaacacgccgcctgggccgagaacttcaatgcctgctttgccgacaccctgaccaccacggtcaaacggcatgacgacggcaccacattcctgcttaccggcgatatcccggccatgtggctgcgtgattcgaccgcgcaattgcgcccgtatctggcccttgccgccgaagacagcgatattgcgaacctgatcgccggtctgatacggcaacagttccgctacatcatcatcgacccgtatgcgaatgccttcaacgaggaaccgaacggcgcctcctgggacaaggacgaccggtccgatttctccagcccttggctttgggagcgcaagtacgaggtggattcgctgtgctaccccatccagttggcttggatgctgtatgcgaacaccggcaacgccgatcacttcgacgccgaattcattgccggcgtcaagaagattcttgacgtcttcgagaccgagcagcatcatgaacgctccccgtatttcttcatccgcgacacggacatccccaccgaatcgctgagcaatgacggcaaggggtcgccggtggcgtacaccggcatgacctggtccggcttccgccccagcgacgacgcctgcacctaccactatctggtgccctcgaacatgttcgccgccgtggtgatgggctatctggaacgcatcttcggcggtgagattctggatgacgccgatatcgccgcccgtgccggcgagctgcgccgcaccatcaccgaaggcatcgaagcccacgccaaaacgacgaaccgcaatggcgagacgatttacgcgttcgagaccgacggcctgggtcacgtcaatatcatggacgacagcaatgtgccctccttgatggcggccccttacttggggtactgcgcaccggacgatccgacgtatctggcgacccgacgcacgctgctcagcgacgaaaacccgtactattacgagggcgagtatctcaagggcatcggctcaccgcacaccccgccgcgctatgtgtggccgatcgcgctgtctatcgaggcgatgaccagtgacagcaaggacttcaaggcgcatatcctcgaccgtcttgtagccaccgacgccggtacacatctcatgcacgaaggcgtcgacgtggatgatccgaccaagtacacgcgcgaatggttcagctggtcgaatatgatgttctgcgaactggtcatggactatttcggcattcgtgtgaagcactaagacgtgcccgctgcatgctcattgcgcacccaccgcatgttctcgttaaggaaaggaacaatcattatgaccaataacccacggtatacgctcggcaccgaagccaaccgcattttcatggcttccgaaacctacgagctgctgaagttcggcaagggcttcccagcgccggatggcggttccggctggctgaacgccgacggcaccctcgacccctcccacggcgtcgagacgtggatcaccagccgtatggcccatgtgtattcgattggcgacatgctcggatatccgggcgccggggagctggccgacgcggcgctcaagggattgaccggcattcttcatgacgacgagcacggcggctggtacccgcaggtgttcgcggacggcacccatgctccgggcacggtctgctatgcgcatgccttcgtgatactcgccgcatcctccgccctgctggccggacgtccgggtgccaaggaactgcttgatgaggcgcttgccacgtatgacaagcatttctgggatgacgaaatcggtttggccgtcgatacctggaataccgaattcaccgagctcgacccgtaccgtggtctcaacgccaacatgcataccaccgaggcgttcttggccgtggccgacgccaccgggaacaacacctatcgcgtccgcgccggccgcatcatcgaccatgtgatcggctgggcgaagcacaacgagtggcgcatccccgaacatttcaagtccgattggtcgctggacctcgaatgcaacgtcgacaagaaggatgatcagttcaagccgtacggcgccacgccgggtcacggcatcgaatgggcccgcttgatcacgcagtgggcgttaagctccttcgccaaccttgacggcgcacagccgtacgtcgacgccgccgagcatctgttcgcgcgtgccgtggccgacgcatggaacgccgacggcaccgtgggactcgcctacacgaccgactggaacggcaagcccgtggtcaccgatcgcatgcattggacgctggccgaatcgttgaacacttccgccacgctgtatgcggccaccggcgaggagatgtacgccaactggtacgccacattcgcccagtatgtcgatgagcatgtcatcgaccacgagggcggttcctggttccatcagcttgacaagaacaaccacgtgatcggcacggtctggccgggcaagtccgacctgtaccacgccttccagtccacgctgattccgttcttggacccggccgtgtccattgcgacggccgtgaagaacgctgaataatcgacagcatctaagcctctatatccttttttcttcctctttctcaacgacgttggcccccgtggaatacgggggccaacgccgtactggtcgcatgtcattgtctgcaagccgatgcaatgaccgttctacgccatggtatccatgggcttggcggtgctgtcccgaatcaccagtttcggggtgaggattcgccggttgccgctcacctgctctccggcaagcactttgagcagcagtttggccactttggcaccgtattcgctggcatcacgatgcgcggcggtaattgacggatacgccgcctcacaaatgaaactgtcttcaaaactgacaatggcgggcagcccattcggatagacttccgcatggccctcccccgcctccatctgccgagcggaataatcttcggccatggcgtgaagactggccgcggcgaggatctccgtttcatagatgaacgcggtaggcggcttcggtgaatgcagcatctccaacgtgagcatcgcggcctgttccgcaacaaaatcggtgaattcgatgttgatggattccagctttcgccgtttggcaaatgcgcggaacgccgcgacacgcccctgtgaataatccaggttcggatcgccggaaagataggcgattcggcggtgtcccaatgacgacaaatgttcgagcacggttcccatcgtgcgtgaatcatcgatggacagtgacggcacataattgttcgggtcgggtcctccggcaagcactgcgcgcacacccagattcttcaacaattccgggcgtggatcatcggctcgcaaatcgacgaggataacgccatccacgcgcttgcgcgacgcccaatccttgtatacgctcatctcctcgttcaggaatcggcatgggcggtacagcaaaccatagcctttggggctgagcgaggcgtgcacacccgccatgaagtgcagcatgaagctttcatccgtgagcccctgcgtggatcgtgcgggggcaaagcctatggtcatggtcttcgaggatcccagtgcttgtgcggcgtagaccggcgtccagccgagcctggctgcagcctctttgacccgacgtttggtttccgcggaaacgccgggccgatcattgatggcgaaggataccgcggtctgcgagatgcctaattcatctgcgatgtctttcaggctcacacgctgcgtgccgtcagacgatgacgatgcctcgcgagcagatctcatgaacactcctttttacgaccgcattgcgactattgcgatacggttgacggcacccccgcattgggccatatgcatcaaccgtgcgctaactcttatgatatcaataattttagtcaaataactaaagcattttagtcactggtctcggcatatgtcctgcgacaaaacaaacgggatttaggggggcacccattgggcaacccctaaatcccgcttatggcacgagtatcaacacccgtattgcgacgaactactccgtcttgctacgagcgcgaagtaccaccgcacccgcgccaagcagcaccaccatggccgccacaatcgcaatgaccgacgaacccgtggcactcaacgaagcgccattcttgtcattgttcttgttgtcgttctggctgggcttgttcggcttggtatcgccaggcttgttctggtcgccgggcttgttcggcgtcaccgcggccttggtgaattcgacggtgacgcccttgccgatggcattgccgttcagcacggccttcaccgtgtacttgccgaccttcgtggacacgacgttcagcgaagccacgccggcggcatcggtcttgacggtggtgtttccgccaatggccgagacgccttcgggcagttcaaacgccacctcggcattggccagcggattgccgaacgaatccttgaccgttgcctgcaccgtgcggatggccttgccgtcggccacggccgaaccgtcgaccgcggtcagcgtggacttcttggcatccggctgggtggggtcggcgaccgtgcacttggccagttcgtcggcggtcggaatcttgaccggatcggtcttgttgccgctgtaatcctcgacctgcacccgcagttcatgactggcgggggatggacctggtgtatgaggcaggtgtggtacgaccacggataataccagtgattggcggagtgttctgcgagtaggtgtagctagcacccagctggttctcctgctgctgcttgccattctcgccgatccacttctcggtcatgtacaggtagcgccagtcttaagtctcaggacgggccagcgtcacattatcgccattccagatcaccgagcaagccggatacggctcaatggcggcatcggcaaatgcacctgttgccgtagcggtagtgccacctgcattatcgacgttcaccacatagcgggagctgtcaaccggcgcattggcaatcgtcactttgctcttgtcggcggcgaccttgacggtctgggaatacggcttcgcggcgtaacgccacgaaccggtgtcggatttgacggtcacggttttctcgccggatacctgcggattggtccaagagaccttgacgttgccgtccttgcctggttcgactttcacgtcggagacggccgccgcttcgttcagcggcgcttcggtggcgagcgaacgcgagccgtccgcgcccacggcgtagagcttgagcgtgccggtcttggcgggcaggtgcttgacatacagggtgtcgtcgtagcggccgccgaggaaggtattgtccaggtagagcaagtagttcttgatggtggagtagtcggcgagattccacttgacgatcagacccagcgtggcgatcttcttacccgcgtactgggacaggtccacgctcgcggtcttccagccgttgcctgccgaaccgtccgtcacgtccaccggcaccacggtctcggggtcgtcggcaaggatgaggccaagctgcaacttggaatcatcgctgttgagcttgttgtaggtcaggtcaaccttggagccggcagcgacatccaggtcggtcttgtacaggcgaatggtgttgtcgttggagagcttgccgctcagcaccagcgaatcgccgccttcgtaaccaccgaccttggtgtacttgaagcgtggtaccgcctcgtagtccttaccgtagtcgaagtcggcctgcagcgggtcggagtcggcatcgatccaccactgccatgtcggcagaatatcctgcaggttgatgttgccccactgctggtcgctggtccgttcgccgccatcacgccattcgagaccgtgaccggtgtcgaacgacgtagagaacatggaaccgccaaccacggagcattcggcgatctgggaagcgaagcccttccaaccgtcattgctcgtgccgtcgtcgatgtaattgtcggcgatgtcggtggtgcccttctcgccggtggacgagccggtccacagtcggcgttcgcggtcgaacacctggttctggtatttcggatagaccttcttgtcgtcgcccagttcgcgggagacgaagtcggcgccgagcgcggcaaggctcacatacggcttacctgtatcgtcgagattgacgttcatatagcccgcattgctgccgatactgtcgaacttcttctgtccggactcgatgccagcaaacaccgcatatttcggatcgatgccgaaactctcggcgtgagcggccgaatccttaagcatgttgccgctgaaccagtagttcaggaagatggaatcagagatcttgcccttgtccgtatcctgcacatacggcgaattgctgccgttgaacatgtcttggtagcctacgccgccacctgggtatgtggctgagtcgtaccactggatgtaaatgccctgatcgacgatctgcttcatgaagtcctggtaggctggaacatcgtcggcgacatcgccaacttcaaaagcgcggcccacctggccgcctacgccggcatcgctccggccaccggccagtccggcaccagcatcaagggcgagagaccctccagacggggcaacaaacgcctcaggaacgcgctgtggcagtccttgttcgtcgcgtccgccaaacacccgccgtccatcgcctactacaagcgcaaacgcgaacagggcaagcaccacaacgccgctgtcatctgcctcgtgcgccgacgctgcgacgtaatctacagcatgctcaaaaacggcgtcctctaccaggaaccagccctcgtagcctgaatcgggccacacgggaaaggacgccggacgccaccggcagggcgaagcgcgcccacgacagccaaccggaatcccgacacgtcaactccccaaggagttgacaaaaacataggaacacccccatggcattgtgccggtggcgctggccggtgcggccaacgccgccagcgtggtcatcgacaataccgcggccagaccgctgcacagccatttcctgtgttgagcccgggcagaagtacacccagcgggatcgcctagtgacaatctcatctataatctcctttgacttcttccggcttacgccggagatcaaccgtctgcgtactacttcgtccctaccgatgtgggccatgggatacggcgcttcgcatatcgcgccgtatcccaaatactgtttttcggttcattcgaaccggtgttatccgcggcggcggactgcgaatacgctgataccggcgagcgtcataatcacggcgaccgatagcacgacggtgccatcggaaccggtgcttgccagacgtccggttgcagactgtggcttgttgtgtgatgcgtcaccggaactaggtttgtccgtttcgcctgtgcctggctgttgcggcttgggcttgccgcccgttgcatctgcgattgcggtgttgagcgatgccgtccaggagacaacgtcagctccggtatacagcttgctggtcaggccagtgaccgccgcgtttctggccgtggtcagcgttgtccgcacatcggtatcggttgcgccgtcagctagcaatgcatccgccttggctatggcaccggtaagtgccgtggtgtcgatggaggtcagggaaagttcgagcgtcggatcatatgtgttgctgtatccgtcgttccaatccgcgccgagcaccgccttgttcacctcatacaggttggtggccgctgccacggtttggcgtgtttcggctggaatatccttggtataggacatacggtcaaggaagtggttggcagcctgcttggcgttttccagactcatgccttggctttgtgcgatggccgtcttcgtccaaatcagattcgacggtttgatgtgtgccaaatcatcgtcggaataggtgcgtccgtcgcggtcgagcgcgtagacgaacatgcctccgagattgtggtcgtacgagtatgaggccacatcatagaaatgactgtccaggtatggttcggtcgcgtcgttccaccggttattcatgtcaccctcttcggggaaggtcaggccgggaacgaacttggtcgagtcgataaactgttcgtaggtggcagcggccttggccgtccggttcgaatcggaaccgtactgctggtaggcaacatagtcgaagcaatcagaaacgttcttaaacggagcagtgtagctgccattggtgtcgtaaaggaacatcgtgccttccgggttatccgacttcggcccgatgcgcttggcgagggctgtgatgacctgatcggaaatcgccacctgcgcggcatccgggaaagtttccatatcgatgtcaagaccgtcgaggccaaccgaggtcatgtacgtttcgatgacatgatcggcgtacgcgtcataatccgattcggtcgcactatcgacgtttttgccctgctgagcaatccacgtcttgaaaccgtcgaccataacaccgctgtaatccaaacctcgtacgagtttgatgcctcgggcatgcagatacggcgcgtaatcgctcttgagcttgtcatagaacggctgggccgccgcttcctggccactgggaacgtagctgaacacattgacgacatcgatgccgtatggaatgtcgtacatggagatccaattgtcatccggtaaatcggtgttcacgcctttcatggtcacgtcacgccatgcgcggtaatacaccatgaaatgcttgttgccgttaccctcctgcgacgccgcaacgggggaatccccctcctgggcgttcgcaaccgttcccatggccagcgaacatccgagcatcagtgctgtggcgactacgcccgccgcgacggcggcgagtctgcgtccgatggacgagcgcccttcactaccttgtgagcaacacatatataatctcctttgttgtttcctctatcgggtgacaacccgcagacttgcaggttgcgaggatggatgccttgcggtttcaggctccatccgggggtgtgatgcggttccagtgcttcgcaccccacattcatacaggccccctaatattcccccggcagcgtcgccgtgaccgtatgcgtcgaatctccatccagcgtgcaggtcacctgaacttgcccgtcaccgacatcccgcagacgatcacacggcacgtggaacgcgatatcgcgacgctctcccgcgttcaagtccatgtataccgaatcgacaagcattgccaaacgtgggatgcggcggccgccgctgacatgcgcgaacagattcacggcacccgcggccccgtgatcgtcagcatgtgccgtcacctgcaccagcacttcacctggatgcgattgcgtatcggcgtgcatctcgctgaacgtcaccgccgccagcgaaccggctccatagccgaagccgcgcaatatcggttccgccgcatccttgtagacatgcgcggcactttggcggtcattgtatcgaacgggaatggctgcgggatatgcgggtaaggtcacaggaaggcggccagacatgtcggctccgtcaaccaatacgtcggctacggcctgcggcccatattggccggcatatccggcccagatcgtcacggcggagcgttccagcacatcggtcagtacatgcgcgcgaccgcacaccgccaccgaaacaattggagcggtggtcaatgccgcgacttcacctagcatgtcatcctgacgccagggcaggcggatgtcagacaagtccacgccttcgccgcaggtggcaccgtattcggttacggccttcgccgcgccattgtcgtcgaattcactgtcatagctgcgttcgctggtgctgccgcatacgaataccacggtcgacgcacgcgcccattgatcggccggcgcatcgctcggcttggcggccaagagaacccggtcctccccgagacgtgccaccaattgccggtagacgcttgactgttcatcggcgggcagaggggcggtgtaatcgcccaggaagcagccgaaatcgtcggcgaacgggccggcgacaatcacagggccggcttgagcatcagctatgacgctgcggatatcgtcgagcgtggcggcagactggccatcattgatcagcgttatcgcctcgcgggccatgcgcttggcctgctcacgcccatccgcagtggcctgcgcgatggcgtcggcgctcggcatggcaattgcggcggtatcggcaccgtcttcgggcaagagaccgaacatggctttgagttccagcacccggcgcaaggccgtgtcgacagcggccactacctgttcgtcatccgcatattcttcgaggcgggtgaatccttcatcccacagggagacgtccacgccggcgagcagtgcggcgcgccctgccgcgggaatggagccggccatgtcttcgagccgatccacggccaggccatcggccatcacgatgccgtcgaaaccgagctggtcgcgcagataatccttgagcagccacgggttggcgcagcaaggtacagaatcgatatcgttgtaggctgccataaagcccaaggcaccggcgcgcacaccggcggccaccggcggcagatgaatttcatgaagatcgtgcgggcccagtacggcggactgtccgttgcggccgcccacggcctcgccttgcgccgccagatgcttgagcaccacggccactcccccgtggccgaccttgctgcgatgctcaccctgcatgccggtaacgatggcctcgcacatgcgggcagccatcagcggatcctcgccgaagcattcctcgcaacggccccagcgtgggtcacgggcgatgtccaaaccggataccaatgcgatatgaatgccgctggcggccagttctgcggcaaccgcggcttccgcttcctgcaccccctgcgggtcaaacgtagcgcccaaacccagattggtgggcagcaccgtgccgcccagcgcctgatgcccgtgaggcgcctcttcgctaagtaatacgccgatgccgtgcgcgccacgttccagcacagtttgctgcaccacggcaatcgcctcagtccgctcctcagggcgtatgccgttaccccaatgttgaccagaccatgggtcggctcgcaatagaccgtacagggtgccgagtccaccccatcggtcaatctcctgcttgagctcgtccgaggccaccagccgtcccgcagcattgcgttccacggacttccaaccgagcagacgctggttcaactggccaactttctgcgtgaagctcatcgaatcaatgagtcggtccactgcggcgcagttgatgctcattgagcgctcccccttctcgtatattgtcttctcgttcttctcgctcttcggcgagtaccgggtcttatgttttgccctgcgcactgcaattgtgcgcactgcaattgaaaatatccggttgtggaacaaggagtagatgattccacaaccggatatcggtttaatcagccgtttcgaacgatgggtccgaaaccgcagtgtagtaacgggcggcataggggtgttcgtcagcgtgcaattccagaatgccacgctgcgcgagcgcctcttgattggccgccacctgcgaggtgatgatggtcgggcgctggcccgccacctgcagcttcatccacaggtcgcacaccgagcctcccgggccgagcgcactgcggttcaccgggtttccggcctcatccacatcaatcaccacggcgacggtcttcggctgagccggcaatgcggaacggtactgtgcggcgagttccccgaacgtacggccgatcggcttcagctggccttgctcgtcgaacaagcccagagagtgctcgaagaacgggaagtcttccatgctggcgggcacatcgtgcgagcaccaccacgtcacaccccacaggttccggcaatccatggcacgttcaacggtcttgcggcagaattccggcgtgtagtcggtttccagcacattctccggcgcaccgacttcctggagccacaccgggcgctcggaatccttgccgaacgccttggccagctcggccaggtacagtgcgtacgacgagcactcctcactggtggcgccgtatccttgcgcgatgccgttgaacacccaggagtgaatcactgtcatatcacccttggtggcggactgcaccggagtgaacgggtgcccatcgatgaaccaggtgccatcgttgacgctgtacagcgcgttgtgcccttcaccggcggcggtcggaagcagcgcgtccagccatgcgtcgatctgccggtccgtggcgctcatcttcgtgggatgcggcctgtcagacagctgattgacctcgttgcccaaggtcagacccttgaacgcgggttccttggacagctcatcggtcatggtcttgaccagttcacgctcggccgcaacggcgtccgcatcggtgaacatgttgcccgcatgccaggtgaccagccatgaaggcaggaagtcgaagctggacagatgcccttggaacacgtccacataggcatccaaaccgtgctcgccggcgatgtgcaccatgcggcgcacatccgccacgcccttcttgttgatccaggtgcgattaggttgcagatacggccagatcgggaagatgcgcacatggtccatacccagttcgctgatctgcttgagatcattgtcgatgccgtcccagtccgggtcgagccatgcgtggaaccagccatgcgacggcgtgtagttgactccgaatttcattggagtacctcctttttccagtccgctcagcccttgagtccaccctgttccaggccacggaagaagtagcgctggaagcagcagaagaagacgatgatcgggataagcgagacgagcgcaccggcggcgatcagtcgcggatcttggatgaacatgcccttgagtcggttcatgccgagggtcaaggtgtacttgctttcatcggagatcgcgatcaacggccacaggaagtcgttccaggcaccgacgaatgcgaagatgccgacaacggtcatcgtgcctttgacctgcggtacacagatgtggaagaaccgctgccataggttggcaccgtccaccatggccgcctcttcgagttccattggaatggatttgaaggcgttggtcatgagcaggatgttgatggcgccgcacaggccaggcagtgcgactgccagcagtgtgttctgcaggtggatggagcgaatgatcaggaactgggagatcatcacgccttcgatcgggatgaccatggtgcccatgaacatggtgaacaccagtccgcggccacgccacttcaggcgtcccagtgcgtagccggccatcgtggagaagaccacgttgccgaagatggagatcaggcagaccaccagcgtgttgagcatgtagtggaataccgggacctgcttgaacacggaaatgtagttgtccagcgtcggggtcttcggcatcaggtagggaggcacggcgtagacgttgtcgcccttgcccttgaacgacagggacagttcccagacgaacgggccgacgagcagcaggaacatcagaatcagaatcagatactggacgactttgccgacggtgaccttatgcgtgttggtattcatcagtcctcacctcgcttttgtacgatctgctgcacgatgagcatgacgccgacgatgacgagcacgacgatggagatggcgctcgcgtaaccagtgcgggcctggataccggtgccttcgcgcttgataagcatcgacatcgtcatatccatgccgccggggcctgcggagccgttggtcaacacgtagatttcgttgaagactcggaatgcggcgatggtggacagcatcatgatgagcatcatcgtggagcgcacgccgggcattgtcacgtagatgaactggcggacagggccagcgccgtcgagggaggcggcttcgtaaagggattcatcgatgttggcgagggcggtcaggtagatgaccatgtagtagccgaggcccagccagattgtcacgaacatcgagctgaagagcacgccccatcgatcggtgaggaatggaaccggcttggagatgatcttcaatgccttgagcacggagttgaccagaccggcggaatccagcaggttggtccagatcatacccaccacaacggcggacataaccaccggcatgtagaaggcggtgcggaagaagcccatgatgcgggagttgcccttgaccagataggccaggatcaacgggaggatcaccatgaacggcactacgcagatcacgtagagtgtggagttcagcagtgccgtgaggaagtactcgtcatggaacagtttgatgaagttttcgagtccgacgaaggttcccggacggagcagtgtggagttggtgaaagcaagcctgaaagtgttgagtgccgcaaggacgatgaatacaaacacaatcgcgaacgctggcagaacaaacaggtagggggcaatgatggtgccgaagctacgattctgcttcttgccgtggttgaggttcatcggttcaggccggtcggaggccgtgcgggcctccgacctgtcagcggcgagtgccgcgttgctcactgtgcgagcttctcgtttgcgaactcgacggacttgtcaagggcttccttggcggtctgcttgccctgcatagcgagggcgatctgctgctggaagttcttggagccgttgttgtcggtgaactcggacggacgagagccgtagccgtccttgacctggtcgagcgtgatcttcagagccttgccctcaagggtgctttcgtcgatgctcttgtagtagtcgtcatccagaccccccttggcggacgggaacacggaggccttcttgtcgaactcgatctggttcttctcgttggtcacgaatcgggcgaagtcaatggcaacgtcggggtgcttcgagttggcgctgatgccgagcatctcgtaggccacggaagcggacttgccgtcgttgctgatacgcgggccgactgcgaggttcttgtaaaggtccggagcgttctgcttgaagccgtcagcggagtaggcggagccggccatggagaccaggttgccacgctggaagagatcggcggcctggctccaggaggagtcgagggcctccggcgggatgccgcccttcttgtacagctcaacgaagcggctgatctgcttgacaccggcctcatcattgaaggtgtacttgctgtggtcatcgttcatgaaggacttgacgcctgcggtcatcagatcttcggtgttgtaacccatcgtggtgcccaggtagacatccttgcagttctgcacgatggtgtcgccggcggcgaagtactcatcccatgtggtcggaatcttgttcggatcaaggccgcacttctgcatcagctcggtgttccagtaggtcgggccatcgttgacataccacggcaggccgtaggcacccttctcgatgccattgccctgcatggtcacggacttccatgcgccttcgtagtagtccttttccgcatccggagcctgcttggagacatcgagcagcgcgccggccttggcaagaccgtacaggatggagttgccgccgtcgacgatgtccggcagttcgccggccgcagcctggctggacagcttgtcttcgtaaccatcggacggggcgtcaagccacttgacggtgacgtccgggtggtccttctcataggccttgatcagcgcctcgaaatacggggtgtacttgtcgttcttgaggttccaggtctggaaggagatctccttcttgccgccgtcatcccccgcagttccgctaccacaggcagccaccgatacgagcatcgcaccggcaccggcgatggcgaggatcttcttcatagaaaacatgatgttttcctttccttttgattcctttttcatcccgccctgctgtggacggagaaacctaatcgttgtgctccagcacagtcacccgtcgcggtgattgacgtggtatcacaacctttattcagttctcatcgctgagactaaaccgttttagcttccggccagtcgcgaacctgttaactaaatcggtttagtaaaaacataacacaatcgaaacatgcacgcaacgaattcatcgtcgcgtgtcgcattgatatttgcccaacgggatcgctctccctcttctcatacaataatgggccgcgcccaaccgtatggcagagccggtctgttccggttccgttacggttgggcgcgacccaaaatatcgagcctaggcccaatatcccttatcggcgaatacgcagcgtggcgagctggaatggcgccaacgaaacgatcgcaccgtcggcaggcattggttcgtcaccggcgagcgcgcgcggcagttcggcatccagctccggctcctccatgagattcacctcctgcacgctggccttggcatcggagagagcggcgtcaaggcgcagtgtggccgtggcattgccgccggcggcctcgtacaggcgcacgatcagatcgctggaaccgtcatcggcgagcttgatccagtccaatacgatgacgccggtggcgtcggcgagcgagaccagcggcgccatatcaggcaactcccctattacggggctgttaagtcgcgccgcttcgtccagcaccgcattcatatcggcgtcagcgaccagagaccacgcgaaggagtgtgcgccttggtcggtgcgtgggtcggggtacagcggtgcggacagcagcgagagccgcaccatggtgccgcggccggtgccatgtgccgcatcggcgtggatggggctgacgtcggagccgtaggtggaggcgttgaccacagcggcggcatagtcggcgtcggcgatccgcacgaagcggtgcgtgcagctttcgaatttggcatcatcgctgcgcgtgttcttgttgatggggcgttcgaccagaccgtattggcattcgtattgcgcgttcagcgcttgcacggtgaccggcatatccactttgaggaactgttcgacggcatgccagtccacatcggcggtgaagtccagtgtggcggagcccggccttaaggcaatgcccgtacgaatttcaacgcccttcgcgcgagtgacagcatgcacgacggccccaccgttggcggtttcgtccacgcttgcaatcgatgcctcgctgagcgcgttggcggtgaggaacgcatcgcgttgaatatcccaggcgtcccagtggaagggttcgtctttgagcatttcgtagcggcccagtcgggtgccggcgggcaccagttcacgattggttcgctgatcgacgattgacgaaacggtgccgtcggcttcaatgcgcacgtgcagttggccgttgtcgagcacaatcgtatcgccgtcatgggtaacggcgacccgagccatggatgcggttcccgcttcggctcggctcgaagccgggcgtaccacccacgtctcacaggcttggcgggaatatggggcgattacggcgtcggttatggttgcgtcatcgggttccacggctgcgatcgcgcgcccggcttcaagggcgatctcgttcagccgagcgatgtcacgcgcgtattcggtccgcgcctgacggtgtacccatgcgatggccgaaccgggcagaatgtcgtggaactggttcaggagcagcgttttccaaatacggtccagctcttcgcgcggatagacatagtccgggttcttgatgcgggccgcggcgcacaggtattcggtgacgcgcagcatcgactcctcctggcggcagccgcgcttcatgtcctgctgggcggtgagggtggcacggtgcagttcaaggtacagttcgcccttgaacaccggggtctccccttgcgcatcgtcgacgatatccttacgcacacggtcgaacagttggtcgggagtaccgaattcgatcttcggcgcgccggcgagatcatggtcgcggcggatgcgcgcggtcatctcacgggtggggccgccaccgccatcgccgaagccgtacagcagaatcgcgttacgggagaggtccttgtccaggaagttgcgctgcgaatacatcagctcgtgcatgctcatccacgagcagtaggtatccgagggcgggaagtgcgtgagaatacgcgtgccatcgatgccctcccacatgaacgagtggtgcgggaacttggtggtgtcgttccacgagatcttctgcgtgaggaaccagtcgaatcctgcacggcgggcgatctgcggccaagagccggtgtagccgaaactgtccggtagccagacgccgcgcggcgcgacgccgagatgctccttgaaatatcggcggccgaacgtgatctgccgcaccaatgattcgccggaaggaatcatgttgtc

SEQ ID NO: 467 - DNA, 10511 bp, Unknown
  R48_24m  MAG No. k141_29606
cattatgagtccgacacggtcgtcggcgcctccccgtcgaggcggtgcatcgacacgcaggtcgaacgcaggagccgcaggctgttcgccaggttcgtccccgacaagagcgcgctggccacggcgcgcgccgaatacgactggcccggcgtcgccatcgcagcctagatgccgaggtcgtccttgtgcttgttcatgtcctcgacgaccttcttcaaggtgtcgtagtccttgatgtcggcgtcggactggatgactgcgtagtccttcttggcgtattcgttgacgatcttcttgttgtagatgataccgtaccactcgaccgcatacggcatggtgtaggcgtcgtcgccgaccttatgcgagttggtcttgccttcgtcgttgagcagcttgtacacgtcagtgtcctgcaacggttcgagatacctctggtacttggcgaactcgtcgtagccagcgatgatgaacatggtcggagcttcggacttggccagttcggaggtcagcgtggactcatagctgccggaggacgcgatctggatgtcgacctgcacgccggtctgattggtgtagtcctgcgcaagctgctgcagctgatcgaccacctcaggcttgccgttcaagaaataaacatgacccttattcggatcagccgcagtgcttccgcaggcggcgaggctgaacatggtgacggccgcaacgcccgcggcgaggattctcttcatgttcatggtgctcatcggcgttatgctccttccgcatataccgaacatctgtgtccggcgatctgttcttctcaaagggggccgctgaactatgctcagcgactcgttaccgtaagcgttgatgacaacgacatcacgcgatgcaattatgtacataatcggcgtgttgtcgggggattacttgatatttcaagcgttttctcacaccctctgattgcagctctggtgaatacgttgccaaggtactgtgcatgaatcggcaaacaggcgattccccgtgggccacgcccgttacaatgacgtgtatccatccgcccgcccctcaaggagatgaatcatgggctttatgtctccggattccgcattcatgcgcggactgagcaataccgtagatgccatctggatcaacctgctcatgatcatcaccagcattccactgatcaccatcggcgcggcgctcacggctggacacgatgccgcgcggcgcgtggcaatcgcggaaggtcacgtcaccgcgaactatttcaaggcattccgcgcgaatttcctcaaggctacgggactatggattattttcggcgccacgggagctggtctcgtgtattcatgggtggtgttgcagatcacgccgctgctcatccccaaaatcggtctgaccttggtgtggatcatcggattcgaatgggtgtgggcgttgcaggcgcgcttcgagaactcctttggcggagtactggcgaacgcgttcatcttcggcgtctcgcgcattggtgccacattggtattggtcacgatcgacgctatcttcctcggcctgctcgtcgcctcatgggtctacatgccgcagggcctgttcctgctgatagtcctgggctacggatcggtgctcatgctgcatgtgccaattctcgagcgcgtattcgccgcatgcgtcgccctgtccggcacgtccgacgcatccgccccgtccgacacgtccagcaccacgtccccgcaaaggcaatagcacatgggcaaagtcacactgcaggacgtcgccaaggcagctggagtctccaccgccaccgcatcatgggcgatcaacgacaacaagaacgtacgtattcccgaaaacacgcgccgcaaagtccgcaacgtcgccgaacgtctcggataccattccaacgcgtttgcccgaagtcttgcgcgcggcaaatccgatctaatcggtttcatcagcgacggtgtcgccacatctccattcgccggacgagtcattcaaggcgcgcaggacgaagcatggcgcaacggcaaaatcctgttggtggtcgacaccgacggcaatgcgaccattgagcgaaaggccttttcgttcatgcttgagcatcaggttgagggaatcatctattcaagctgggtgcatcgctccattacgccacctgacgagctggaacgcactatgtccgtattggtgaactgctttgacgaatcgggtcgattccccgctgtggtccccaatgaagtgcagggcggacagtccgctaccgagttgttgctgcaggcggggcatcgtcatgttgcattcgtgaacgagccaaccgcatcgcctgcgtcggtcggccgcctcgaagggtatcgtcaggcacttgccgcacacggattggcatacgaccccgcaatggtcgttgacgcaacagccgaccaggaaggcggttacggagcggccgacgcagtgctgaagaccggtgccacggcagtgttctgtcataacgaccgcactgccatgggtttgtacgacgcgcttcgcgagcgaggcttgcgtgtgcccgacgatttgtcgattgtcggattcgataaccaggaggtcatttccgcacacctgcatcctgcactcacgacggtcggactgccgcaatatgaccttggtgtattaggcgtacgctcgttgctgacgctgaataagacgcccgacgccgactacgacagcagcgaaaccgatcgcatcgaagatagcaaaacgcaccgcttcgagccattgctggtgggctgtccttcagtgatgcgcgattctatccgcgcctatcgcgggtagtcggcagcgcgagacacgcgccattcctagaggtgtgcgtcatggcttgacaggtatagtttgaatgtttatcatattgcttaatcgcttaaatgcttaagcgattaaatcaaatcaggacaatacaataaagcatgtttctaatgcgcggagctgcgcagtagaaacagccaggataccgttcgccgcgaaactgcacacaagtccggtagcccgaccacagagcaattggcgagcggtcgtcaaccgaccatataggagtgataatcatgccaaagctgtactaccaattccctggcacgtggttcggcgattgcatgccgttcggcaagggcaacgagttctttctgtatcaccagcgagacaatcgcaatccggaaccattcggcgaaccgttcggctgggatctggccacaacctctgatttcgtgcattacaaggattgcggtgtagccgtgccgcgcggcagggacgacgagcaggatcagttcatattcgcgggatcggtgtttgaaggggaagggcaataccatatcttctacaccgggtacaaccgcgattacccccagcgggacaagccggcgcaggtgctgatgcacgcagtcagcgatgatttgtaccactggacgaaaacccagaacgccatcaccttcactccgcaagaaggctacgatccagacgattggcgcgacccgtgggtcattcgcgacgacgaacatgaccagtatctgctaatccttggagcccgtaagatcggcccgaaaacgcagcagaccggccgcacggtgaagttcacgtctaaagacctcaagaactggacgttcgaaggtgacttctgggctccgaacctatacacgatgcatgagatgcctgatctgttcaagatgggcgagtggtggtatcacatcgttacggaatacagcgatcggcacaagatggtgtatcgcatggccaagagtctagaaggcccgtggatcgcacccgatgatgacgcgtttgacggcagcgcctattatgccggacggaccttcgaactaggtggacggcgaatcctcttcggctgggttgccaccaaggaagactgcgatgacgtaaagaacttcgaatgggctggcaccttcgtccctcacgaggtctaccagcgtaccgacggcacacttggcgtgcgcattcccgacacggtctgggatgcgttcaacgaacgcgagcaaatcgtgacgaatgcggtaatcgacggtactgacgctcgccgtaacgccgtgctggccgagggctgcggagacctgtattcgtttgaagcggacgtcatgttcagcgagggaacgcgatccttcggtctccgcgtctaccgcgatgaggcaagcgagcgtggctatcagttcatcttcccgattggtgagcatcgctacgtattcgaaggcagcccgaacttcccgtggttcaactgtatgaatatcgggctagagcggccaatcgaactggttgccgggcgtgaatatcacattcagctcatcgtggacgacaccatcgccactctgtacgtcaatggcgtcgcactcaacgcgcgtatgtaccagcacccaggcgacgcattaagcatgttcgtcaccgacggcacgctcaccgtcacgaatgcgaccatcagtcgtggactcaaggaggtgtgagccacagtcaccaccgtatgtttgcgaaccgatacgttcgcctgtgattcatccgtacaccatatgaacgccgccgggcgcaaccggcggcgggcctccaacctacgcgcggccagcgggcacgacttgtgcaatgacgatgtccgctcccccgccctgtattgcaacaacaacgaagttatggcattccataggagggaaaccatgaagaagattatcaaagcaacggccgcaatggcagcggcaggtctgtctctggggttgatcgccgggtgcggttccggcgactccaatgcagataagggtcatgtctacttcctgagcatgaaagtagagcaggctgatcagattcgtgagcttgcagataatttcaccgcagagaccggcatcgaagtagatgtcgccacagcatcgtctgacacatacgaacagacgctgaagagcgagctcgccaaatccgaagcgccaaccgtgttcgatgtggacaacaacgacttcctcaattggaccgattactacgcagacatgtccgatacgaacatgtacaaggacctcaccaagcaggactacgccatgaagaatggcgatgaaattggcgctgtgccttacgtgatggagcggtacggcatcatctacaacaaggccttgctgcagaagtattttgatgccaactggtcaagcgtgaaggacgttgagacgatcaacaacttcgatacgctgaggaccgtggctgacgagattcaggcgcataaagatgacctcggtatcaagggcgcgtttacgtcagcgggcttcgatacgagttcgatcaagcggttcggcgatcagctcgcccacgtgccggtgtattacgagtatcgcgatcaaggtgtgacgcaacttccggccacaatctccgacacatacattccgaatttcaagaagatcttcgacctgtatatcactgattcgaccacgccggccagccagctttcgagcgccaccatggatgacgccaattcggaattcgcgcttggcgaggccgtgttcctgcagaacggcacgtggggttactcgcagatcaaggatcagaacgtacctgacgaggacatgggcgtgctgccgatttatattggcactgaaggcgaggagaaggccggcctgacagtcagcttcctgtacgttgcgatgaacaaggacgcttccgaaaaggatcagcaggcgacccgtcagttcttggactacatcctgcaaaacgatgatgcacgcaagttggtcaccgacgagatgggattcgagacaccgttcaagtcatatgcagaaaacggatacaagaccacgaatccaattcatcgcgccaacgacgcctacgcagtcaagggcaattacgatatcgtgatctatcctttgccgagcacacaatgggtgatgagtctcggcaatgcgatgctcgagtacgcacagggcaccggcgactgggatacggtcgcgtctgccttcgtggatggttgggcgtcggaatacaagaccacgcactgattcgaagcgaccggcattgaagtggtaatcgggatttagcgtcctgattaccactcgggaatacgccgcttagcatgctggtgtgctcgtgagcacgttgcttacgagcacaccagcatattccgtattggggtatgggttaccgccgctgcgcaccgtgacttgcaagtcctctcagtgacggaaattctagaggaaaatggctacgtcgagaatttacgtcactgagagcccgccagcgcacgaaattctcgcgcaatgggattattccgagaatttgcgtcgctaagaacccagagcatccgattattgcggttctttgcgctcagcagccaccagcgcaataggcagctagcgttctgcgtcagcagttcgttgacaaattcgctacccctcagccccgcttcgcgggccagctctcctgacaaggagagccggaaacgatatcaacgaactactggcgcaggacgcgccggtatccgaacagaacgtcagagcccgcgcagcagcggctcggcgatggcctggatcacggattcgggcatgtgggaatcgtcgaactcgtggccgggatagctgctcttggtgctttccagcgtatgcagcgcattgagcgcacgagcgccgtcagccttgatgagccggtaggcacgttccttggccagatagtcgatctgtgcgttgtacagcacagtgaacgcatcctcaatcgccggatcgtcggcgtaccgcagtccgttcgtcgcgtgaatcgacacggcctgcgtgaccggcgcatccgcaaccgtgacggacaggctcagcgcctcggtgtcgtacgacacatccggcacgacctcagcgccaccaaccgtcacaatcaactcgtcaacggcgaccggtgccacaccggtgaacgtcaccgtccacgtgcgctgctgcggcaccgccgccacattgccggccaccggggcaatctcgaacgcgttcaccgcaccatcggcctcccagcggaagtccatatgcgtcaccgcgagcgcggaatccgacggctgcgcctggttggtgccatcgtcctccttgaggtcgaacgcgccgttcgcgcccgggaacacggcaacctccagatagcgcggattatccacggagttgaggctgccgttgagctcctcgtccagcggctgcaacggcacgatgccgccggccttcgcgaagaccggaatgccatcgagcccacgccacgcctcgaacttgcggccttcggcagagcccgcctcgtaccgccgtccggtgaagaagtcgaaccatgtaccctgcggcagccacacgtcggttttcgccagctgcgcgttgcggtcggacggcgtcacgatcggcgcgacgatcagctcggtgccgaagcggaactcatgctccaccccgtacgcggtgacattttccggcgactgccagtacatcggctcgaccagcggacggccctcggcggcggcacgccagttcatcgtatacagatacggcagcagttcgtggcgcagacgcagcgcgtcatccatcgagcattccgtctcgggacggaagttccacggttccttgccgttaaacggcgaatcggtcgaatgcagacggttgatcgggctgaacgcgccaagctgataccagcgggcctccagctcctcgtcgcggtagccgaacatgtggccgccgatatcatgactccaccagccgtagccgatgttcgacgcagtagccgtgaagtacggctggaacttcagcgacttccacgtcacgactgtgtcgccggagaacccgaccggataacggtgcgagcccgggccggcatatcgcgagaacgtgagcggccagcgcccgtcacgggcggagtcgagataatgcatgtggttcagcatccacagcgggtcaagacccttctggcgggtcacgccgccctgctgccagtccagccaccagaaatcggtgcccagggcttcgagcccatggtgcaggtcgaagtacgcttccatgaatcgcggactggtcagatcgaactcgaccggctcgccgcccgccgggtcaatgcccatgtgttcggcgactttggcatagccgtcttcaaatgctcgaacgccgtcgcgcgggtggacgttgagcgtcgtgcgcagtccatgctcgtgcagaatgcgctggaatcgctcggggtcggggaagaattcacggttccacgtgtagccggtccatccggatccatacttcgggtcgacattgtcgaccagatgccagtccatgtcgatgacggccgtggtgaacggcaggccttcctgctcgaagcgatcgacaagctccagatactcggcttccgtgtactggtggtagcggctccaccagttgccgagcgcgaagcgcggcagtagcggcgtcgggccggtgagcttgtagaagtcctgcacggcttcgatgtaccgatggccgtatccgaagacatacagatccttgccggggtgctcgcgcggaatgacccacatgccgaatgggttggcctcgcccttgacggtggcggcttcggcgccttcgacgatcacgtttgatgcggaatcgtcgagcacggcccagccgtcgcgggagatcacgccgagccccagttcgatctcaccgtcgaccgcgtccagcgtacgcgcggtgccgcgcaggttgccgtcctgggcttcgccgtagtgccacgtattcatctgggaattcgccacgcctttgacgacgatgctcagaccttccttactgaacggctgcatgtcgtaggtgaggcgcagcgccggcgtatcgatgatgagcagcccgtcgcgctcggtcttcgtgaacttcggcgggtttgaagtgccgtccgcacggttcgcgccatccgcaccgttcgcgtcatccgacaaccaatcgcgattgacgatcatttgggtggcgtggtcttcgaacttgccgttgtcctgccattcgaggcggacgagcgattcggtgatgatgccgatgcgccaacggtcgccttggatgaccgcggccgggttcatgcccggatgggtggccagctgtggaaaggtggacattggtgtgctcctttgctcgtgttattttccacgttgttgttagtgtatccatgaaccatcgccgccgtgcgggcctcagacatcgcgatacgctccgtcatggtccttttcatgcggatatactgttaccgacggcgacacgcatcgggggcattcatgcggcgatggccgtggtgtcgcgcagcatcagctgcggggccacggtttcaaatcgcggttcggacaggggtccttccatcgcggcaagcgctttgcgcgcggcaatggcgcctaggtcattcgggcgttgccgcaatgtggtcaggcccattttggcgctgaaggggatatcgtcgaagccaattactgacaggtcacgcggcacgcgcagcccatattgcggcaaccggtacagcaccggaatcgccatttcgtcggtctggaagcagactgcggtgggcgtgggcgacatggtggtcagctgggcgagcgccgcgccggtcgtatcctcatggccggagcagcgaatctgctcaagcgtgacgtcaggatgggccgcagcggcatcgataaggccttgcagtcggttttccgcactgaagcgcagttgactggtgtcatccggcgcgccgtacacgtaggcgatgttgcgatggccgagcgaaatcaggtgttcgaaagccgtatgcatgcccagcttgtcgtcaatgcacaccgcgccgtcaagtccgatggtggacggggtgttgatgccgatgagcggcacgttcacgtctttcagacgactgacctcatccgggtcgatgtcgaacgagcagacgatgaccgcgtccacattgcgacgaaccggcagttcagtgaagaaatcatgccgttcccgcgcgttcgacaggccgtatacggagatgtcgtatccggccgggccgaatacggaattgagcccgcggaagacattggcattgaaccagacggcaatggtatcggcatgcaggagtgcgatgcggaacgattgtccggatttcaacgcggccgccgaccgggagacctggaagtcgagtttgcgtgcggcggcgaggactcggtcacgtgtcttcggcagcacaagattcggcttggcgaaggttcgtgacaccgttgacacggatacgccagcctctttcgctaccgcttgaatgctcgcttttgccatggcaacctcgctcatcaacagtggataacaatcccgctcaaaagacaacgttatcatacctaagcgagcaacatgcacgccacgctgtctatttagaagtgcaacgcccctgttcgtcggctaattctagcagttcgtcggtgaatgccccgggccgaacccgggttctagatagaagcgcaacacccgctctatggttggaagtgttcaggttctaactggagaaggtgttgcgcccatgaggaaagtgtattcccacttgtcggcacaggaacgcatccggatcgacgaattgcg

SEQ ID NO: 468 - DNA, 19191 bp, Unknown
  R48_24m  MAG No. k141_29820
cattatgagtccgacacggtcgtcggcgcctccccgtcgaggcggtgcatcgacacgcaggtcgaacgcaggagccgcaggctgttcgccaggttcgtccccgacaagagcgcgctggccacggcgcgcgccgaatacgacatctacaaggacatccccgcgccggcgcgcatcgaccgcacctgggacaacggcaccgaatcctcctgccacatgctcgtggacgaggcgctgggcatgctcgcctatttcgcggacccgtactcctcctaccagcgagggtcgaacgagaaccgcaacgggcgcatccgccgccaccttcccaagaggaccggtttcgacgacctgacggacgcggacctgcaggccatcgtcgatgagatcaacgacacccccatgaaggtcctgggctgggaaacgcccaacgaggtttggtaccgcgagctcggcaagccaatgtcaaagacaagccacccgaagacgagcgttgcacttacaaattgaattcgggaggagggaacccatgaccgcgaataacaagcgcgatgactggtggaagcaagctgtcgtcttcaggtctatccgcgtagcttcaaagacgccaacggtgatggacttagcgacatcgcaggcgtcaccgagaaaatcccctatctcaagacgctcggcgtggacgccatctggctgagcccgttctacccctccgacctggcggacggcggctacgacgtcatcgactatcgcaatgtcgatccgcgtctgggaaccatggacgacttcgacgccatggttgcagccgcacacgaagctggcatcaaagtcatcgtcgatatcgtgccgaaccataccgccgataagcacgtcttcttccaggaggcgctggctgcaggacccggttcgcccgaacgcgaccgctacatcttccgagacggccgcggcgagcatggcgagctgccgccgaacgactggatttccctgttcggcggcccggcgtgggaacaggtgcccgacggtcagcggtacctgcatatcttcgccaagcagccgccggacgtcaattggaacaatccggacatccacgaagagttcaagaagaccctgcgcttctggtccgatcacggcaccgacggcttccgcatcgatgtggcgcatggcctggccaaggacctggaatccacgccgcttgatcagatggacccgctggccgtgcagcatggcctctgccacgacttcacgagcccgctctgggaccgccgcgaagtgcacgacatctaccgtgaatggcgcgaggtgttcaacgagtacaacccgccttgattcgccgtcggcgaggcatgggtcgtgccggagcgccagcatctgtatgcgagcaccgacgagctcggtcaggtgttcaacttcgagttcgccgaagcgaactgggatgtggacgcgatgcgtgcggcaatcttcgtcggtctgcgctccgccgagaaggcgcacgattcgacgacgacgtgggtgatgagcaaccatgacgtgccgcgtcacgtttcgcgttacggcctgccgcgagtgccggcctcgtcgcatcaccagctcgccaaggactggctgctgcgcgacggcaccagctacttcgaagatcgcgagctcggcaccaagcgtgcgcgcgcggcgattctgatggagctcagcctgcccggttcggtgtacatctaccaaggcgaggagctcggcttgcctgaagtggcggacatcctgtgggatcgtctcgaggatccgacccccgttcttcacccgcgaacggttcatcgaaaagggtcgcgacggttgccgcgtgcctctgccgtgggtcgccgccgacgtgcctgcacccgctgaatggaacgcgggattcggcaccggagcatcgttcggattctccccggcgacgaaggccgacggctcggccagtgcggacccgcatctgccgcagccactgcggtacaaggattatgccgccgatgccgaggctgctgatgacgcgtctatgctgaacctgtatcggaccacgctggagctgcgcgctttgctactcaccgcaaccgccgatacctcggactgcgcggccatcgatgccggacacgacgtgatcgcgtactcccgccccggcacggacggacgccgtttcgccagctacaccaatttcggtgtggcggcggtgacgctgcctgccggtgaggtcgtgctcgcctccggcgatctgaccgctgacggcgctctgccgcaggacaccacggtgtggatcctgctcgactaattcttccttctcctctttcccctccgcggcttcccgggtcttcccgggaagccgctttttgtatgccttgttggacgtgtggatgtacagagaggggtgtagccgcgttgtagaggactgcgcgcgggcgggcatacgcggtggtgacgtgggcgtgaggggttgtataagccccaaatcagcccctcgtaagcgagatatgtggctcgtcagtcgaattgcggtttggcatgattctgcatgcctagagatgctagtggtctgccttataaataactgaaggaccagctttttctctccccccagtcagcttcgctgatagccccctcgtcagagggggcacataccgccgctgtctgcttcaaggcaacgtcccattagaagccgatgccggcttgcatggctccccttgtcagggggggcgtcccgcggaagcgggactgaggggtagtcatttaacgaacttccgacggaggacactagagagttagggtcgcgctccagtgcgcatacgaagggggggcttcccggaacaatccgggaagccccccttcggcttgtaatcgtcagcccttgacggcgccagccatcacacccttgatgatgtacttctggcacacgaggtagaagatgataatcgggatgatggccagcacgaggcagcccatcatggcacccatatccaccgagccataaccacccttgaggtactggatggcgattgacatggtcttgaaccggcgcatgtccaacgtcaggtacggcaggaggaaatcgttccagatccacatggcctgcaggatggcgaccgagatcacggacgggcgcatgatcggcagcgtgatttggaagaaaatgcgcggcacggaggcgccgtcgatcattgcagattcctcaagttcctgcgggatgcccttgatcacgcctgtgaatatgaacacggccagaccggcgccgaagcccagatacacgatccacaggccccacggagtgttcaggccgagcatatcggcgatcttggagagggtgaacatgaccatctggaacggcacgatcatgttgaacaggaacagcaggtacagggacttcgccgtgcggttgttcacacgcacgatccaccatgcgcacatggaagtgcacagcaggatgagcagcactgcgccgaccgtgaccacaacggtccagccgaaggactcgattagattggtgcgcttgatgccgcgtgtgtagttctgcaggccgacgaacgccttgccggtcgggatggagaacgcgttgcggctgatgtatgccttctgcttgaacgagttgatcaccacgaggacgatcggaaacacccaagccagcgagatgatggtgaacagcgtggcccacagtactggatgcttgactttctcgctcatgcggacacctccttgctagtggtgagacggttctggatgatggcgattagcgccacgatgatgaagaacacgacggccttcgcctggccgacgccctcgaagccggcgcggccgtagaacgtgcggtagatgttcagagccagcagctcggagctgttggacggggcgccgttggtaagggcgaggttctgatcgaacatcttgaagccaccggtgacggtcaggaacgagcacacggtgatggacggcatcatcaacgggatcgtgatctggaacagcgtctgggtgttggttgcgccatcaaccgcggcggcttcgagcacatcgcccggaagcgcctgcaggccggcgatgtagatgatcatcatgtagccgatctgctgccagcagtacagcatgaccatgccccagaagccgtacacacccgagtaggtgattgaacgaccccagtgggccagcacgccgttgagcaacagcagccagatgtagcccaggatgatgccgccgatcaggttcggcatgaagaacaccgaacggaagatattggtgcctgcgaaccgcttggtgagcatgtatgcgatcgcgaatgcggccacgttgatcacgatggtcgtcacgatcgtgaacagcaccgtgtacaccagtgcgttccagaactccttgtcctgcacggcattgacgtagttgtcaatgccgatgaactgggcgtccgtcaccgtgctgaacttgcagaagctcaggtacaggcccatgatgaagggcaccacgaaaccaatcatgaatgctgcgaacgtaggcagggcgaacagtgcccaccacctgcgaatcgctttgccagtcatagaaatcatgccagcctactttctcctccttgagcacacccgcactactgcgtgcgagtggtccgaatttgggattgttcagtctcctcagtgctgaatagcaccaaatcgaaccggtttaaggttaccataccacgcgtatgaccgatggtcaaacgttgtcacagaaagcgtgtccatcactccttcctcgctgcctaagcacagggcaaaatgctggaaatactgatttttggcatttccgatgcagaataacacatatgataacgttgtcttatcgactgctcaacacatggtcgacgccgtccgcgtttattgttgtgtcatagacgcatctcactgcaaaggagaccggcatgggaatcaacatcaaagatgtggccaacaaggccggtgtctccgtctccacggtctcccgcgcgttcgcccgaccggagctcgtgtcgaaagcgacgcgggccaaggtgctggccatcgccgaggagctgaacttcttgatccccccgctcggccatggtgctcaagtccggccgcgcgctgcgcgtggctttgctgatgagcgatcacattcgtctatggttcagcgcttcgatcatcgaagggctgaaccaggtgttccacgcgaacggctatgacctgtcgatcttccagatcttcagcattgaggagcgccgcgagttcttcgacatgctgccgatacggcgcaacgccgacgccgtgatcgtgccgtgacgctgcacttcagcgtgcagcagcgatacgaatcgttcgtacaggtctgcgaacaatccggtatcgacctgaccgccatcgtcatcgcggacggcgatgaccgcatcagccgggcgaccaccgaactgctttcgatggatcgcatgccgaccgccatcgcatgccaagaagacggtatcgcgattccgctcatgttccagctggcgcgcactggccttcgcgtaccgttcgacgtgtctatggtcggatacgacgacagcttctatgccaatgagatcggattgacgaccgtgcggcaggatccgatcgcgatggcgacatgcgcggcgcttaaagcccttgatctcatcgagacagggaagacggccaagccgtttgaggtctttcccgcgcagatgctggtgcggtccagcacgaccgaggcgaagggctgaggggctgacgaatcccgtcagccgctgaccagacctcgccgtaaaaacggggttccgatatggtatcgaaaccccgttcgctgacgttgcgtgatcatgggctaacagccgactggggcaacgctttcacgccggagtcggactcaggacgcgtgcgcggccgagtactccttggcccagccgtccacgaacgcggtcttgaccgcatcccagctctgggtgccctgtgcgtactcgaggagcgcgttgccgagatcattcttccactgctcggacggcatcatggtgaagttccagctgacctgcgtcttgccggacttctgatcggcgacggcggccgcaaccagcggattgtcggtcttgatgtcatcgaaggtcttgaacggggtggtgaagcccatctcggtgctcagcgcctccttgccggtgtcagaagtgatgacccacttgaggaactcggcggtggccttctggtcggcctcggaggccttggagttgatgcaccagtagttctcggagccggtggcgagtccttcgtcctgctcgtccgggtcgccgatgtagatcggcatcatgcccacctgctcggcggtcatgccggccttctgcagattggtccaggcccaggtgccattctggtagaaggcggcctcgccgagtgcgaactcggagttcgcgtcatcgccggtcttggagctcagctgagacggctcggtggtggagtccgtgatgtacaggtcgaagatgttcttgtagttctccaggcaggtgcccttgatggtggccggctgctcgtgatgttgtcttccttgaactcgtagtagagcggcaggttggccaggtgggtcttgaagcgccagtcggagctggagtcgaagccggcggaggtgaacgcgcccttgatgccgagctcatccttgcgggcctgcatgtcgtcggcgacggccttgagcgtcttgaaggagtcgatatcgtcgatagacttggccttcgcgccggacaggccgaagtacttgttgaggatgtccttgttgtagatcaggccgtaggtctccatggcgtacggcacgccgacgaccttgtcgccgtccttgagtgcgacatccgggttctgcagctgcttgtagacctcggtgtcggacatgtccgccgtgtagtccttccagttggcgtagccgaccgggccgttgacctggaacagggtgggggcgttggacttggccatctccgacttgagctgctgctcgtaggtgttggatgccgcggtctccaccgtgacttctacgccggtttcgtcggtgtaggcctgtgccaggtccttccactgatcggcggctttcggcttgaagttcaggtagtagaccttgccgttgtctccgacctcggcgttggagttggtgtcgctgccgcacgcggccatgctgatggacatggctgccacggcgaatatcgctgctgcggatttgattgtacgattcatcttcgacccttaccctaaatgctaccggtcccatcttcgttgagtcggcgccaccggcaccgttgcttccggcgacagaatctattgtgcactgtttcccagaagaatgcaaacgagtgcaatccatctctcggcagaacggctaacctcggatagacaaagtaatcaaaaccgcacatttttaccactgttgtcgccgttttacagactgcaatcgattgcaataaacgtttgcaactgtgtcattcttcgcgcgcgattacgtcactccctgcgtgtcgcgggcattattccgctccgaggcggcccagtggtttgtttcgctaatgattgaggatttcggttttgtgtctctcccccagtcagctacgctgccagcccgtcccgcaagtatggacgcgctccgcgcggcagcctgctagctcgcttgtcggctcgcatgttgtctacagacagctcttcacggcaacgtcccatcagagggggcaacgtaccgccactgtctgcttcacggcaacggtccgtcaaaggaggcaatgccgctcagacgaatacaagacagaccactagttcgcttcgtgaatcctctgcgctgcttcggcgtccttcgcaccaacgcaatgaggcgggcgaagagcatggaatctgctcctcgcccgcctcgtctcattgcgctcgtcaccgcggccagcggtacacacgatccggcagcgtggggaatgcggcatgcggctcacgctgataccagtacgcgatcgatgccacgtcgtcctgccgctcgaagaagccgcgatggcccacgccgatctgctgcacggtcacgcgcagatcggagcggaaacggatcggatcggggatgtgccagcgatagaagccgcgcatcggcgggcagtcgtcgttgtgataatcgttgtgcaccagttcatcgtgcgcggagtaatacggataccccatgtaaggcgtgcagtagttctgctccacggtcttcccgttcacctgcttggcgaagctccacgagccgccgaagtagtcctcggtaccggtgccgcagatcgtcgggtattcgcggttgccgtcgatatagaacttgaactcgccttcgccccaccagtaccgttcgagcgtggtcagcgccagataggtacccacatactgccccgagccgcgtacgccatcgagcaccacataatcattgcccagctcggtcagccgctggcgacgccactgcgcatggaagtaggcggtatcgggtggcagtggatcgtcgtacaggctgtagtcgatctgatagaagaacgcgccgattgtgttcacatgctgattctcgagcgttatccgcgcgtgcctagcgaacggcatcgggaagaacatgttgaacccgcggttgggcaccacggccaccggttcggagttgacgaggcatgcgcggccgaatccgcagcagaagaaatcgccgagcgggcactccacgctcggctcgctttcgtcatcccagtagaaccgcagcaccagatcacgcagcacgaaacagtcggcgtccgtggtcttttcgtcgacggtgatccagatatgacggatgcagccggggccgtcgatgtcggccaatgtgaccgtttcgccactgggaatgttgcgcaggcaggggctgcccttgcgcgacgggcccagttcgctggcggcgatgccgccgcggccgggctccccggtcggattctccgcgttgatcgcacggctggactcacgtcgtagggtcatcaatgaaccaaggtcggcaatcatcatcaatctattccttccattacacgaaccattacgcgaacggttccggtgccgcacatgacgcacgacgccggaaccgtcctatgttgcggcagtcgccgcgatgccactgcttcgtctatgacaatgacaatggcggtcgccgcacctgctgcctaagtgctcgaatcatgcgcgcatcacttgtgcaccggcggcagcatgccgaagttggactcgtagtcgttccaggcgctggtccaatcgtcgagatacgccttcttgacgccgttccagtcgccagtgccctgcgcgtactcgagcagtgcgttggccacgccgtcggcccatgcctgaccgggaatgtaggcgccgtggatcggcgtcagaccgtcggattccagcttgagtgcggacttggtgagcgggttgtccggctggaagtcttcgctgtcgaacgtggtgaacggcacggcgaagcccatgtccttggcgaggatcttcttggcgtcgtcgttggtgaccatccacttgatgaagtcgagcgtcgccttcttgtccttctcggatgcgttcttgttcacggaccaggagatgtcgtagatggagttcgccgcatacttgctttcgttcgggaagcccatgtagtacggcagcatggcgaggtcctcgtcggccacgtcgttgtccttgatctgcgagtaggcccacacgccgttcgggtagaacgccacgcgaccggtggagaactcggcggtggaatcctcgtagttgaccgagccgagcatggtgttctcggtcgggttgtccttcatctcgagatcccacagggccttgtagttgtcgaggtaggtgcccttgagctccttctcgaagtccacgccctcatcgatgtactcgtaggcgaccgggacctgggtcatgtgcgacgcgtaacggtagtagttggaggcgtcgaggccgggggtggagaaagcgccgtcgaggccgaggtcgtccttgtgctgctggatgctgtcggcgaccttcttgagcgtggcgaaatccttgatgtcatcgaaggtcttgatgaccgagtagctcttcttggcgtactcgttgatgatcttcttgttggcgatgatgccgaaccattcggcggcgtacggcaggccgtacacgtcgtcgccgtccttgtgggccatctgcttgccctgctcgttgagcagcttgtaggcttcggagtcctgcagcggctcgaggtaattcttgtacttggcgtactggtcgaagccgccgatgccgaacatggtcggggcgttgttcttggccagctcggacgacagcgtggattcgtagctgccggaagtggcggactggatgtcgacctgcacgccggtttccttggtgtacatgtcggcgagttcgttccactggtcgacgacttccggcttgttgttcaggaagtagacatggcctgcgtcgctgttcgtgcttgagccgcatgcggccagtcccagcgtcaacgctgcggcgctgatcaggacaattcctttggacagcttattcatggatttcctttcttcatctgcggccacggagccgcctcgcacttgttgttgtacggggtgccggactgcatacgtcgccgttggtgcagccggttttgctgtagcgcatttcgttatgcgttggagtggattattggtctggctcaggtgttgcctcgttgcgtaagcatacagtcgaaccggtttgatttataggatatcgaaccggttcgctatcgtcaatcgggcgtgttccagcgtgtcgctacgtagccgggggtgagtcacggaagggatggtgcggcggcagtggtggcgcgcggaatcagcgtggctctcaccgtggtgaccgtttcgctcaactgctcgcctcgcatgagggcgagcagttgttgcgcggccagtcgcgccatgtgctgcgggtcctgatgcaacgtggtcagtccggcgactgcggcggtcggatggtcgtcgaatccgatgatcgacaggtcttcggggatgcgtatgccaagctgccgcagatgccgcatgatggcgaccgccgcttcgtcggtttcgacgcagatcgcggtcggccgatgctcgctgctggcgatccggccggctatggcagccatggcctcatcttcgctcatggcgtccatgtcgctggatgatgcgaacgcgaccggttcggcgtcgggaatgcattcgcgcatcgcgtcgaggaagaaatccttgcgcagatacgagctggcggggaacggtgccggtttcggatgtgcgacgtatccgatgcggcgatggccgagttggcgcaggaatcgtacggcgtcgttcatggcacgcttgttgtcgagcatcacggatgcgggcaggcgggaagcgctccgtgcgtcgagggcgaccgcggggatatgcatgctggaaagcaacgccgattcgctgtcgtccagcgagaatgacgggaggatgaacccatccatattgcgtccgttgctgggcaggtcggcgaagaatccatgcagttgctccaggtcgcagacccgtacgggcacaagatcgtagccgtggggttccagcgtttcgagtgcgccttcgatgcagctcgcgttgaaccatgacgcaatcgtgcagccgaacagcatgacgacgcgcatggttttgccggatgccagcgatgatgcgctgcgggacagcgtgaaatcgaggcgacgggcggcgtccagcacgagttgccgggtggacggccggacgctattcatgccgcgcaatgcgcgcgataccgtggcgtcggagactcctgtggctatggccacgtcgtggattgtcgccatgatgtctcctttcgctgtgtggtgggcggtgtcagatactgtagccgtgctggcgccgccgcaatcgctgcgacgtacgcccatgcatattaatagcatatatgtatgcgcttacattcttttgtaccacgatgtgcgcgttgttagcggtcacggtttgattgtgtttgcaatggtttaccaatgttctgtattgtgcgcatgtgatgtgacgcgcaatctgcaggcggcggttgacggtgtgtaatgtaagcgctatcattttgttgtgtcaatcaatgcatggttgatgcagccggcatccgatccggcagggcgaccgcaaggtcgtacacggatatgtgcatggaggcacgtatcacatgagcaaggagagccattacagggaggtaatgatgacaggaagaacgtggaacaccatcgccaaggcaatcggcttggtatcagtggcggcgctcagcttcggggcgctggctgcatgcgggaacacgaccgcggtcgacagcagcaaagggcgtgtgtactacctgaacaagaaggcggaagagcaggagaaatgggaggccctggcgcaggcgttccaggacgagaccggtatcgagacccagattcagctttcggccaccgactacgaccagacgctgcgttccgaaatggccaaggacgaggcgccgaccatgttccaggccgacggcccgagcttcatgtacagctggctcgattatgccgccgatatgagcgactccaagatctacggcgagctgactgacagctacaaggaccgcacgctcaagaacgccgacggcaagccggtcggcatcccgtacgcggtggaaagctacggcatcatctacaacaagtcgctgctcaagaagtatttcgatgcatcgtggtcatcggtcaagtccatcgacggtctcaacaacttcaaggcgctcaagaccgtcgccgatgagatccaggaacacaaggacgacatgggcgtcaagggcgcgttcacttcggccggcatggattcctcggcgttccgatacaacttccatctgccttctctcccgctgttctacgagtaccgtgatgacggcgtcgatatgaactccgtgccggaatccgtcaagggcacgtatgtcgactacatgcagaatatctacgatctgtacatcaccgatgcaacggtgccggccagttcgctttcaggcaagaccatggatgatgccacttcggagttcgcgctcggcgaggcggtgttcttccaggacggcgtatggatttactccgcattgcaggatcagggattcccggatgaggacctcggcgtgctgccgatctacatgggcgtcgacggcgaggagaagcagggcctcaaccaggtgatctccaactactggtgcgtcaattccaagtcttcccagaaggatcaggaagcgacccagcagttcctggagtggctcgtcacttctgatgccgcacgtgaatccatctcgcaggacatgggtctggtcacgccgttcaagaccttcgacgaggaggcatacaccgtcaagaacccgctggtcgaagccaaccgcgagtaccaggagaacggctactacgacgtcatcagcgtctccaccgtgtcccaccagtgggaaaaggatctcggctccgcggagctcaactacgcccaggggcagggggactgggatgcggtgaagaaggtcttcaccgatgactgggccaaggaatacaagctcgccttcgccaagtaagcgaagtaatcgacaggcgatccgaggggtcgcagcgtgaggggcgtccgttgccatagtgctggacgtccctcacgcgttgttgtgttgttgcgaactggctcagcgcggcccgctggacagcatgtggccttccgacttcgcacgcaacgtcccagcgaagccgaatgaccatacactggcctgcccgcgtcgcatgtgcggcaattacgttttccaaccatggaagacggtatttcatgcacttttccaaccgtgcacgtgcggagacggctgagacggttggcgcagagacagctgaggggagcctccatacggaagactcccctcatagagacgctactgcaagtcagcggtcatgcagccggtattggccggctgcgaggcgtcatgcaaggtggctacgcatgaaccactggaatttctcgagctgctggacgtgatcctggatgacgttggagctgatcacatccagctcgtccagctcggcgatggccttgcggtcgtcggcgatgaaggcgtcgtagtactcgatcagcgccttgagatacgcctcggtgccggcgcggccttcgacgtcgaacggcttccgcgtgcggttgcgcatgattgcgtcggtacggccgtccggcgtgccgcccagcgtggcgatacgctcggcggtctcatccgcctgagccagcacggattcgacctcaggatcgagcatcttgtgcacggcgatgaagttcggtccggtcacattccagtgtgtatgcttcaggaccagcgcggcctcctgctcctagctcagtcggttctgcagaatcgcgatggccttctcgctggtcgcctcatcgagtcccggcgcaactgattattgggaggtttgagcaccggatgttattccgattcggcactggggttattgtgggatggcaccggcgtgcttggtattgggcactgccggtgccgttcctgtttgcgagactggttggcggctaccggccgggtgcgtgttccctcatgttgtagtcgccggtttctatccaggtggtgttgtgcacgatccggtccatgatggcgtcggcgtgggtgccgcctccgagtcgttggtgccagtccttttgggggtattgggtggcgaacagggtgctgccggtgtcgtgtcggcgttccatgagctcgaacaggaagccgcggaagcgttcctcgggcgggtcgaacagccattcgaccgggcgcgaggaccgtgtacgcgctgtagcgtttgagcagtctggaccgtccttggggcttgtcggcggcctgacgccattcctcctcgaggtcggggacgcggatgtagcgggaacggtaccggttgcggcacgcctgacgcgccagggcgcagacgatccagctcttgccggacccgcagtagccctgggcgacgatgttgcggtgtcgcgtgacccatgagcagtctgagagcgaggcgatcagttcgcggctgatgccgcgttcgtcgagcaggtcgagggtgcgcaggtcggcctgcgggtagcgcagcctcgcccttctggccagtccgccgatgcgtttgtccgtgaacgcggcgtgcgcctcgtcgaccgcgagttttatacgttgttccgcgttcaggggcgcgcatgcgtcgtcgtcctgatgcaggagcgcgtcgagaagctcctggcatcccatgtcgcgcagctggtggcgggtttttgttcgtcgagcctcatcgcttcgtctccctcgcgttgtagtcggcgccgcgcacgtatcccgcgggcggttcgacgtcgagacccttgactttcgggtcctcgccttccatgacctcgtggtcctggccggtgtcgaggatcgtcttcaattgccggtggcggggcgtgttcacgaccctgcgggccacgtcgcacgcgttctccagtcgttgccgcccgtagcggcgcgacagcctcagcaccgccagagcggggtcgatggcctggtccggcctggcatatgattcgaagatgcgggatatgacgatgaccgcgttcgggccgacgcccgacgcccatgccctgacccggggctcgtcccattcccgccagttcgcctttttcggcaggtccacgtcgcgcgtggaggaacggttcgactgaacggcatcgaacagccgatgcacggcgacccgctggccatcgtgccagatctcgagcgtgcgggcggtctcgcgaagctcgacccgggtgccgatcagccggtggggtacggaataccggttccgcctgtaaacgatatggcagtcgttggcgactttcctcgtgccggcccaatcgccggtctcgtacggcatgacgggcagcgggatcatcatgggtcgctcctcggactcgaacaccgccaggcggctgccctcgcgtttctggaaaggcgcggcgttgtacgcgtcgagccagtcgcggatcgcccggttcagttcgtcgagcgaatggaattcccggtcgcgcatcgcgccgacgacggcccgttcggcgtgcaggacgaggttctcgccgctgggcttgtccttcggccgtttcaccctgcccggcagcaccgccgtggaatagtgttcggcgaggttgcggtaatggtcgtccggcacgatctcgccatcgcggggatggctcacgacaccggtcttgaggttgtcgcacacgatcctgaccggcaccgcgccgaaatagtcgaacatgcacacatggcagtccagccacgaggattcgcgcatgtcgccggtcgcgcgcacgaacgagtaacggctgaacggcaggcacccgacgaacaggtacgccttcgacgtctctccggtgaccgtgtcatggatcggcatggtcgccccggcccagtcgacctcgaccgtacgcccggccttgcgctccaccctcgaggtgacgcccagacgcagcacgtaatcggcgtacagcttgcagaaccggtcgtagcccatgaacggaaccccttcacccggcacgagtccgcgtactccgcgtgcagcagcttcaacgtgacgcccacgcgccccaattcgctgtgcacgcgcgcccagtcgggctgctcgtaggcgctctcgatcacacccctgccgggaaacagcagggcgtacacctcgtcatcggttttgtcctccacaccatcgtaggagacgttaagccggtcggcggcgtcgaacacgtcgatcacgctatgcttcgacataccgtagcccacggctatcgcgttgcgcgacaatccttgctcacgaagcctgagcacgagcttcgccttgattctgcgtaccatcgttggcactcctttcgccatgcgtccatcacatggtgaaaggagactaacccaaacggcgccgaaccacaataactttggtgctaaaccacaatgatcccgtgaaacggcaatggtgccgaactggaataaccaacgtgctcagcaagtcaaatattcagcaacaaatgcaagtgtcatgatgttccttcctttcatcttcaaggaacgtccctcccagtctacgcgcccttgtccgacggctgaccgcgctgtggaaggccgccaactggtcatcgggtctttgatcgggaagatggcgcgtttggcgtgtcgccaatgatgtcgcgccttattggcatttgtgctcggttgagagctgttgcgcaaactgcacccaccggtaaaggaaaggggattctgcagttcattcatgttctgtggaatcgttggaaaacgagattcacaggcagaatgacatgtacaggggcaggaagcggcgtatgccatcctgactcatctggcgggggtgcagcacgtattcttcgccggctcgttgtgtgaatttcgcgtggaacttgtctagggacaccgtggaatagcgtttgccggatttgacctctacagggctgactctgggtttcatggctgcgtccgggtaaggtcggatgatcaggaagtcaatctccatgcgctcctcgcggatgctcgaggattttgagtagaaatacaggtcgtgcccggatgcggtgagctgctgagcgacggcgttttccgcgagcatgccctcgttcacgccgtccgctcccagcaacacttgccggtacacttctggcaaggcggagcccgaggcggagaatgccatggtagacaacagtccggtgtcagccatgtagcatttcactgttgcgtcgtcggcgctgagcgccagaccaattgacgggtcctcggcgagggtgcataggttgaccgtcgccgcttcgcgcatccaagagaaggccgtcatgaaatcacgcgatctcgagccgttctcgacttgcgtgtacaccaagcgcttctcgtgcttcgacagctgaccgggaattgcgtcgaacactgctcggattcgtttagccgccgtgccgccgtatttctcgatatcctcgcggtagatcttgaggaccatgcgcttggccctgtcggcggccgccatgtccctattcggggcgtaggccgtgaccgactgtggcatgcctcccaccagcacgtattcgcgccataggcgcgacgccttgcggtgcagcgagtccggcaaggggctccccgatgcaaacgagttcgtgatcatctgagccagcgcctcttcgcccatggcccacagaaactcctcgaaatccagaggacccattttcatggactcttcctcggagggaatcagtatgcccttcacgttttcgttaagggagattagggatcccgtctcgatgaagtcgtaccggccgtcggcgaccaagtgcttgatgaactcgcgggctggcgggaacagctgcacttcgtcgaagatgactagggacttacgttcggtcagggtcacgcccaacatggcgcttaggtacaggaagaaggagtcaaggtccccccttgtgtcgagcagcgttcgacgaaactcgtctcccaccttggtgaagtccacgagagcgtacgaattgtattcgttgcgcgcgaactcctcggcaatggtggatttgcccacgcggcgggccccctcgatcaacatggcggtgtgacctccgcttgaccgcttccattcgactagcttgtcgtaagccttgcgccgaaacatggctcctcccttatgattgcacgtttctaagggttaagtatagtacaagattgcacgtttctaaggtttcgcacggtgggtgaattgcacgtttctaagggttaacgaaatttctgttgggaacacttcgctggccggccccttttgttggagagccgtaatcaacgaattaatgacgcgggatactgggaagaagcctaggcggcatcggaacccgtcacagtatccggctgcgaggatgcatcggtggcgccggctttgcggacttcgatggtttcgatgcggcggccatccaccttggtgacgaccatgttgtagccgtcgtcggaatgcagcacgtcgcccaccgcacccatcttgccggtcttggacaggaagtagccggcgaccgtctcgtacgggccgtcctccaattcgatgccggtcagatcggcgaagtcctcaatggtcatgctggcctcgatcgtggccacaccattgacgaacgcggtgcgggtggtgcgttcgccgcccttctcgctgggcagatcgtactcatcgcgaatatcgcccacaagctcctcggtcata

SEQ ID NO: 469 - DNA, 6859 bp, Unknown
  R48_24m  MAG No. k141_30181
caggcattggcctcggtgaccacgcacgatctgccacccaccgccggctacctgaacttcgaacacgtcaagctgcgcgaggagctgcatctcctgagcgagccggtggaggcgttcgccgcctcggcgatggccgaacgcacggccatgatgaaccgtctggtggagaacggctatatctcacaaaccgtggcggatgatgtggaaggccatgtgcaggagatcgtggaagcgatgcacgccatgctcaccgatacgccgtcgctgctgctgcaggcagcgctggtggacggcgtgggcgaatgccgttcccagaatcagccgggcacttccagcgagtattcgaactggcgcgtgccgctggcggacagctcaggccacgtggtgcataccgacgaggtcttcgacctgccacgcgtgcagtccctagccgccgtgatgcgccgagagaagcggtgatcgattccgcaatgggaaattggtctaaatcggcctcgaggggctgatttggcctttcccggacatctacttccgtttcaaggggctggtgcccaagtagacccaacgcgagaacggcggaatgacgttggcacaaagtcgtttgcacttgtggcttcaccggcaaggagccccttgaaacggaagtagatgtccgggacaccctaaatcagcccctcgtaatcgagatagccgaagacgacgacttgttatgggcatgttatcgttgtcatgacaatgattgttcgcgacggcgaaggagcgacggcatatgaccaaggcaagcattcaggcagtggcccgcgaggccggcgtttccgtatccacggtgtcccggaccttcgccaagccggatctggtgcttcccgagactcgagaccgagtgatggccgcggccgaaaagctcgactactcagtctcacgctcggccgccgccctaaaatccggccaatcgttccgtatcgcactacttgccagcgagaccatcgccagttggttcaattcgaacatcttcgccggtcttgactcggcgctgcgcccctccggctacgacactgtgccctaccccatgcgcaacgccgccgagcgccacgacttctttgcggatttgcccgtgcggcgcaatgcggatgcggtgattgtcagctccttcgacatcgaaccggctgaggtggagcgactgaagcatatgcacgtgccgattgtcggcatcaacatcccctccaccgatgggttcgacgcaggcgtgagcattgatgattacgccgccacacgttcggctatcgagcacctgattgcactcggccaccggcatatcgcgttcgtcggcagcgcaccgaccgaaaccaatatgcgctacagtgccgaggctcgtttgcagggcgtcattgatgccgctgccgcccatccggggatcgagctaacgcccctgagcattcaacgcggtcttggcgaaagcaacgcggcattgaacgccgtactgaacgcctcccccagcatcaccgccttctgttttgaggatgatgaaatggccgcgcccgtgctgtatcgcctgcgtcaatacgggcggcgggtacctcaggacatttccatcatcggcttcgacgattccaccctgtccgccgccgtgggactgaccacgctgcatcaggacccgttcgcaatgggcgcgactgccgggcacatggtattggatgccattgccggcaagtcaatcgaaccggcattcgtacggccggacactccgctaatactgcgcgaaaccaccgcgccgcctgccgcgacagcagcgcccgcgcaggcgtgagcacgttaccaccgcaaaacgccgataaatcgatttttgcatgcgtaattcacatgatatcgttgtcatcatcaatacaacggtcgggccttcacacagcagttcgggcgcgaccggaacaacccaaccacaacgcacccggaacaggagggaatcggcatgaccgcaaataacctcaatgacgactggtggaagcaggccgtcgtttaccagatttacccgcgcagcttcaaggacgttaacggcgacggcatcggcgacatcgccggcgtcaccgagaagatggactacctgaagagcctcggcgtggacgccatctggctttccccgttctacccctccgacctagcggacggcggctacgacgtaatcgactaccgcaacgtcgacccgcgcctaggcaccatggaagacttcgacgcgatggccaaggccgcgcacgaggccggcatcaaggtgatcgtggacatcgtgcccaaccacaccgctgacaagcacgtgttcttccaggaggccctcgccgccgagcctggctccccggcgcgcgaccgctacatcttccgcgacggccgcggcgagcatggcgaactgcccccgaacgactggcaatccttcttcggcggcccggcctgggcgcgcgtggccgacggccagtggtatctgcacctgttcgataaggcgcagccggacgtcaactggaagaatccggacatccacgaggagttcaagaagaccctgcgtttctggtccgaccacggcaccgacggcttccgcatcgacgtggcgcacggcctggccaaggacctcgaatccaagccgttggaagagctcggccgcgaatacagcgtggtcggcgtgctgaatcatgacttcagccacccgctgttcgaccgtcgcgaggtgcacgatatctaccgcgaatggcgcaaggtgttcaacgagtacaacccgccgcgctttgccgtggccgaggcgtgggtggtgcccgagcaccagcacctgtacgcttcgatggacgagctgggccagtccttcaacttcgacttcgcgcaagccaactggtatgccgacgagttccgcgaggccatcgccgccggactcaaggcggcggccgaaaccggcggttccaccaccacgtgggtcatgaacaatcacgacgtgccgcgcagcccctcccgttacggcctgccgcagatcaagggcgcgccctaccaccagctgccgcacgactggctgctgcgcaacggcactacctatcccgaggatcgcgagcttggcactcgccgcgcccgcgccgccgctttgatggagctcggcctgcccggcgccgcctatatctatcagggcgaggagctgggcctgtttgaggtggccgatattccgtgggatcacttggaggatccgaccgctttccacactgctcaggccacgatggacaagggccgcgacggctgccgcgtgccgctgccgtggaccgccgccgatgagccggccttggccgacttcagccgtccgactccggccgatgacggtaccggcgagaaccatgtgccgctgtgcgccgccggccagttcggcacgggcgcttccttcggcttctcgccggctacgcgcgctgagggcgtgacgccggccgccgacccgcacctgccgcaaccgctgtggttcaaggattacgcggtggacgtggagcaagccgacccggactcgatgctcgcgctgtatcgcaccgcactggcgattcgccaggagtcgctgaccgccacgcgcgacaccacggccgagcaggtggacatgggcgacgatgtggtggcgtacacccgcgcggcggttggcgggcgggtgttcacctcaatcaccaacttcggcaatgccccggtcgcgctgcccgatggctcagtggtgctggcgtccggcccgctgacccccgaaggccagctccccaccgacacttctgcgtgggttatcaagtagagcttttgcgagcttacccgacgccagtcatccatcttctccggatgctggcgtcgtcctttttcccggctaagctgtctccatttcggggatgactgccctttctttccattcgcgacatgccaaccccgaaatacttaataatattctatatacttaacaagagatgtgaatcttacagattttcgttaaggattgaggtcgacatggatgccgagcattacattcgcgagacacttggtctgccctgccaaatcacttcttgggatggcactgcctcactgccgctatttctgaccaacggacggacattcagcaaactcaccatcgacaacacgagcatgctaatcgcgagcggagaggctcacccattcagcatcacacgcgtcaccgccgacgccagcaggcttgagcagcggacggatctgcccattgtctttcagtttccccggctttctgcataccagcgaaaagccttgattcagaatcacgttcctttcatcgtgcccggtacccaactgtatatcccttcactgggcatggtgttcacccagcgcatctcctcacggccgctggagaacgcacaggatatcgaggtgcgacccttctcccccgcaacacagctggtctggctgtatttgctctactccaacgagagcaaagtccaatcagatattgcccgagcgcttcagtttaccgaagctcaggtcagcgttgccgtgacgctgttagaacagctggcattcgtgcaccgcaccaagcaaggccgcagcaatagcgtcgaactactgacttcaaggcagaccagccgacttgatttactgaaatcatcttggcatctcctgaagtcaccaatattcagcaaatataccgtcacgaatcgcaatcgccagatgattgccgacgagctgattccggccggcgaatttgctctttcgcgcaggacgcaactggccaccccaaaactgcgaatctatgccgttgaacgtcattggctcaagcagcacaacaaggaactatgcattatcgaccccgctttggaaaaggtgccagataatgcatatattctggagctgtggaggtacgatccccgcctacttgctcaatatacgcaggaagactaccttgccgaccccatttccacggccctgactcttggcgagattgccgacgaacgtttggaagacgccatacaagaatccatccgcaatactttctcaggagtgacaatatgacacaaggcctgcagctcatcagaacggcctttgccggctacgaagattcttacgtaatcatcggcggcaccgcttgtgacatcatcatgaccgacaacgacctggacttccgagccaccaaagatattgacatggtgctgattgccgagggacatcttcgcgagtttgcacaacgattgtggtctttcattcgcgatggcggatacacctctatcacgaagaactccgcacagcctcacctgtaccgtttcatgcaccccagtacgtacgggtatcccactatgatcgagctattttcacgtcaccctgacttccctattgtgccgaactcgttcctgacgccattgcatattgcaaacgacgtttccagcctgtcagccatcatgctgaacgacagctactatcggctattgcagcaaggccgcgaatcaatacaaggcatcagcgtgcttaacgagaaatatctcattcctttcaaggcgaaagcatggttggatctcaacgcccgagaacaacatggcgagcacgtagacggaaaagatctcaagaagcataaatatgatgtattccgtttggctcaactacttgctccagaggatcgcgtgtctctcaacgacgaggcctaccatgatctcgctgattttcttggggaaatatctcatgaaacgcttccgataaagcagctcggcatacggggaacacagcaagacatcattgatttgatagccggcgtatatcaactgtctatcccaccacgcgatgaatcttctaccacgatgtcagcgtaattttgtattccgcggaataaagccgttttgcgtcaccacgtggtgggtagtttgctacgtcgtggggattttactacgtggtggaggtttgactatatggtggggccatgcgaaaggccgccgctccgaatgaatcggagcggcggccttttggtacgtgctgggtactctcctcaggcgcttatgcgccagcgggagctacaggggctcactgaacctgggcgcgggcgatcttgccggtgaaggagttggcctcgtcggcatccttgacgccatccttgttccaggagaacatggcgcgcagcttcgggccgacggtctcgatgcgctcgttggagtacttctcctgcagttccttgaagtgcggggcgccggcatcctgatcgtcgatgaactccttggcgaaggagccgtcctggatgcgctgcaggtggtattccatgcgcttgcggcagtcctcgttgatgacggtgttggtgtagtcgccgtactgggcggtgtcggagcaggaccaacgagccttgttcaggccgccctcgttcatcagatcgacgagcatcttgagctcgtggcagacctcgaagtaggcgatctccggctggtagccggcgtcggtcaggacttcgaagcccatctcgacgagcttgttcacaccgcccatgagcacgttctgctcgccgaagagatcggtctcggtctcttccttgaaggtggtcttgatggcaccggcgcgcagagcaccgagggccttggcgtaggcgagggtcagggcccagccgtcaccgcgcgggtcctgctcgacggccacgacgaccgggacgccacggccagcggcgtactcacgacgaacgatgtggcccgggcccttcggggcaaccatgaacaccgggtgatcctcggtgggcttgatgtagccgtagtgaatgttgaagccgtgagcgaaggcgacggcggcacccggcttgatgttgggctcgatgtcgttggcccagatggtgcgctggtactggtcgggggccagaatcataatcacgtcggcttcggcggaagcctcggcc

SEQ ID NO: 470 - DNA, 3197 bp, Unknown
  R48_24m  MAG No. k141_30273
gctgcccggcaaacgcgaaagcatcggtgtggtactcgcttttgtgggcacggtgctcatcgccacaggcggcgatctcagccagctcagtctgccgctgcccggtctgctgtggggcctgaccgatgccgtatgcacgtcactgcttgcgattctgcccatcgcattaatggccaaatggggcaacttcatggccagcggcgtcatgttcatcgtttccggcctaatgctgctgccgctcgtgcgcccgtggaccaccgcccccgcgttggactggttcggcattggtctgatggtattcaccgtggtgttcggcacattcggtgcctattggctattcctcggcggcacccagcgctgcggtgcaatgcgcgccaccatgctcggcaccagtgaacccgtaaccgccactatcaccggtgtcctattcgccggcgcggtctttaccccgaccgatttggtcggcttcgccatgattatcatcatggtgttcctcgtgagatagttcacagctcgcctggctccagaacctagtctggcgggcacaccccgagcgataatgaagccatgacaatcgcaacaccggaacgttatgccgaaatgctagacgccgcacgacgcggcggctacgcttaccctgccatcaacgtgaccagctcgcagacgctgaacgccgcgctgaaggggttcgcggatgccgaatccgacggcatcatccaggtgtccgtcggcgcagccgcatacctttccggcatcggcgtcaacgaccgtgtcaccggatcgctggccttggccgcttttgcacacgaggtcgccgcgaagtacccgaacatcaccatcgccctgcacaccgatcactgcgccaagcagtatctggacgaatgggtgcgaccgctgctcgcacatgagaccgatcaggtggcgcatggtcaggagcccacattccagtcgcatatgtgggacggctccaccgtgtcgctcaaggaaaatctggacatcgccgaggagctgctcgataagtcgcaggccgcgcacacggtgctggagatcgagatcggcgcggtcggcggcgaggaagacggctattccgccaaaatcgacgaacgcctctattccacgccggccgatggccttgaagtggcccgtcgccttggtttgggcgagcgtggccgatacatggccgccttcacgttcggtaatgtgcacggctcctacaagcccggcgtggtcaagctgcgtcccgctctgctcggtgatattcagtcccgtgtggcgcgcgcggtggtcgagggtgagctgcccagcgccgccggcatagtcgactttcccaacggcaagccgttcgaattggtgttccacggcggttcgggctcccgtccggaagagattgcagaagccgtgagccatggcgtgatcaagatgaacatcgacaccgacacgcaatactcgttcacgcgctcgattgccgaccatgtgttcgagaactatgacaaggtcctcaagatcgacggtgaagtgggcgaaaagaagttctacgatccgcgttcctggggccgcaaggccgaggaatccatgtccgcccgcgtggctgaggcatgcaagcaactcggctcggccggcaaagcactcagataacacccaaataaactgtcattcgccgtggcggcgccttggtgtcggcccgcctcgcgcaacgcgcggcaaagacaccagaagcccgattgcgtgagatggccgcgccccgagtagagggtgtaaggtagtctgtttccggcggaatcgtgcgaatgcggaggtgcatcatgcctggaattgttcttatcggtgctcagtggggcgacgagggtaaaggcaaggctaccgatctgatcggcaccaaggtcgattacgtcgcgcgcttcaacggcggcaacaacgcgggccatagcgtggtggtcggcgatgagtcgtacgccctgcacctgctgccttccggtattatcaacccgaacctgaccccggtgatcggcaacggcgtggtcgtggacccggaagtgctcttcgaggagattgacggcctggaatcccgcggcatcgattgctcccacctcaaggtgagcgaggccgcacacatcatcgcgccctaccaccgcacactcgacaaggtgaccgaacgcttccttggcaagcacaagatcggcaccaccggccgtggcatcggcccggcctacgcggacaagatcaaccgtgtcggcatccgcgtgcatgacctgttcaacgccgaccatctgcacgacaaggtggaggccagcctgcaccagaagaaccagatgctggtcaagctctacaaccgtcgtccgatcgacgtggaccagaccaccgaggagctgctgaagctcggcgaacgcctcaagccgtacgtggccaacaccggcctgattctcaacaaggcgcttgacgaaggcaagaccgtactgttcgaaggcgctcaggccaccatgcttgacgtggaccacggcacctacccgttcgtcacctcttccaacccgaccgccggcggcgcctgcaccggcaccggcgtgggccccaccaagatcacccgcgtaatcggcgtctccaaggcctacgtcacccgcgtgggcgaaggtccattccccaccgaactgctggacgagtccggcgaatggctgcgtcagcagggtcacgaatttggcgtgaccaccggtcgtccgcgtcgttgcggctggttcgatgcggtcgtcaaccgttacgcctcccaggtcaatggcctgaccgacatcgtgctcaccaagctcgacgtgctcaccggcctgaaggagattccgatctgcgtggcctacgacgtggacggcgaacgtcacgacgatatgccgaccgatcaggccgctttcgccgccgccaagccgatttacgagaccatgcccggctgggatgaggacatctccgactgccactccttcgacgagctgcccgccacctgccaggcctacgtcaagcgtttggaagagctgagcggctgccgtatctccgtgatcggcaccggcccacagcgcgatcatgtcatccagatcaattcgctggtcgactgaccgtctgcaacgaatttcccggcttgactggtaacgacgcggcacatgatatccgccggctgattccgcgattcgaccacttgaagtggaagatggcggcggccggca

SEQ ID NO: 471 - DNA, 7797 bp, Unknown
  R48_24m  MAG No. k141_30485
caggcagttattaagaactgatctcccgttcccatccctcccataaggcccgtccgcctgaaccgcaagatgcggtccgtggcggacgggcctgttcgttcctgcggtcggcggtcatgaacatacccatgtcggttccggcagtggggccggaaccggcggcgtgtcgactatcggccaggagtgtctatcagctagtatcagctggtatccgatatgggccgtggccctgcgccgcctgccaaaggagataaccgtgcgtgcatgacgtgacttcgcatggccaaaactgctgaccgcggacggacgcggcatcgctttcggtggcgactatagtcccgactaatggccggaggaaatctgggatgacgacatccgcctgatgggccaggccggcgtcaacaccgtggcccttgccatcttcagctgagatcgcctccagcccatcgaagaccattgggatttcgactggctcgatcgcgtcatcgacaagctcggtgacgtgaccgtcgccggaccgcatgtgcaggtgcttgcctcgtatgccggcgaagaagcggatgagtgggagcttgacggcatggccgcgatcacccgcaacacgtacggcgaaggggaggcgtatttcctcggctgcgatctgggcgtgagcgatctgacgcgattcgtgggaggctggcttgccgcgcagccgcaggatggccggcagccggaagccaacctgcggtcgcccgccagcggcgtgacctctgacgttctgcacaccgtgcgtcaatccgacgacgccatattcgacttctatctgacacgtggcagatcggatgtcgaactgcgcgacatcgcaggggagccgatcgtcctgttccgggcggaacgaggcagtgacggcggcgcgtatacggtgcatcgcaatggcgttttcgtgacgaagcgcccgaacccgtcggcgtagtcagttgcgacgaaacaggagggcggagccgcggacggttttgtgagacggtccgcggcctcaccgttggaagccgcggactcggatcatcagcaacggacgcgccgttgatttccacttccggagcaacgatggtgagctttgccgcgacgagatgctgcaggacggtgccgacgtacatggtgcccggattctcccttcgccgctgcgctgcctgccgcagcagatgttccacggccgcatcaacggaaagcgagttgtcggactccagcttgaatggtttgctggtgaagaacgcctgaattcgtttgacccagtattgctcgatctcggtgaattgctctgctgtcggacgtaattcattgatgagctcggcatagtcatgcatcagcgccatggtgccgcggctggttcgtcccttaaaggttgaaccgatagaaccgtcattcattactttttcaacgataccgacacgctcattcgattgtgtccaatactgctttctttctgcatgaacaacggtactcggcaaggcggtaacgatagtcgcaaaggctaagaagcccgtacataatcgtttttttgtagtgtttcagattttcagtagaatggcgacagccaaatcccgctggcttgctagtaaagcgttgtcctcggggggagttttgtttgttgttgaaagataacgcggcatcgaatagataggggaggcccggcatgggacgtcatcagcgtgcagaaacctccggactcatctccttcttgatttgcgccgtcgttggcgcggtatcgatgaacctgtacatggaatacgcgccggccatctggcagctgacgcaacgccgattcatggtatgttcgggcatcgtggcggcatgcggcgtcatttccttcattattggctatgcgcgcaaatcacgttcattgaacctcaaacatggtttgtttgcaccgattcgtcgcattttcgaaatcgtcgccctttcggtggtgtatgcctcgaccattttcctgtcgtcttttgcactcatcggtgcggccaacgacatgatgggcaatgccatcttctccggctatatctccagcgtctgcgccgccttcgccggcgtggtggggtacatgacctttgtacaggcggagatgatgaacgccaaaactattgccagtctgttgccgttcttcgtcatctccggcgtggtcaccgccggcatgaccaccgacgacccatactggtatcacaacaacttttcgcagctcggcgacagaaccacgtttgcggcccgtatgttcaactccacgctgattcttgccggcacatgcatcatcatcgtcagctacttcgccatctccgaactggtgaccaccgaacggctacagcgcctctggcacgaccgcaccaacagagatccgaatcgcggctacgaaatcccacatttcatgctgcgcatctccattctgtccttcctgctgatggtggccggcctggcattcatcggcatcggcgtgtttcggtacacgccacacaatctcttgcacaatatatgcgccaaaggcctgccgttcgtcatgctgctgctgttcgtgctcctgccgtggcttgcgccacgcctgtccaaagcagtgatggtggcctccgacctgaccgcgctcgtatgcgctgcattctgggtcaatatgatgatgggtcacaacaccctcaccaatgtggaggcgttggctggtctggcgttcctcggctggttcatcgtgttctcgcgccagatcgccgccatcgaggccgatcgcgcggccgctcagttgttgcacgcgcaggccatcgaaggcggttttgagcagccgtcttccgcacctgatcagcagatcgaatcccgcatcgctgccgaccggtgaataatttgtttgatagatttggccttatgactgaacgactcacgaatctctggcctgccccgctcgccgcacagccgttgaacgctacggtaacggtgccgggcagcaagtccctatccaaccgctacctgattctcgccgccctcggcagcaagcccgttactctgattggcctgctgcgttcgcgcgacacggaccttatgatgggcgcactcgaagccctcggtgtccgctgcgacgtggattccgcaaccgacaccaccgtaacggttactcctcctgtatccggccgattccatggcaacgtcaatgtgttctgcggactggccggcacggtgatgcgtttcgtgcccggccttgccctgtttgcagatggcccagtgaattttgatggcgacgaacaggcttatgcacgtccgatgaagccggtgcttgacggtttggaacagctgggtgcaacggttgattaccacggcgaggttggccgtctgccgttcactattacgccgcctgcaaccttgccggctgcccaggcgcaggtcagcatcgattcgtccggttcttcccagttcatctccggcctgttgctgattagttccaaactgcctgacggtctgcacctcgcgcacacgggggagaagaccccgagcctgccgcacattcgcatgaccgtggccgatgtgaccggtgccggcggtgcggttgaggccgacgaatccgcccgcacatggacggttgaaccgcgcgcaatgcaactgccgagcaaggtgaccgttgagcccgatctgtcgaacgcggcgccattcctcggcgcggcattgattgccggcggcacggtccgggtgcctcattggcctgaaaccaccacccagccgggcggcctgttgcccggatatctggagcagatgggtgccgaagtatcgttcccgaccatcggcggcgtgcgctattgcgaggtgaccggtgacggcaccgtgcgtgggctgggtacgttcgatttgacggcggccggggagattgcgccctcgttggcggcgattctggtgtttgctgataagtcgacagacatggttggtattggtcacttgcgcggccacgaaacgaatcgtctggaggcattggtcaacgagattcgtcgtgttgggggagcggctgaggaattgcctgatggattgcgtatcgaaccggtgccggcggagacgttgcacggtgccgtgatggaaacctatgctgatcaccgtatggccacgttcgccgcgatgctggggctgcgtattcccgatatcgaggtcatcaacgtggccaccacgcgcaagaccttgcctgatttcgtcggtatgtggagtggcatgctgaggcagtaaggggtcctgtgttctggtggaactcccctcagtccgctacgcggacagctcccctcagagaagggagccaagttatagggcctggatcccctctctgagtggatctgtccgccggaggcgactgaggggagtatgacgcaggggtagtggtctcatgaccatatacgaatgggggctgattccaatcggaatcagcccccatagtgttgcaactagagattagtgagatgcctaacggcggttacttacttggcgaaggtgttgccgtaggtatcggtgccagcctcggcgattgcggcggacttgcgggcgatggccagttcttcgttcgtcgggatcacggcgatgatcacggaggagtccggagtggagatgatgcgcggttccttggagcgggtggcgttcttctcctcgtccagcttgacaccgaacggagcgagcttgtcgcacaccatcttgcggaccacgtcgtcgttctcacccacaccagcggtgaaggtgatcacgtcgcagccacccatctggtaggtgtagttgccgatgtagctgacgatgcggtgcacgtagacatccagagccagcttggcgtcctcgttgccttcggacaccagacggtgaacctcacgcagatcgccgtagccggtcatgcccatcatgccggaacgcttgttgaacagggcatcgagctcgtccacgttcatgtgggcgttgcggatcaggtggaagaccacagccgggtcgatgtcaccggtacggccacccatcatcaggccctcaagcggagtcagacccatggaggtctcaaccggcttgccggagacctcagcggaagcggaagcgccgttgccgatgtgcagaacgatctgcttcaggccttcagccggcttgccgatgacgtccggcaccacggaggagatgtactcgtgggaggtgccgtgggcgccgtagcggcggatgtggtactgatcggcgatttccttgttcagcgcgtaggtgctggcggccttcggcagctggaagaagaaggaggaatcgaagacgaagatctgcggaacgtccggcagcagggagcgcatgacttcggcacccttggcctccgggccgttgtgcagcggggcgagcacagccagatccttgacctggttgatggtcttgttggtcacgagggccggcttcgggaagatggagccgccctgcaccacacggtggccgacggcgacaatgccagcctcagacaggttcgggccgtactcctcgaagaagccgagcacgcgcttcagaccctgctcgtggtcgtgaatcggctcttcaagctcgtgcttttcgccgttgtactcgtgcttgtagtggccgtcgaccggctcaccgatcttctcgacgaggccggaagcgaggccttcgccggattcgagatcaaccagctggtacttgatcgagctggagccggaattgatgacaaggacggttttcgccattgtgggcatcctccattgtgattgaatgttcccgtgagacacgggttaccgttgattagattactcgttgcttgctacaaaataagcattacagtggctcccgctggcgggagctaagccgggctcactgcgcttcgatggcggtgagggcgatggtgttgatgatgtcctgcaccatcgcaccacgggacaggtcgtttaccggcctgttgagaccctgcagcaccgggccgatggccaaggcgccggaggagcgctgcacggctttgtagccgatgttgccggcgcacaggtccgggaagacgaacacgttgacgtgtccggccacatcgttgcccttggccttggtggcggccacggtgggggaccaggcggcgtcgaactggatggaaccgaccaccggcagatccggagccttctccttgagcagcttggtggcttcctcgaccacgtccacgtccgggcccttgccggagccgagggtggagtaggagagcataccgaccttcgggtcgatgccgaaggcacgtgcggtctcggcggactgcaacgcgatttcggaaagctgctcggcgtccgggttgaggttgatggcgcagtcggcgaacacggccacatggtccttgaagcacatgaggaacgcgcccgagaccagtttctggcccggcttggtcttgatgacctgcagggcggggcgcacggtgttggcggtggaatgcacggaacccgaaaccaggccgtcggcatagccgagcaccaccagcatggtgccgaagtagctggcgtcggtcagttgcttgcgggcctgctcctcggtcatgcccttcttggcacgcaactcgcacagtttggccaccatgggcttcaacacgttctcgtcgtccatagcctggaagcgggcgcgctccagactgttcagccccagttccctgccgcgggccaggatggcgtccttgtcgcccacgatgatgaggttcacgatctcgcgctcaagcaggtagtcggccgccttgatgatgcggtcctcctcgccttcgggcagcacgatggtcttcttgttgctcttggccttgccgagcaggtcgaattggaaggcgtacggcgtgaccggcgcggtgacgtccacatcgagcgcggcgagcacctcgtcgatgggagcgtgcttgcggaaggtctccagcgccagatccttggtggattcgtcggtgaagggcacctgcggcagggtccagaccggcaggccgtatttggcgagggtctccttgacggagaaggcgtggcgcggctcgcagccggtcacgaagatgccgagcaccgtattgcccgcggcgcgcatgccctcgatggacagcttgacggtctcgtcgagctcgtgcggccatcggtccatggtgcacacggccaggaacaccccggccttcagatcggcggcgacgtccgcgttgaactcgtaggtggtcgggtcgttgacgtgggatttgtcggtgccgacgatcagggcggcgttcgcgcgggagacctccatggcgtagttgaactcgccgacgatgtctccgcgggcggtgtccttgtcggcgcgcaccttatgcacgtcgaggccggtggacagggacacgccgagtcccgcattggaggcggcgagcaggatgggggtgaattcgtcatggttcgacacggccggccggaacaccatggtcttgtacttggaagtcaatgcgttgagcacgccgtaagcgacgacgttgcggccattggcgccttcagggctggcgatatatacacgggtgacggtcacgatgtttttgtctcctttgatgatcaacacgatagggaccacacctcattgtagtggcgattactgttatcgctcacgccggtgtcgcgccaatcggaagagcgtccccttggcgatactttccggggaaagtatcgcactgcatgcattccagtccctgttttgcgacgcattcccgggaatgttgcgcaaaagtcgcccgataggatagaaaacgaaaaaggccggtgtgtgaagcaccggctttgattgtggagctagggggattcgaacccccgaccctctccatgccatggagatgcgctaccagctgcgctatag

SEQ ID NO: 472 - DNA, 14113 bp, Unknown
  R48_24m  MAG No. k141_31790
ccgctcgcgtgtctactggaaggaggcgggaatcgttgctatacctaaaattcagattgataataagtaaatatacatttgaaggatttgccgtttgctcttgaggcaattgcctttcgtatccccctctctgggggtacttcattgaagacctcggtcatagcgaccgaggtcttttcgtattcgcgggaccaggcctgaaagcattcggcccacttccctgaaggaaacgggccgaatgcttggactcgggtttcaacccggaaggcttcagtccagcgacttcaccacaacgacctcggtgggcacgttgcccgcggtggccttggagtaggggcacagctcctgcgtacgctcgacgagcttggcggcagcctcatcgtcaagatcgggcagaactacctcaatcttgcccttcaggccgaaggactcgccttcaggaccgagcgagatgctggcgcgcacctgactcttggccagcttggtggccgccacgcgctgctccttggcggcaagcgccaacgctccttggaagcaggcgccccagccgatggcgaacagctgctcggggttcgtgccctgacccttgccgcccatggcgaccggcgtgtccaggtcgaactccagttccggctcatggctcacggcgtggccgttgcggccgcccgtaacctgcgccgtagcggtgtagacgatttgcgatggttcgttaccttgatatgtgctcatgctttcatctcagcacgtgttcacgcccgccacaaggactgtcccaccgtagacgatgtgacatcatccacactgtgacttcgcgcacagagtcccgacaccgtcctcacctcgtttatcggcaccatgcgtgtataaccacatatggcattatcggcgaatatcggccggcagaccagttgcacaaggagaacatcatccacatggcagacaccgccaacaccaacgcctggttgccggcgctcaaagcggcgtttccgctgaccataccgatttgcctgggattcctgtttctcggcgcctcatacggcattctcatgggcaccaagggcttctcgtttgtatggccgatgtgcatgagcgcgttcatcttcgccggttcgatggaattcgtcacggtgaatctgctgctctccgcgttcaacccactcgccggctttctgctggccctgatggtcaacgcccgtcacctgttttatggactatccatgctcggcaaattcaaggggctcggctggaagcgtccgtacctgattttcggcatgtgcgacgagacctttgccatcaactccaccgcgaaaatccccgccggtatcgaccgaagctggttctacttctgggtcacgctgtgcaaccagctgtattgggtgaccggcgccacactgggcgggctgattggcgcgcatctgccgttcaataccgacggtcttgatttcgtactgaccgcgctgtttctggtgatcttcctcgatcagtggctcgccggcaagcatcgcgagcgactgtccgccgtcatcggtgtgctgacgtcgctggcctgcctgctgatattcggggccaatgatttcatgattccctcaatgatcgccatgctgatactgttcgtcgcgttgcgcccgcatctggatgtgttgcggccggccgccgacgccccggaagccacggcagaccgtgccatgagccacgcagcggaccagcagaaggaaggacagacgcgatgacgatgaccatctggcaaggcgcgctcaccatcgtgacggtggtgctggggacgatgtgcacccgttttctgccgttcctggtatttcccgaatccaagcagccgccgcgcgtcatcgaatatttcagccgagtcctgccctatgcgatgaccggtctgctggtggtatacgcactgcgcaacaccccgattctgaccggttcacacggccttccggaactcatcgcctgcaccgtcatcgtgctgctgcacgtctggaaacgcagtatgctgctttcaatcgccggcggcacgatcgtatacatgctactggtgcagctggtgttctgaggttgggctcggcttctccttcgttgatctctccctccggtcgccttcggcgaccacctccctctgtgagggaggtgctgaacgcagcgaagcggaggtagagacccgcggtcgtaagactgcgaaacacacagcatcggccacaggccgattcctacagctgcttcgccacccaatcgacgatgtacggagcgacttcctcaatctggtcgatggcgacctcgaactcgtgcttgccgccgtaccacggatccaccaaatcaatctgatcctcgcggccgggcttcggcttgggcagattcgggtcgaagctgcggtacatgtgcacttcggcgcgcttgccggccggcagcatgcgcagcagggcgcgcatgtgggaggcggtcatcggcaggaacaggtcggtacggtcgatttcctcacgtgagatgcggtgtgcgaagtggtcacgcggaatctcatcaccatagccacgttcgcgtaacacgcgcacggcacgcgggtcgatcggatggctccactcctcgtcggacacaccgctggattccacgttcacctggtcgccgagaccgcgctcattaaagaagtgacgcagaatgatctcgcccataggcgaacggcagatattgccggtgcagacggtcattacggtgtagggctgggtattgctcatagctttgaatcaatcctcaatcgggcttcaccgggccgcacacggcccgaatgtgtttttggggtcgaatgaatatgaatccggctcatgccgccataaaggacacaagccggattcgcatgcttacttggttttgaccaagatacggaaacgataggaatcgatgccggactcctccttggcgggcgtacgccactcacccacttcggcttcccgccacatcccggcctcgaccagcgacgccatatcgggcgcatagctgtcggcatccacagtgacggccagatcagtcacataggctttgtccgcgaacggcaacgcctcggcgaacagctgggcgccgccggtgatccaaatctccgaacgatccagaccgtcgtccggaatcgcctcctgacgggccatatcgagcgcgtcgtcaagactggtgaccacagtggctcccggcgcacggtacatcggatcgtgggaaacgacgatgttgtcgcggttgggcagcggccggtacttgaccccaagcgattcccaagtcttacgacccataatcaccgggtgggagacggtcagctccttgaaatgcttcatatcctcggcacagtgccaaggcatgccgccattgaggccgatggcgccggcgcgaccttccttgtcgcgggcttcggcccagataagattcaccgagaaggtcttgggataatcgtcaccccagtcttcttcagtggcagacagcccggcagatccgggctcgggttcgtgatagccgctacggctactgtcatgctccatttcgcttactcctcctggattgcggaactgggccttagtgtagtggacagcgaagactcggggcccgtcgcctccacagtcttcgctgtccacgaacaacgctcagaccgcaacaggtgccttaatagtggggtgatgctggtagccgacgaccttgaagtcctcatactggtagtcgaacagggaatcggccttacgaatctcgatggtcgggtacgggtagggcttgcggcccagctgctcaaggaactggtcgacgtggttgtcgtagacgtggcagtcgccgccggtccagacgaattcgcccggcttgagcccggtctgctgcgccatcatcatggtgagcagcgagtaggaagcgatgttgaacggcacgccgaggaacatgtcgcaggaacgctggtacagctggcagcttagcttgccgtcggccacgtagaactggaagagcgcgtggcagggcggcaacgccatcttctccacctcggccggattccacgcggagacgatcatgcggcgcgaatccggatgatgcttgatgaggtcgagcacattggagatctggtcgatggtgcgattcgggtcctcgggggtcggtgcgggccaggaacgccactgcacgccatagaccgggcctaggtcgccgttctcgtccgcccactcatcccaaatatgcacgttgtgctccagcagccagttgatattggaggaacccttcaaaaaccacagcagctcgtaggccaggcccttgaagaacacggtcttggtggtcagcagcgggaagtacttcgacaggtcgaagcgcatctgctggccgaacagggaaatcgtgccggtgccggtgcgatcggacttcagcgtgccttcggtcaggatcttgcgcaccaggtcctcatagggcatcggaatgtccgtttcgggacgtgcggggatacgggagcgaatatctgcgagttgttcttcggtcaaagccatgtgcaccagtgtagcttaggggcataatagagaagtccgatgatgcgggagagcggccaggtgccgcgctcccccgctggcatggcgatgggccagatcgccggcggctgaaaataaaggagcagctatgggtaagcgactgtgggttgaacgcaacaaggacggttcgtgggatgcgttcagcgacgatggcgcgcacattaagttcggcaaggatcgtggccagttcacgccgggcgatctgatgaaggtcgcgctggccggttgcgccgcgctgtccagccagttcgccatcgaacatacgctgggtgagggcaagggtgccaagatcgtggtggatggcacgtacgaccccgagaacgacgcctacaccggtttcgaggagcaggtggtgattgatgcttctgacgccagcctgtccgaggaggatgccaacaagctcaaggaacgcgtcacccgccatatcgacaagggctgcacggtcaagcacacctacgtacaggagaccccggtgcgcatgaacgtcaccgtcaagcactgacgtactaataaaccgacgtactaataaattgagctccctctgatgagggagctcattgtatacccggactttactgcctgtcgggatcgatggtcttttcgatctgctgggcgacttcaggctcggctgcggacaccggaatctcctcgacgccggcaatctcctccagcgacttggtaggcacttcggcgggcgagctcggcacggtgtcgagacgcgattccgcagcctcaacatacttgcgtggcaccacgtacaccgggccggccgcatgctgcagcagtccctggctggtggagcccagcagcagaccggtgaagccgccgcgaccacgggagccgacaacaacaacatcgtgatcgtagctggccttggtcagtgcgctgacggccgggccggaaacgatctgcttgttgattttcagatcaggatgcgattcctgcaacggcttgatacgcacctcaagatcgtccttgtaggactccatgatggcatcctcgccatccacgcccttcaggttcggcacagcggaaatcacgtccagttccgcaccccagcacgtggcgaagtcggcggcaatgtccagcgccttcagaccccacttggattcgtcggagcctacggccaccttggtaatcgtgttgttcaggtgcatcaggttgccgtcatcatcggtgtacggcaccactacaatcgggcagtaggcgtatgccggcagcgacgaggacgtggtgcccagcagacgctcggccagaccgcccttgccacggttaccaatgacgatcagattgtagttacgcgacaattcgacgaacaccgatgccgggtctccggtaacaatcagtgtggcggcttcgacgccctgctcgtctgcgatggccttggccttggccagaatctcctgagcatcggaatgcgcggcgttatcgtcccccatcgccgtgtaagttgcatcgaacgaaacggcggcatagctcggcagggaatatgcgcagacaatctgcagcgtcagccccgcgtgctttgcataattcgcggcccaccatgttgccttgtaactggcatgcgacccgtcaacgccgacgagaatggccttgtcgttaatcatgacgacctccttgaagttattgtggcacgaataccgcgtacctccaacaataccccgcgacactcggtttggccggtatcctccgctcaaaaagaaatccgcgtatacgaaaaaggcacatcccaaaggacgtgccttaatacgaattcgcttaccgcataattcttgttacatcacgcggcgaatggaatatccagctccaccgaacacggaaacgttgcttattgccgttccctgcaccgggttcatagcattcatcacctgtccgttaccgatgtaaatggccgcatgagtaccattcgcaagaatgtcacccggcttggcatccgccaagcttgcgaccggagtacccacagtggcttgagcaccagaggttcgcggcagggagatgccaaactgggagaagacgtactgtacaaaaccggagcaatcccatcctgccggagtgttgccgccggcaacatacggatagccttggaacttcagtgagaagctggcaagctcagcgccagtgccagtcattttacccaagtcaacctgtggaatcgacgcacgctgttcagagcggctggctgctgcagcagcagcggactgggctgccgcagcttcatcagcggctttctgagccgccgcagcagcagcttccttctcggcctgagactcggtctgtggcacatcaagagtctcgatgccaccccatttagagttctcgtcaaccgaagtggaggtggattcggcgaacaaattcttcttcaccgaactcgccttcgggaaagaacgtgaggacaccacagcactcgtctgcgcggaatcggcagaggcaaacggggctacgcatgcaaacatggcacccgtggcgataaccgccactgatgtggaaataatattcttaacgttcgtcatcagcgccttaccttagcacacatgggtcgatttcataacaggaatgtcttttcgaagatgatgtcgcgggtgtatcactcggcaggagaacgcaacgggcctcggataccgattggcatccgaggcctgcaatatatcaatcaataagactgcatcacgggatacgtaccacgatggtgagtttttcggtcatggcgctagcgagagccacgctgtagccgttccagccaccatggaccgcctgaccgttgccgacatacagcgccacatgatcgtagtgcgcgccgccattccatccaccggtgttggcataaatcagaatatcgcccggctgcagggacccgtctgtaactacgtggccaccgggaacattgacgtactcttcaggccaaccgtggaagttaataccacgggccgccaacgcttgactgaccaatgcggtgcagtccatgctctgtccgatcaaagaatacgcacggtcgacagaggcaccggcaccagcggaaaccgaaccactggcatcggaataagtaacagaagagcgagactcattacggctcgcggcgttggcctgcttctgggtcgcctgagcctcggcctccgtctgcttcttggcctcctcttcggcagccttcttggccgctgcggcatccttttccgcctgagattccgtctgcggcacgtcgaggttctcaatgccgccccaatcagcattgtcctcaacattcgtggcagtggcttcagtcgtcagatctttgcgcacctgggtgtacgaggggaaggacttggtggaagtcacagtaacaccctcagctgcagtcgctgtaggaacaaacataaacgagcaagcacaggagacaatcgcggcaacaatggaagaagctacagttttggtcttcatagaaccatcaccttacacggtgcgcattaactcgtacaggatggaagaaataaaacaccccggagctattgggatatatcggcgtgtcggcacaggtcagttcggactaatacgcggtcgcaacacttgaaatgtcatttcgcgcgaacgattgccgatagggcgacgtcacatccgaacagtaatcaccgaatgtaagccaatgaaatgaatcagtagtggacgtactggaacttaccggcttcggcggcgctgaacgtacgggtcgaaatcacacccaatcccttggcattggattcggagatctcaatggagccgtcggcattgatcttttccagaacggcaacatggccgtatgtgccatcggcattggcctggccaggagcgaacaccacagcatcaccgacatggcgaggagtgttgtccacccaatagcccagagcggaagctgacgccgcccactcgccaccattgccgaagttgccgctggaaggcagtcccagttcggcacgacgctggtacgcgtaccacgtgcactgaccccacggatagttgttggagttggtgccaacggcatggttcgggttgaagccagccggcacagcatcgccatcggcatccatgagagccgacaccacaggattgttcgcattattgcgattcatcagcttggcgtccaaggtgctgtctgaattgctcagcccccaaccgccttcattggtggactgtgcggtaacggaggatgaactcagatcagtacgtgcttcggaacgagaagccgcagtcacatcgctgatgcgcttaatctgcgtggtcgtcgtggccggatcagccacgaacgagttcgtggcgtctttattgttggaaaatgcaagagcacctgcggccgtgccgaccagagcggccagtgaggccgaggcaagaatatggctacggcgttcagcggcacgagcggcctcacgaatggaacgacgagtctggggagcgatttcattgatcttctcggcaatgaccggatcaagccccaaaacaacggcgtcgctgccagcggattgcaccgcgcgcacggcacgaacggaatgagaacccttgccggaggcaaacaatgccttcgctaagctgaacttctggcgcgagaccgtggtcgctttatgcgaagcatgcttcatactacgttaactccttggatgggttcggcggggtcctttcaacgaccccgtatgaccggcacaattgagtactgtacaacgaacagaggtcaatcctcaatgcgatcccccaccatccgggcatgtcaaacgatttacgtaaccgtgcggcagggtgaaaaactgccttgtttccgcccgttcacgaacctcactatccggttatcggaagaatcactaactcatgtcattccgacacaccgtagccatgatgtgctgcgtacattctgcactgcattccgcattgccgctactaccgcccggcaccccggaattccgcagtagccccgcagcaatcccgcacaccgagcattatccgcgatattccccaacactggtctacccttgaaaccatgactatcacactgagtattcccgagtcgctgaagcccgaagatggtcgcttcggctccggtcccagcaaaatccgccccgaacagatcgccgcgctcgatgccggcgccaccaccctgcttggcacatcacatcgccaggcaccagtcaagcaactggtcgcttcgattcgtgaaggtctgcgcgagttcttccacctgcctgaagggtatgaggtggcgcttggcaacggtggcgccagcgcgttctgggagattgcctgcgcttcgctgatcacccgtcgcgccgcattcggcacgtatggctcgttcagtgccaagttcgccgcgtccgccgcgaacgcacccttccttgaagacccggtgctgttccccggcgagccgggcacttaccgtctgcctgagctcaccaagggcgtggacacatattgctgggctcacaacgagacctccactggcgtggccgccccgattcgccgcgtgcccggcagtcgtgaagccggtgccctgaccgtcatcgacggcaccagcgcagccggcgctttgcccgtggacatcagccagaccgacgtctactacttctcaccgcagaaggccttcggtgccgatggcggtctgtgggtcgccatcctctcccccgaagccatcgatcgtgcggcaggcgtcgaatcaagcgctcatctggaaggcgcacatcgctgggtgccgccgttcctctcgctgaccacggcactgaacaactcccgcaaggatcagaccctgaatacgcccgccgtggccaccctgatcatgatggaaaaccagattcgctggctcaacagcaacggcggcctcgcctgggccaccacgcgttgcgccaagtccgcatccatcctgtactcgtgggccgagcgctccgaatacgccgctccgttcgtcgtcgatgcggacgcccgctcgaacgccgtggtcaccattgatctggacgagcgcgtccaggcctcccagatactgtccatcctgcgagagaacggcatcgtggacgccgccggctaccgcaagctgggccgcaaccagctgcgcgttggcgtgttcccctcggtggaaccggctgatgtcatggccttcaccaagtgcgtcgactatgtggtcgagcacctgtgatggcggtctatgcctcgcatggccgaccatatatgccatgcacattgatcggtctcaactgataccgattgaataaatcgtagggagaggtgtttgacgcccctccctactcttactacagtgcatgagtatgaagttcgcgcctctcattgaccctgccgtccgcaaacccgcgcccaagcccgtacgggtggacctacgtaaggtgtttgccatcggtaccggtctatggattgtggcgttgattgtcgtgctgattctgctggccgtgggctacagcgtaatgccgttggtgattatgtgcgtggccggtgtcattattggcttgctactgctgatttgggaatacttcgaccgctgggactaccgccgcctcggacagtaataaagttcactgcgccaacggcaacgtcaggctgaacgtactgccttgcccgggcgcgctccatacggtcacatcgccatgatgggttagcgccacatgcttgacgatggccaagccaaggcccacgccatccgccgtgcgattgctctgttccgcaccccggtagaaccgctcgaagatgcgcgcctggtccttcttcgcgatgcccgcgccctggtcgatcacgcgaatcaccgcacggtcgccatccttgtctttggatgcggacacactgaccacaccattttccttggaatagccgatggcgttttcgatgagcttggtcacggcgctgtcgatctgatccgcctcaccattgatgactagatcatcgtcgcccttgatgttcagctgcacgccagccgcggccgcctgcggctccagtcgcgccaccgtggcctcgagctgttccataacgttcagtcggttggcggaagacggcgtaatcggctcctgtgcgcgtatgagcagcagcaaatcggacaccatatggttgagcttgctgcagctggaacgcacctggcgagcatcggcagccacctgctgttcgtccagattgccggactccagcgaatcggcgagtttggccagagcttcagtggggcccaacaattgctcggatacattggtaataaacgagtcacgcacttgagcgaaacgaatcacgtcactgacatcggtaatcaacacgatgacgaactgctcgttgatacgccctacagtcaccttcagccagttggggcggtggacggactgcgtggcgacgtgatcgcccttgttctggtctgcgacgtaccgctccggagtatcggtggtcaagtcgaactggcgcttgccaccggacttgcgcgcctcgtgaatggcatccagcacctgctgctgggcgatggcgtcatctgacaccacacccaggcggtaggcggcgggattgcagcggaccacctcgtcgtgctcgtcgaccaccacggacgcacccggcagcatggacagcagcgtggcggtgtcgtcggacagatcgtcattgtcgtcatcatcggccagcggcgattccacggacactcgatgtgtcgcaaatcccacgatgagcgtgatgattcctaccacaaataaaacagccgcgacaataagagcaatcgcggcgacgagcggcatctgtgtcatgcccccattctttcacaccacacgccgggattgcggtttgccggcgcgccggtaacatgaatttcaggtgaacaacccaatgaacagtagaacaacttgaggttgccattacctacgttgaagtggggaacaagtactggaataatacactggtacaggttgcaataagcaagcatgaaaggctagagaaatgcgcgttattttcaacgaggagctgaagcaggttgctgacgacctcgaccgtatggcgcagaacgtgcgcaaggcgatcaaaggcgctggagaagccctgctgaatcaggacgttgaagccgcacagactgtgattgacggcgacatcgagattgatgccctggagtcctctgtgatcgaccagtgcgtcaagctgctcgccaagcagaacccggtggccaccgatctgcgtgtggtcgtttccaccatgcgtctggcttccacgttcgagcgtatgggcgatcttgcccgccacgtggccgaggccgctcgccgcacctacccggccgccgcgattcccgaatccgctcagccggtgttcgccgagatgatcgacttcctggacaacaccgctgaccagctggtggccatgctctccgatcgcgatgccaagaccgccgaggccatcatcctggccgacgacaagctggacaacctgcaccaccagaccttcgatctggcgctgtccgatgacatcacccgtcagcagaccgtggatatcgtgctgctgggccgcttcctggagcgtctcggcgatcatgccgtgtccgccgcccgccgtgtggtgtacatcgtctccggcttcgaccccaccaaggagccgacccgcgacgagggcaccgacatcgactgattggggcttgtcctcacattgggcgaataactgaacacttgtcctcctatggtttgaggaggatgcctgaaagcggcgatccggctacggctggacgccgtttttttgttgcttctgggcggtacaccggcgtatccatggggcggcaaaacacccatagggcggtaacttgcccatggggcggtttgaaagatatgtgaaaccgcggaattaagccattctggcataccgccccatgagagttttaccgccccatgagggttttaccgccccatgaggtaatcaccgccccatggggatttggcaggcatagcaaaggggagccacacattatgcgcgactccccttacagcttgtaccgtgttagcggcttaggctcacttctggccttgagcggcgacagcggcggcaccggcagcagcagcctccgggtccaggtactcgccacgcggcttgatcggcttgaagttctcgtccagctcataaagcagcgggatggcggtcgggatgttgaccttggcgatctcttcctcagacaggttgtccagcatcttgacgatggcgcggagggagttgccgtgagcggcaatcagcacggttttgccggccttgagctccggctcgatggcggactcgaagtacggcttcacacgctcaacaacgttggccaggcactcggcttccggaaccggatcgccggcgtagcgcgggtcgttgttctgggcgtactggtcgttcgggtcgatctcgggcggcggggtggcgtaagaacggcgccacagcatgaacttctcgtcgccgtactcttcgcggatctcggtcttgttcttgccctgcagagcgccgtagtgacgctcgttgagacgccagtcacgctgaaccggaatccacagacgatctgcggcatccagagcgatgttggcggtgttgatggcgcgacgcagcagggaggtgaacacgatgtccggaaggacgttcttctccttgagcagctcgccgccacgcttggcttc

SEQ ID NO: 473 - DNA, 8313 bp, Unknown
  R48_24m  MAG No. k141_32656
catgacaatcatgtgcaaaatatatcacagtatagtaaagtgtgcaatattctgcacatttccaactatgtgcagaatattgcacactttactatactgtgatatattttgcacatgattgtcatggatatcgccgaatacgcgcggcttatcaaggatgaaaggcaacgccagggcatcagtcagaccgacatggcccaacggctgggcgtgtcacgtcgctggctgatcgaatttgaacacgcccgagtccccaatcccggattctccaccattctcagcgctctgactgagcttggcttgtcgctggatgtccgcaaaaccccgcagcccgccgaactctatgaatggtgacaccatgagcgaaaacactctcaatgcatttctcggcgaaacacccatcggccagtttcgaagaacaaacgatggcagcattattttccaatatcacgattcctatcgttggtcgcaatcacccacaccaatatcgctttccatgcccattaccgcagccgaatattcaggcgacatcccgcgtaatttccttgaggccctggtcccggaatcccctcaggcccgagatgaagccatgcgattgcatcatgcccgatcgacaagcgcatttgatctgttgcaagccatcggattcgatgccaccggcgcattacggctgtccgccgacccgcacttgcccatagatgacgattcgcttattccaatcagcgattcgcagatcgcgaatcgactacgcgcagccgcccccacaggcatccagtccgcaagcgtagacgagcattggtcggtcgcggggcagcagggcaaaatcgcactgaggaaccgcaatggatcatggttctccaccactggaatcgcgcggacgactcatatcatcaagcccggcataccgacccttccacaccaagcattcaacgaacacatcaccatgcgcattgtggaggcgatgggaatacccgtggcccacacctcttttcacatctttgatggggtcccagccatcatcagcgagcggtatgaccgtatagtgtccgccaatggtacggtgacggccctgcaccaagaagactttacccaagcgctgggcattccctcatcgctgaaatacgaggaacacaacggcccaacgtccaatgcatatgcggaaatgttgcgcaagcacggtctgcccggtcaggccgaaagcaatatccgagccttcaccgacggcatcctcaccagttatctcgtcggggcaacagacagccacgccaagaactactcgctattgctcgatggcgcgtccgtgcggcttgccccgctctatgaccttgcttcggtgttcccttatttggggcatggcaagcagatcataaatgccactttggcgatgaacatcggcggacgccgagatcttcttcaattacgccgcaaacatctggaacgattcgcacagcgggtgggattagatgaggaatccgtgattttacgattccacaccttggtggataggctgccggaggcattcgacagcaccgtgcaacccgctcacgacgttatcgcgagcattggtgcgcaggaattcatcgatagctatcgcaagcgcatcatgatggtgtacgacgatgcaatgagctggatggccagtcgaaagggacagtgattcggacgggtggggattggtctcgccatccccccccctaagaaatcagatcttaagcggcacacgggaaacgaattcgcgcttctcgcctgttattggatcggtgaatcgtagcacacgcgccactaattgcagcggctggctgaaatcgtcgtaggggcgtgtctggatgcgcgggtagaagtcgtcgcccacgatgggcaggccgagcgaattcatgtggacgcgcaattggtgggttttgccggtgcgcgggtggagtgtgtagcggcagatggggtgatttcccggatggggaccaccctccggcgcttcgcgccacctcccaccagcgggagggaaacagaggtcgccgcgctcgatgagggtttcggcgttggccaaacccggttcctcgaatgcggccatcgtgccgtgttccttggtgatgtgcgatcggcgcagcaatgggaacgggcgtggcggttcgacctgcatgatcgtgccgaatcgcgggccgctgatcggccggcagggtgccaggcattcatagatcttgacggcctgccggttctggaacagcatctgatacgcgccgcggcaggccgaatcccgcacgaacaccaatacgccggcggtcatgcggtccaatcggtgcgctggcgtgatgtccggctcccccagccgctcacgcaaccggatcagcgcggtctgccgataccacatgccgcgtggcatggtggccagaaaatgcggcttgtccaccacgatgatccgctcgtcctcatacagcacgtccatctcaaacggaatatgaggctcgtcaatcacataccgatgtggcttactcaacggtcacggacttggcgaggttgcggggcttgtccacgtcgtagcccttgagctttgccatgtccatggcgaacagctgcagcggcaccacgtcaaccagcgggctcatcagcgttgggcaggcggggcgccagaacaccacgtcagcgtaccgttccacatccgggtcgccctgctcggccacggcgatgatgtacgcgccacgagccttgacctcctcgataccagagatcaccttggcgtgcaacacattgcggccgcgctgcggcggcacgatgaacaccacgggctcaccctcgtccaccagcgcgatcggtccatgcttgagctcgccggccgcgaagccctcggtgaacgtgtaggcgatttccttgagcttcaacgcgccctcaagcgccacagggtagcccacgtggcggccgaggaacaagaaggagttggcgttcaccatgcgctcggcggccgcctggatggtcttgggctgggtgtcgagcacccactgaatcttgcgcggcatgtctttcagggagtcgagcatctgatgaatctcatcgcggaacatcgcgcccttgacctgcgccagatacaggcccagcaggtaggcggcggtaatctgcgccacgaacgccttggtggatgccacggcaacttccgggccggcgtgtgtgtagagcacggcgtcggattcgcgcggaatggaggcaccctgcgtgttgcagatggccagcaccttggacccctgttcgcgcgcgtggcgcagggccatcagcgtatccatggtttcgccggactgagaaatggccaccacgagcgtacgcggggtcagaatcgggtcacggtaacggaattcgtgcgcgagttcgatttccacggggatacgcacccagtgttcgatggcgtatttggctacctggccggcgtagctggcggtgccacaggccacgacgatgattttgtcgatggccttgaagtcgtgttcgtcgatacgcacttcatcaagggtgatgtcgccattcgtgtcgaagcggccaagcagggtgcgctgcactgcggcagggtcttcgtgaatctccttgtccataaaggaatcccagccgcccttttcggcggccgaagcatcccaatccacggtgtaggtcttcgggttttcgaccacgttgccgttgaaatcggcgacgatgaccttgtcggcggacacgcatacggcctgatcctggtcgacttccatggcgcgcttggtgtaggccacgaatgcggcgacgtcggaaccgaggaagttctccccctcgccaaggcccacgaccagtggcgaatcatggcgggctccgaccacgatgtccggctggcggcagtcggtggccagaatggtgaacgcgccttcaagcatgcgggccatacggcgcacagccttgaacaagtctggcttgccttcgtccgcgataatcttgtccacgatcttgccgagcagcttagcggccacctcagtgtcggtggcggaggcgaatcggtagccttcggcttgcaggtcgaaacgcagctgagaggcgttttcgatgatgccgttatggatgatggccaccttgccgtccatgctggtgtgcgggtgggcattcacgtcgctcggctcgccattggtggcccagcgcgtgtggccgatgcccaccgtggcgagcggcatcggcttgcgctcgatgtcttcgaccaggttcttcaaacggccggccttcttgcgcacgaccaccttatccatgccgggcgcggtcagcgccacaccggccgagtcatagcctcggtattccagacgttccaggccttgcaggcagacctccaaaggcttgccgcatgccgtttcaatatttcccgcgtatccaacgattccacacatggctcaccagcctagcggacgattattgcgcaaagcgaatccaacccgccgcctttgcaggattggaacatgccccttcgtgaaaagcgtacgctgagttcatcagcgtacgcttttggagttgcaacaacgagccttcctacagcacgtgctgtaggcggagccgtaaagcggggagcccagtgggctccccgtaggcgacgccgaagcacgacagtgctgaggtaatataacagccttcctacagcacatgctgtaggaagtccttaaacctaggctcggtggggtggtcgatgatgtcggggccgcccttttctacgactacgccgccgtccatgaacacgatctggtcggcgacttcgcgggcgaagccgatttcgtgggtcacgcacaccatggtcatgccttccttggccaaggaacgcatgacgttgagcacttcgcccaccagttcggggtcaagggcggaggtcggctcatcgaagagcatgatctccggcttcatggccagagcacgggcaatggccacgcgctgctgctgaccacccgacagctgggaggggtaatagtccatgcgatcgcccagaccgacgcgctgaagctcggccacggccaggtcacgggcggctttcttggactggtgctgcacgtggatcggggcttccatcacgttctccagcgcggtcatgtgcgggaacaggttgaagcgctggaacaccatgccgaggcgagagcgctgtgcggcgatctccttatcgtccagggtctgcagcatgtcctggccgtttttggtcacgtgcttgtagccgatgagttcgccgtccacctcgatggaaccgccggtcagggtttccagctggttgatcagacgcaggaacgtggacttgccggaaccggagggccccagaatcacggtcacagtaccgggcataacggttagatcgatgcccttgagcacatgcagcggcccaaacgccttgtgcacctgcacggccttgacagcaggaatcacggaaccgtcagccgccttgcgcacgaccggggcaacactggtgatgtcattcgtagtcataatcgcgctcccgccttatgcattcaatccgacaaatgtggtctggttgagcttgtccacgtcatccttcggttcaccgtcggtcttacccggcaatggcgtctgcttgcccttggtgcccaccggtcgggcatcgaagcccttgccgaagtgcgcctcgaggcgggactgcacaaccatcagaatggaggtgatcagcaggtaccagaagcaggccacgagaagcagcggaatcggcttgtagatacggttggcgatggcgttggtggcgaactgcagttcgagggtgaacggcacggcggtgaccagcgaggtggtcttcagcatgccgatggtctcgttgccggtgggcgggatgatgatgcgcatggcctgcggcagcacgatgcggcgcatgatgagcgtgcggttcatgcccagcgccttggccgcctcggtctggccggggtccacggcttcaaggccggcacgcacgatttcggacaggtaggcggcctcgttcagggccagaccaatccatgcggcgttgaatgcggtgaccaccacgttggagtcgatgctccagaactccaccgaggtgaacggaatgccgaggctgatcttaggaatcagcacggcgaacagaccccagaaaatgagctgcgtgtacacaggcgtgccgcggaagaaccagatgaagaaccagctgacgccgcgcagcaccggattgatggatttgcgcatgatggcgagaatcaccgacaggatgatcgccacgaccatggagatcacggtaagctccaaggtatagcgaatgccttcaagcacgttctcgttgaacaggtacttccagacggtgggccaatccagtcgcggattggtaatcaagccttgaatgagcatcgcggcgagcagtaccacgatcactgcggccacaatcgggccggggcgcttgaccggcaacgccttgatgcggttggggatgttcagtccctcaccgtcgacttctttcttcgccataatctggttccttggatgtgttgggcagcctgaactgcaagttgcaactagcgttgaaccttagtgcacgaatggggcgactgtgttacaaacagtgcgccccattcgaattttcgcgacagcttgtcgactattcgacggccgggttgatttcggccttgtccagtgcgccggattcgacgccccagtgctggagaatcttagtgtaggtgccgtcgtccatgagcttttgcatggccttctgcacggcttcggcggtctgggaatcgcccttcttgatggcgatggcgttcggcacttcatcgaagtccttgccgagctgttccagctgaccatcggtctgggcgatggcgtagccgacaaccggggaatcggcgaagaagacgtcggccttgccggtcaccacagcggtggtggcgtcggtctgctgcttggaggactggatggtgatgtctttcttgccgtccgccttgcactgcttggcggtcttgttgatggcctcttcctcgacggtgccggtctcgacggcaacgttcagaccgcacaggtcgttctcatcgacgttcttggggttgcctgtggccactgcatagcccatgcctgcggtgaagtaggagacgaagtcgacggattccatgcgctccttggtgatggtgaaggcggcgatgcccagatcgtacttggagccgatggccggaatgatcgtatcgaagttggaggagacgatttcggtctcgagaccgaagatgttgcccatggcgcgggcgagatccatgtcgtagccgatctgggtcttgccgtcggcgtcgaggaattcggccggggcgtaggaggggttggtgccgatggtgagcttgccgtccttggtcacggattcaggcagcagtgcggcgatggtgtcatccttctccacggagctgacatcgtagctggtgatggtggcggcatcggagcccttggcggaatccgtaccggcatcggccttgtcggaggtgccgcaagcggcggtggcgaacagcatggccgagctcagtgcaatggccataatggacttcagtttggtggactgcataatcgtttcttcttctctcttacgccgcttcaacggcaacgatcaacggttaagcatatttatacactacagtgcatacatatacaaaaagactcccgccgcagggcaacgggagtcctcatagtaaccgaaactactcgacggacgggttgatctcggccttgtcgacggcgccggaagagacgccccacgtgtcgaggatcttcttgtacgtgccatcatccatcagcttctggatggccttctgcacggcttcggcggtcttggaatcgcccttcttgacggccacggcctcaggggtcacgccaacatcctcgccgagggcctcgagcgtatcaccggtctgtttgatggcgtagccggcaaccggcgtatcggcgtagaagatatcagccttaccggaagccacggcggtggtcacatcggtctgcagcttggaggactggatgtcgatggcatccttaccgtccgccttgcactgctcgttatccttgttgacttcctcttcctgggtggtaccggtctgcacagccaccttcacgccgcacaggttcgaggagtcgaccttgttcgggttgcccttctgcaccacgaacgtggaaccggccttgaagtaggtcacgaagtccacagcctccatgcgttccttggtcacggtgaaggaggagatgccgatgtcgtacttggagccgacggacgggataatcgaatcgaacgtggaggagacggtgttttccttcagtccgaacactgcggccagcgccttggacaggtcgacatcaaagccgaccggggtc

SEQ ID NO: 474 - DNA, 5733 bp, Unknown
  R48_24m  MAG No. k141_32848
aagtgccgaacccgctgaagcacgtgctcggccatgccggcgccgataaggcgtgagacgggttgattcgatgattgttgacatcactgccgtaagtcgtgatcttgcggttcgctccatcgcacagttggaaggcgaactgttcggccgcggcgcatggaatgcgaacatggtgcgagaggaactggacgcaccggcccgcacgtatctgctggatgtgctgggagaggtggaacaggcggttgtccgcggctacgccggcttctggtatgacggcgaggacgccgagctcatgaccatcggcgtgggcaaggcataccagcggcaaggcatcgccgctgcgttgcttcaggcactggtcgacgaggcgaagcgtcagggcgcctcgcgcatgctgctcgaagtgcgtgtggataacgaccctgcgctggccctgtatcaccggttcggattcgaacgcattggattgcgcaaacgctactaccagcctgaaggcatcgacgcatacaccatgagcctggacctgaaacctagggtcgtgggctttgccgccccgcagacggcatcggcggacactgaagacatcactggcaagcaaacggagaagaacggagaagcacgatgagcgaaccggttgtactgggcattgaatccacctgcgacgaaaccgcggctgccatcgtacgcggccgcgaactgctctccaacgtcgtggcctcatccatggaggaacacgcgcgatacggcggcgtgatccccgaaatcgcctcccgtgcgcacgctgaggccttcgtgccatgcgtgtccaaggcgctcgccgacgcgaacatgacgttggcggatgtggacgccatcgccgtgtccgccggtcctggactggccggttgcctggccgtgggcgtgtccggcgccaaggcgctggcctgggctgcgaacaagccgatttacggcatcaaccatgtgatcgggcacatcgccgtcactcagctgcagttcggcccgttccccaaggacacgctggctctgattgtctccggcggccacacctcgctgctgcatgtggaggacatgccgcgcaagatcgatgtggtgggcaccacgctggatgacgcggcgggggagtgcttcgacaaagtcgcccgtctgctcggcttcccgtatccgggcggcccgcacatcgaccgccacggacaaaacggcgacccgcacgccatcaaggtgccgatgggtctgacccaaggcaaggccggtgccgcgcacccgtatgatttcagtttctccggtgtcaagaccgccgtggcccgttgggtggaaagcgagcaggccgccggccatgagattccggtggacgacgtgtgcgcatccctggccgactccgtggccaccgtgctagcccgtaaggccatgcgcggctgccggcagtacgattccaacacgctgatcgtgggcggcggcttctccgccaactcgcagctgcgcgccaaactgctcgaattcggcgagaactacggcgtcgacgtccgtatcccgcaaatcaagctctgcaccgacaacggtgccatggtcgccatgctcggcgtgaacctggtcgaagccggcgtggcccccagcgcccccgacttcccgatcgactccgccatgcccctgaccaaggtctcgatgtaagatttgcacggtattcccaaactgatactgggaataccgtgcctctcatcggtgaattgacagtgacctgtctgcctgatgtgagtagtggtgaggtcttcgccatggatttcccggttgatgatggggtgtcgtgtctggtcaccaatgcgatgaaaataaaaaagcctcggagagccgaggctttcgatggctcctgcgactgggcttgaaccagtgaccgtccgattaacagtcggatgctctgccaactgagctacgcaggaatattcaattttcatcccgtccggagttacccattcaggtgagctcctgcgactgggcttgaaccagtgaccgtccgattaacagtcggatgctctgccaactgagctacgcaggaatgtctgctgtgtttgagatttctctcgcgcacaagtcacacatcttacatgcttgccacgaaaaagcaaattacgtgcgtgtatggcatgtcgcgctgaattccgcagaatcagactcatcgaatacccactcatacaacatgatgacgatgcggcgatactgtcacgcgaaatttcattgtggataacttcggaagctggaaccacataggtcgttctggctggacatcctgtttcggacccctcaaggtgggtatcaccggcaaagaagccggaatcgcatcacactcacactatggggaggaatctcatgaatgcaccactgttgtttgattggcgtcgcgacgaagcccgacgtgccagcaggcggcgtcagcaggcgcgtcagcgggctcaggaacggcaacggcgtatggatgccataatcgcgttggccaccgttatcggcctgctgcttgccttgggagtgggactggcatccacgcctcagcatgttgcgcatgcggatactgcggtgaccggagatgcggcatacacggtggaggatttcaccgatatgtctgatctggcgtggcgcaatggcaatcagtgcgaatcccggttcgactggccggtcgacgatccacaggtcgaacaacagttcgagcggccgatcaacccgtgggcaccaggtcatcgtggcgtggatcttgctgcggagcaaggtaccgtgattctgtcaccacaggcagggaccgtgagttttgctggcaaagtagctggcaaagatgcggtgagtgtacggcatcgtggaggtgtcacgtcgacattcgaaccggctgttaccgagctctcggtgggggatacgatctcccgcagacagcccgtaggcatcgttgagggcaactcggaccattgcgaagaccgttgcctgcattggggcctcaagcgaggaacggccgactatcttgacccacagcaatatgcggggagtcgaaaaatcgtactgaagccgtcatgattcagcaatgtttgtcggccggaacagggccgtacggaagaggcatcgcaggcggctagcggcgtgacgagtatgaatcacagaccggcatcggccaaggagatatatccgggggcgatcagcgcggacttgagattgctggcgctgacagccagcaacggttcgttgatggtcgggatcttcttcacgccgcctacctcggagttcctgattgaaggcatggaattcagcgcttcgttcttgttgagcttggcgcaggcctgagcgatatccgtggcgatggtctgtctgtcttccatgccggtcatccattgcttgccattgacgatggatgggatgttcgagacgtacgcgccgtatccggtcaccagaggccattgcgagtcacggtccttgtcggaagcggaggtgtccttatccgcatcgtcatcggaactggatgagtcgtttgcgttgtcgttttcaggggatttgatcgggtccggcactgcgtcgcggctgagatccctcttgccggtgatattgccgacaatgcccgagatggtgatctgcggattgatatcggcggcagagccggtgtatctcagatcgtccaattccttgacgacctcggaggcgatatagtcgttcatcgtgatgataccgtcaatacgggtgagtgtggactgcccgtcggtttttgccagacgcttgtcaagcactttcgcagtggagccttccttggcggcatcgtaggccacggcttgccaatcgttttccgtggatttgccgtccaaggtgcctgaagggctttccacaacgcccttctgatagtaggagcccagtacctgccagataccacggaacgcctcttgggcgaacgtggaatcgttggcgttgcctttttcgtccacggcggtgtatggcagcagcacctcaatgtatttggggttgtctttactggccttatccaacttgagtttggacaccatcttttccgcctgtagcttgccgatggtctgggcgtccgagaacttgacgaaggcgtccggcctatacccctcgatgctgttgccgagcaataccacatgcatgccggattccttggccagcttgagcgatgagaccagccggtccacggcctgcgcctgctcgtccgatgcagtgccgtcgctctcagtgttggacgagtcatctttggaagagctgtcttcggaagaatcaccgtcagaagtagctccctcatccgtggcatcgttggtgctcaggttctggctgacgtaatcgccgtattggcgagtggaagcgtcggcctcgactactggagccacgagcaatgtcatgttgtcgggcgcgatggcaatgccggaatcgtccgtggtgttattcgaaagatgatcgaccacaaagtcttggatggcgcggctttgcttgtccaacgagtcggacgtcgtatgatcgatatcgcctttcttgaaaccggcgtcgaccagggccttggttaggtcgggcaccagcttcgcccatttgttcagtggcgtctgctgattcagcgtaatgccgtccgaaggcgtgaacacggccacgccgccggcagaattggacgtcaccgtggtttgaccatctacaacggtcttattgtctgaggtgcacgcggtcagtgacagcaccatcgcgcaggatgcgacaatggcggcgagcagggtggttgagcggcgtgcgaacaccataagcggcgaaacctcctcaagcgggcgtgaaaacaaactgaatcacgattctagtaggccgtatacgaaaaagtcccggaccagtggacaaatcgccacatatccgggaacaattaggggtatttcgcgcgtgtatcgaacaactgtcatgattgtcgtgctgaggaacattccagatgaagcacgacaatcatgacagttggcgacatgacatgacccatgtaggtccgcacgatgtgttcgatgatttactcggccagagccttggccaggttctcgtccagcgcgttcatgaagccgtcggtgtcgagccacggttcgtccgggccgatgagcatggccagatccttggtcatctgaccaccttcaacggtgtcgacgatgaccttttccagcgtctcggcgaagtgacggacttcgggcgtgccgtccagatcggcgcggtgcttgaggccgccggtccacgcgaagatggaggcgatcgggttggtggaggtcttctcgcccttcttccagcggcggtagtgacgggtcacggtgccgtgcgccgcttcggcctcgacggtctggccgtccggggtcatgagcacggaggtcatgaggcccagcgaaccgaagccctgggccacggagtcggactgcacatcgccatcgtagttcgtgcaggcccagatgtaaccgccgtgccacttcagggagctggccaccatgtcgtcgatcaggcggtgctcgtaagtcaggccggcctcggcgtacttgtccttgtattcggtctcgaacacctcagcgaagatgtccttgaattggccgtcgtaggccttcaaaatcgtgttcttggtggacaggtacaccgggtaatgacgcatcaggccgtagttgaagcaggcacgagcgaaaccgcggatcgaatcgttgacgttgtactgcacctgggccacgccgccgtcctggccgtagtcatagaccacgtgctcaa

SEQ ID NO: 475 - DNA, 2808 bp, Unknown
  R48_24m  MAG No. k141_33057
cacctgcggcttggagctgatgagcacggtgaccatcggcttgccggtttcgcgcgagacggcagcgagcgcgtcgagcagggcgttctggccgccgagcagttcgagcgtggcagtggagcaggtttcgccgaccagctggaccacgtcgccgaccacggccacgatcagatcggactggcgagcgttggccacggcttcgtcgatcattgcttgatcgacggcggcggaaacgccgattttcgggcgaggctggccgtccgggtagaattcgccggcagggtcaggcacgaggtcgatgacgttcgcgccgcgcgagtagaccacttcgcaatcgtcggcggtgagctgggtcaggccgtcgagcacggtggtaatcatgtctcgaggctggccatccggcatccaggaaacctgaccggagttgccggtccagtcgccgagctggttctgggcgtcgtcggcgagcggacctaccacggcgatgcgcttggccgtgttcgcggtgaacggcagggtgccgtcgttgcgcagcagggcgacggattcgcgggcgagttccaggttggtctgctggtgttcggcggaaccgatgaccgccttgatgcgttcggcatccggcaggcgcgggtcttcgaacaggccgaggcggaatttcagggccaggatgcgggctaccgcatcgtcaatcagggattcgtcgagcagaccggtttttacggcttcgatggcgccttcgtagaactgtggggtggtcatgaccaggtcgttgccggccttgaccgcgtcggctgcggcgtgcacgtaatcgggcttgacgtgctgctcccatacggagcggccgacgttgtcccaatcggtgatcagcgtgccgttgtacttccatgcgccgcgcagcttgtcggtcagcaaccatttgttgaatgtgaccggcacgccttcaatggactcgtaacccagcatgaacgtaccgcaaccttctttggccacgcgctcgaacggcggcaggaaccaggattcgagcttgcggtgggagaggtccgcttcggaggcgtcgcggccgccttgggtttcggaatagccggcgaaatgtttggcgcaggccaggattgcgttctttggcagttcctcaccggccttggcaccgccttgatagcccttgaccatggcggaggcgagttcgccgatcagcatcgggtcttcgccgaaagtctcatccacacgcccccaacgggtatctcgggcgatgcacaacacaggagaaaacgtccaatgcacaccggtacaagagacctcctcggcggtagcacggccggcggccttgaccttgtccggatcccagctgacagccatgccgagctgggacgggaaaatagtggcgcccggccagaaggagtatccatggatgcagtcatctccgataatcaacgggatgcccagacgcgtcttctcattgacggtcttggcggcacgagataaatcctcggggctggtatgcagaatggatccgacatgcttattcacgatgagatcctcaagatcgccgccgcgggcgtcaagctgcatcatctggccgaccttctcctcaagtgtcatacgggagagcaagtcggcgattcgctcaccagcgggcaaatcaggattcttgtacggtaaggtttcagcagttgcggcaggcgtggtgttgtcggtcatacgaagtcgctttcctcagtgaaatcgaacagctttttaattaccaattggtagtttatctattgacagcatacaacacgcttatgccgcgcgcatcacatacaccaaaacgaccgtatgtatgcgaccccttcgttcgcccgcatacttactgccgccatcaagcacaagcctcagttcaaggcacacagcgaatcagcgatacccgtcccatatcggcgaaggaaatatcgccggctccagatcggcccattcatcgcataagtcaatggccggcccccgtaaccacctcagttgcacaccatccatgatctccagagcatggcgcaacgtgggccggacctcctcaaacgaggtgaattcggaaggcaggttccagttgtatgtcgaatagtatcgccatattgaatcccgacgattggcaaactcgtcatgtaacggatgcgcaggattgaacgattcgacctgcaatatcgagaacagctgaacaagcatggggcgcgtggaattgcaatgtaccaagaacctcagatacgcgggcaatctgaaatcatcgggcactgaaccaggcaggccggaggccatgaagtcttccacactgccaaacgtgttgtaattctcgtgatacaccgcggcaagcaggttatctttgctaggaaaatatcgcaaaactccctgcttggtaacaccgaccgcatcggccacatcctgcacagaagtaccgttgtagccacgctcggaaatcagtcgcacggcggcatcgagaatttcctgccggcgttcccccggcgacttgcgaacacgcttatgctgcaatgaattcccagatgtcatatccgccagtctatccgcattctccccactcccatgcgcaaccacatccaatatccttggccggatatgcaaaacggtgccaaaacaaaacattctgtcatgccttcgacaccgatatcgcgcaatagatttttctgtatatgcttcttcgcttactcctggaacacgtcggggtgcttcagatcgccgggaatgtcggacaagaggccctccaatcccaagaattccttccagaaatcgagcggctggccgtatggcgaagcctcgcgaccgtgggcc

SEQ ID NO: 476 - DNA, 6526 bp, Unknown
  R48_24m  MAG No. k141_33180
ccgagatacccgttgggggcgtgtggatgagactttcggcgaagacccgatgctgatcggcgaactcgcctccgccatggtcaagggctatcaaggcggcgccaaggccggcgaggccctgccgaagaacgcgatcctggcctgcgccaaacatttcgccggctattccgaaacccaaggcggccgtgacgcctccgaagccgacctctcccaccgcaagctcgaatcctggttcctgccgccgttcgagcgcgtggccaaagaaggttgcggcacgttcatgctcggctacgagtccatcgaaggcgtgccggtcacgttcaacaaatggctgctgaccgacaagctgcgcggcgcatggcaatacaacggcacgctgatcaccgattgggacaacgtcggccgctcggtatgggagcagcatgtcaagcccgattacgtgcacgccgcagccgacgcggtcaaggccggcaacgacctggtcatgaccaccccacagttctatgagggagccatcgaagccgtaaaaaccggtctgctcgacgaatccctgatcgatgacgcagtagctcgcatcctagctctgaaattccgcctcggcttgttcgaagacccgcgtctgccggacgccgaacgtatcaaggcggtcatcggttcggccgaacaccagcaaatcaacctggagctcgcccgcgaatccgtcgccctgctgcgcaacgacggcgccctgccgttcgccgcaaacaaggccaagcgcatcgctgtggtaggcccgcttgccgacgacgcccagaaccagctcggcgactggaccggcaactccggtcaggtctcttggatgccggatggccagcctcgaggcatgattaccaccgtgctcgacggcctgacccagctcacctccgacgattgcgaagtggtctactcgcgcggcgcgaacgtcatcgacctcgtgcctgaccctgccggcgagttctacccggacggccagcctcgcccgaaaatcggcgtttccgccgccgtcgatcgagcaatgatcgacgaagccgtggccaacgcccgccagtccgatctgatcgtggccgtggtcggcgacgtggtccagctggtcggcgaaacctgctccaccgccacgctcgaactgctcggtggccagaacgccctgctcgacgcgctcgccgccgtctcgcgcgaaaccggcaagccgatggtcaccgtgctcatcagctccaagccgcaggtgctgcccgcctccatcgtgggggagtacggcgtgttcgccaagcgcgtcagcgaccctgaaaccggcaccggttccatcctgtgggcgccgaacccgggcatgcgcggcggccaggctatcgccgaaatcatctttggcctgaccaacccgtcgggccgactgccgatcaccttcccacgccacgcgggccagctgccggtctactacaaccagattcgcggccagcacggcgaccggtacgccgacctcacccaggatccggcgttcgcgttcggcgaaggcctgagctacacgacgttcgcatacggcgaaccgaccattacgggcggcgcaagcaacgccgacggcacattcgccgaaaccgacaccgtacgtgccgaaatcaccctcaccaacaccggcgagcgcgccggcgtggagatcgtgcaggcctacatcggcgacatcgtgacctcctacagctggaccgaccgcgaattgaaggcgttccagcgcgtcgcactggaacccggcgagaccaagaccgtcaccttcgagatcccggtggcgaactgcacgatcgtggacccggacgccaaccgcatcgtcgagcccggcgaatttgaactgctcatcggcccctcctcgcgccgtgaggacctgaagcgcaccacgttcaccgtggcgtgagtgagtctgacaatcgccggataataacaaagtgggatgaggctcgatgccccatcccacttgttggcttgttgtactgttgcgatgttgctggtcagcgtcagtcggacgtttcagtcggacgtggtgatgtgctccacatcccagcgcacgccgagcacttcgggcgcgcaactggcgttcgagccctatcagcgcgcccaatgccgtgccgagcacaatgcgtacggtgcagtcgagaatgatggccagagaaagcgtggtgaacatgaggattcacctcctgaaaagtagacgtcaggaacttcccgcacgccctacagcgccagcccgcctcccgcaactacgtcgccgcgttcgggtggttcgggctccgtgcggtgagtgggacgcggccgtatgatggaagcgcgggtggtccgggattggtccgggactgttggatgcggcgggaggtgtcatggttcctatcgagcacgtgtacgaccagattcgcgcgtttgccgctgatgccggcgctcgcaaggtcgtgctgttcggttctcgcgcaaagggcgtgaaccggcctaaaagcgatatcgatcttgccgtggccggttgccccgatttcaatcgcttggagcagaaccttcaggacaatctgtggtcactgcttaaagttgatgtcatcaatctggatgagccgatttcttcatcgctgagggcggagattgagcgtagcggaaaggtgttgtatgaaaaagtatgagaattacgtttccgcattgaattcgctgcgcaaggctcccgaacaggatctcggcaatgatttcatccagagcggcattattgacaagttcgggttgcagttcgagcttggttggaaactgttcaaggcgctgctggcttatgagggagaccctgtttccgcttccggctctccgcgagatgtgctcaaaaccgcttttcaatactatgatttcatggacgaatcgttgtggctgcgcatgctgcgcgatcgcaatgattctgctcatatctatgatgaagaacgagctcggcgtcttgtggacgccatcatcgctgattacatccccgagtttgagcgtgcaaatcaggggttggtcgctcgctacggtgaagcattgaacgattagcgtgacaggtatggcatcgggcgcgctgggtgttggcgaacgaattaatggggtgaacctcggcaattggctggtgctggagcggtggatgaagccggggatttttgccgccagcggcgaggcggacgagatctggctgcatcgggctacgaagtcggctgagctggaggctttgctgacgcggcatcgcgacacgtatattaccgaggccgatttccggaacattgccgcacatggctgcaatctggtgcgtattccagtgccctatttcgtgttcggggatgtgcccggtcacccgggctgtaccgagtatctggacagagcgttcgactgggccgagcgggccgggctcaagattcttatcgacctgcacacggtgcccggctcgcagaacggattcgataacggcggcctcaccggcgtggtgcgctggcatcgtagcccgcgagcggtcgtctatgcgctggatgtgctggtccgtctggctcgccggtatcgcgaccacgcggcgctgttcggtatcgaagtgctgaatgagccgattgactggctgacgtatgccatgtcaccatcgagcaggcaggcgaaagaccggtccgaagcgcggggaagcgggcctattccgatggcgttcctcaagcgtttctaccgcgagacataccaccggttgcgcccgattctggcagggaatcaagtcatcgtgttccatgacggcttccgactgggccgttggcgggactggttcgtgcgcgagggcatgcggggcgtcatgctcgatacgcatgtctatctggttatggccgagcaattcccgctgttccgtctgatcccggatcggtggctgatgggctggtatcgcttgttcgtgcgctggaacgaacgccgcatccgccgggccgcgcgctatacgccggtgatcgtaggggagtggtgcgtggccaacaatctggtgaaccgaaccccttcagcgaggaatgccgtctatcgcgaggtcgccgccatgcagcgcaaagcgtggagcgcatctgccgggcagatctactggagctaccaactgcgcggcaatcgcgctttcctgcctaccatcgacccgcaatccgacacgtcacgcctcgacccctgggatctcactcacgtttggcacgccggttggatggcctgcagccgcaccaattagcgatatccctcccaaaggggcaaaggcatcagaacatcctcgcaatcggcccacatggtattgagatcttggccgggggcgcgcagccagcgcagctggaggccgtccatcatcgagaatccggcctgcagcacatgtccgacattgacgccttccggcacggcccagttgatgttgagcgccgtggtgaccgtgcggcgctcgcggtcggcgaaataatcgtgcgcggggtgggccgggtcgagcgcctcggcgctcagcgtggagaacatatgcaccaacgtgggccttttgttcctgggcctgccggaagccgcggaatccgagggcttcgaccgcgacaccctcgacatgcccgccaagcagatcgccctgctcgaacaggtcgccgccacgaaccagaacgtcgtggtcgtgctgtccaacggctccgtggtctccgtggccccgtgggccaagaacgccaagggcatcctcgaatcctggctgctcggccagtccggtggcccggcgctcgccgatgtgatcttcggccaggtcagcccgtccggcaagctcgcccagtccattccgctggacatcaacgatgacccgagcatgacgaactggccgggcgaggagggccacgtcgactacggcgagggcgtattcgtcggctaccgctactacgacacctacggcaaggctgtggactatccgttcggctacggcctgagctacgccacgttcgagatcgtcgacgtcaccgccatcaagaccggcgcgaacaccgccaccgtgaccgccaccgtgaccaacacctccgatgtggacgccgccgaaaccgtgcaggtgtatgtggctccgggcaaggccgacgtggcccgcccgaagcacgagctcaagggcttcaccaaggtgttcctcaaggccggcggatccaagaccgtgaccatcgacctcgacgagcgcgcgttcgcctactggtccgaaaagtacaacgactggcacgtggaggccggcgaatatgccatcgaagtgggcgtgagctcccgcgacattgccgacaccgttgccgtggccctcgatggcgacggcaagacccagccgctcaccgaatggtccacctacggcgagtgggaggccgatccgttcggcgccaagatcgtggccgccgtggccgccgccggcgaggccggcgagctgccgaagcttccggataatgcgatgatgcgcatgttcctcaactccatgcccatcaactcgctgcccaccctgctgggcgaaggcggcaagaagatcgcccagttcatggttgacgagtacgccaagctgagcaagtaatactacgcaaactgccagctcccttttctgagattcagagaagggagccagtttgtgtatagggcatatgtgggggttcgttgtctaggcaacatgctgattgttgtatatgcaactgttgtatatgggtctctttatcatgaattgttgcatatacaacaatgtggggtgaaggcgcatacgcgcacggcctcgcatggtacggaggacaatggatcagcctattctcatcattgagatgcgtgcggtgaccaaagccgtcgaccgctatctcggtgagagcatgccgctttccgctaaggagaccactggcggcaacgcgcatatcatcatgttcctggctcgtaaccggaatcgtgaaatctaccagcacaccatcgaacagaagttctgtatcacccgctccaccgcttcgcgcgtgctggcgcttatggaaaagaaagggcttattgcccgcgaatcggtggcgcatgatgcccgttgcaagcgtatcgtcctgaccgataaggcggacgccatcgtcaccgatctcaaagcgaacggcgaacgcgtcgaacgtctgttggttgatggcttttccgaaagcgagaaagcagccctacgtgactacgtcagtcgcatgcgcgcgaacatcgaccgcgcacaacatgaatttgagcatcaaacactccctcagtcacctggggtgatggctcccgaccaagacggagcggaggttgctaacacgaaggaggagaacgaatgagcgataccgcagaggcaatcgcgcaggcgcgcaaagccgtcgaactggacaagcccaaacatgtactgcgcacgctgggccattcgattcgcgaatacaagaaagccagcatcctggctccggtgttcgtggcggtcgaaggtattctggaaatcctgattccgaccatcatggcttcgctgatcgatgagggtatcaccggtggcagcatgccggccaccgtcaagttcggc

SEQ ID NO: 477 - DNA, 7328 bp, Unknown
  R48_24m  MAG No. k141_33195
atcctcaagctgctcgaacagcgggatcacgtcgatggtgggcacgtcctccgggtgggagaaggccaagcggttgagctcgtagacatccttgatgttctgggcgctcttggtgaaggagatgatgtagcggcgggcggccttgaggccgttgcgcttctggatggcaccgagggcgcggaaggtgtcgagcacctcgtgcgtcatcggctgcagttcgccgcgctcgccgtgcaggccgtgctcgcggatatccgcaagggcgcgggcgtgcaccacggagtgctgacggaactccatctccaccatgtggaagccgaaggtctcggtctgccagatcagatcctgcagcgggccgtaagcggaacgcttggcgccggcggcggccagcgaacgctggaccaccttgaggtcggcgaggaagtcgtcgcaggagtggtacatgaggtcggcatcgcgctcgatggtgtagtgcagacgatcggccatcaccagcatgaccgcgcggtgcatctccttggtggagatcagggcggccttgtcggtcaggcgctcgctcatttccttctggtggctccagaggctcttgagctcggcgcttggcggcgtggtctcggcttccatcgtgaggttgcggcccacggtgcgggtggcttgctcaagggcggcgatcacgtgatcggagaacttgcgggccacggcgcggctcaccttggcggtgacgttcgggttaccgtcgcggtcggagccgatccagctgcccgggtggaagaacgcggggcaagcgggctcgacgagaccggccttatcgcccaggacccagtcgtcgaagcgacggtaaaccttggggatggtgttgaacagcgtgttgtcgaagatgtcgagaatcgtgtccgcttcctcaaccggggtcggcttcttcagcgcgatcggagaagtgcggaacagggcgtcgatctcgttgtagagacggcgcaggcattccttcttatccgagccgccgaggcgcttgtactcctcaagcaattcggaaacgcggcgaatcttgccttccacggccttgcgacgggcctcagtggggtgcgccgtgaagacggggtggaattcgagctggttgagcagttccttggccttggccgggccagtctcattgatgagctggtggtaggcgacggtgagctcgttgatcgggtcgaccgcctggtcaacggacacgttgttctcgcgctcgtggagcacggaaacgcggtagttctcctcggacaggtttgccagatggaaatacgtggcgaacgcgcgggccagcagctgggcgtcgtgcagcgtcatgttgtcgatgacgttcacggcctccttcaggccatcctggtcggggttcggatccttcagctcggcgaaatgctcggcgctggcctccaccgcgtaatgacgcacggtgtcgaacgtagacagcagttcggggttgtattcgcccaggacgttacgcaggatctcaagacacagatccatgtcgtacttcaggctttcgggaagatcatgctcctccgggccctttcggccggtcccggtagtgacgatggcggcgtcagcgggagtgatctgttcttcaggtgttgccatataacctcctttgccgaataacaggttgctcggtctaccggtcgtctgcggctcctccgcagttgttgaggccagtcgttgcgagcccacagcccatattcaacgtggttgttgtgtgggcaatagtgtatccccgcgaaatcgctatttgcgttacggagtccatatagtgcgccaagttgtccacctatagagaccgaatatcggacagcatatgagacactgtccgattcgcggaagatttgagcgccttacgattgccggcgggggaggcagggagtagtaatgagggatgtgagcgaacagaagaaaaaaagtgcgcccgaagcgaaaggcgcaacggctgtacgtaaattccacacccactccattccgctggacatggaagatattgcacgcgattgggaaaaaccggtggtggacgccggtatcgccgccaaagccagcgtgattgtacgggtcggcatgctggacttgggagccggcaccggctccttccgcgtgcgtgaaatgatgcaccgcatcgcctacccgctgggcgtgcacgtacgcgccgacgtgaacctgacggatatcgaggccacctgcacggatggtcgtaaccgcatcaccgaagtcgtggatttgccgaccaccggcgtgaacaccgaacgtatctggctgctggaacatttcgccgactggttctccgtgaatctcggcaaggggtcgatgtatcacgtcgattcgcaactgtccgatggcgtggtcaagcatttggacgaacgtgacgcttcgcagtattcggccgatctggccaagcgcctgcgcgaacgtgccaaggtcgaggctgaggcggccaacggcagcgtggacgaggcgctggatcttgcgtcgaaaaccaaggtactcgtgacctccgtggccaagtccttggacgatgacaatgaagaagcccaccgacttttggcggacagcgcggaagtcactccggtcgaagacaaagcggccgaagagaaggcctacgacgatgccgaagtgtttaccggtgactccaatgagtcggttgaatcggcgaacgcggcgaacggcgcaatcgccgaaagccctgctgcaagcagtacgaagcgtaagaatcgcgtgcccaaggaatacgccgaacacttcaacgagcgctccgacgaagagaaggccaagggcggtatcaccgtgcggcaggcgcacgagcgactcgatctgattgagcgccgtaagccgctgtacaagccgtggttctccggtctggcctccgccctagcctgcgcggccttcgtgttcctgctcggcggcggcccatacgacatgatcggtgcgttcgtgggcgcgggccttggccagtggatgcgtcgccggctgtttgcataccatctgaaccagttcttcgtcacctttgtgtgcgtggccgcggcggcgctcgcctgcaccggcaccctgcgactcatcggcattttcgacccagtcgcgctctcgcacgatacggcctacatcggcgccatgctgttcgtgatccccggtttcccgctcatcaccggcggactcgacatggcgaaaatcgacttcccctcgggcatccagcgcgtggcgtacgtgctgtgcatcatcctgatggccacgctggcaggctgggccgtggccgtgatggtgcacctgcacccggaaggctttgagccactggggcttgacccgtgggtcaacggattgctgcgattcgtggcggcgttcgtcggcgtgtggggcttctccgtgctgttcaattcgccgcagcgcatgtgcctgaccgccgccctgatcggtgcgatcacggacacgctgcgcttggaattgcaagacttcaacgtggcacccgagatggctaccttcatcggcgcgtttctggcgggcattctggcatcggtgtggcgttcatccgtgcgacgtggctggctaccgccgcacctcggctacccgcgcatctgcctgaccgtgccgtcgatcgtgatcatggtgcccggtctgtatatgtatcgtgccatgtggtacctcggcagcttccagaccatgaatgcgctggactgggcgttccgtgcgttcatggtgattatctgtctgccgatcggtttggcgatggcccgcgtggtgaccgacaagtcctggcgctacgacatctgaccgtcatcttggctcccctcaggtgaggggagctcggataaaacagcgtctcagtatggaaacggtggaaggtgcttgagcccttgtattcactaccatcaggcgaagtgcgttgcggccgtattcacggctgtgacggtctgtatgacgccgctccggcgtcaatcgcatatcagcacatagttctgccatggcggtagccgcttggcgtcatgattgaggaggggcgcagttggccaacgatttctggattctgctggccatggtcatctattttgcggccatgctgtccatcggattcatctactccaaacgctccaactcctcctccaaggaatactttgcgggcgggcgcggcgtggggccgtggctcacggccctgagcgccgaagcctccgacatgagcggctggctgctgatgggcctgccgggcctggcctacttcactggtgcggccgacccgatgtggaccgccgtcggactggcgctcggcacctatctcaactggaagcttgtggcccggcgactgcgccgctactcggtagtggccggcgatgccatcaccattcctgacttcttcgccaagcgtttccatgacaagaagggcgtggtctccaccatcgcggccgtgatcatcctggtgttcttcagcgtgtacgtgggcagctgcttcgtgaccgtgggcaagctgttcgccacgttgttcggtttcgactaccacgtcatgatgatcatcggcgcggtggtcgtgttcgtctacaccgtggtgggcggctacttgtccgtggtgatgaccgacttcattcaaggcatgctcatgttcttcgcgctcgcggtggtgttcatcggcaccgtggccagcgcgggcggtgtcgacaacaccgtggaattcctgcgtgccatccccggctacctgtccggcacgcaggtggccgcgcccaagctggacccggccaccggccagcagctcgtcgaggcgggcaaggccgtgttcggcgcgccctccgactacggcatcatcaccatcatctccatgctggcgtggggcctgggttacttcggtatgccgcaggtgctggtgcgcttcctgtccatccgcagcgtggaagaagtgcgcaagtcccgaatcatcgccacctcctggtgcgtgatttcgctgggttgcgcagtgtgcatcggcttggtggggcgtgcgatgatgcccaccgaactgctgacctccaccgatgcggaaaccatcttcatcgtgctggcgcagaccctgctgccgagcttcatgtgcggcgtggtggtctccggcattttcgcggcctcgatgagctccagctcctcgtatctgatcatcggcgcttcggccatgggcgagaacatcttccgcgggctgctgcaccgcaaggccaccgacaagcaggtcatgatcgtggccagggtcacgctggtggtcatgttcctgttcggtattctggtggcatacgaccagaactcgtcgatcttccaggtggtgtcttacgcgtgggccgggcttggtgcctcattcggcccgttgatgctgtgctcgctatactggcgtcgcgccaacaaggccggcgccgtggccggcatgctgtccggcacggcggccgtgctgatctggcacaacctcgtcaagcccttgggtggcgtattcgccatctatgagctgctgccggcgttcatcatttcgctgctgttcatcgtggtggtttcgttgctgaccgccaagccgaacgagcgtatgctctacgaattcgaccactacatggacgatccgctgcccggcaccctgccgtccggcaccgtgctcgtcgacgagcccatggaagccatggagtccgaggtccgcagcggcaaatgacacgtgcctgctgtgcggtcggctcgtatggcagaggagtggcttttttgtggttcggcaggaaccattgaggccaaaacggacttcgaggggctgatttgacgttctggagagatctacttccgtttcaaggggctgatgcctgagtagacgcggctccaaaacggcggaatggcgttggcgtaagggcattgatacacgtgatctagcggatgatcagccccttgaaacggaagtagacctccggcggaggccaaatcagccccttgaaatgggttttgaataccgtagcgcggtgcggacggtgcggactgactctaccgggcttattattcctgcgtcgtcggaataattggcagcagaggctcgaatttcagccgtttgtacagcggaatacggcgtagctttcggacatcgctaatttgctgggtagtttgccgcatcgtgagctggaccgttttgcccgtaacctcctgtatcctttcggcaactcttcgggcaagggcctcttctcccgcttcgtcgccaatatctaatttggtgacttgaatgtacttccagccagcatcttcgatcatctggcggcgtctcgcgtcattcagccattgcccggcatgatgagagccttcgtattcgatacatatcttgaattcagggtatgcaagatcgagatatatgggtctggtgttgtttcctacgaatattggataattcacctgcgggcaattcagaccgtatttcaagagaaccaaacgagttcgtgtttccatggaggaatctgtgcccgcgcgcgccaaaagtagggcgcgacggcatttgttatacccgcggaacaaatacgaattggtgccattctctttgtcggctcgcacctgggcctcggcctcatcgagatacagagaaagggcgtcgatggttgttctgcagagccttcgatctcgtcgcatcatggaatcagcgagaacgatgagttcttcaagttcgagatacgtggagaacatggcccatgtgcaagctggtgaagtgcatgtgaattgtccctcgattatgaccgtgtctagtggaaaaggccatacaaccactttgacccccacaatgtgccgtttgtcattggcgtgtggaaccgcaacaatggttgtagttgcaaggcctctgtgtttgcttgatatgcggggtacttcaattgacaaaagctccaacgctgttgtcagggcatagggtgggcgccatgcgcttcgtcgttgaacatctgcgcacgtctgcattcgttggtacttctgcattgtcagctcggtcaatgccgttgagctacccatgatgatcaccccttcgtgatgttcgctttgtcctcgcagtgtagagtccggctaccggccctgtctaccgccccaatttttcggtggataaatgtggataagtcggtggataaactatgggtgttcatcgcagttgcaggccatcccgcaattacatggaacgtaggggtttgcaggcagccagcgggaatcgccgtcgacggcgcgattcaacttggacgaatctccatggcgttcatgcaaaggtggcatgatggccggtatgagtagcttggtgcgtattgtcaatgccggtgttccggggtctcaggaccgcgtggatgtggtgcttcgcgatgggggtgttgcgtctg

SEQ ID NO: 478 - DNA, 5354 bp, Unknown
  R48_24m  MAG No. k141_33248
gaggaagaccttcggctcacggacgattgcacgacccatggccacacgctgacgctgaccaccggacagagccttcggcttacgatcgaggtactcggtcaggtcgaggatctcagcggccttctcgacgcgcttgcggatctcttccgtcggagtgccggcaatcttcagagcgaagcccatattgtcggccacggtcatgtgcgggtacagggcgtagttctggaacaccattgcgatgtcgcggtccttcggctgcatcgtggtgacatccttgccaccaatgaggatgcggcccttgttgacctcttccaggccggcgagcatacgaagggtcgtagacttaccgcagccagaggggccgacgaggacgaggaactcgccatccttgatatcaagattcagatcatccacggagggcttatcgttgcccgggtagatacgagtgacgtggtcgaaaacgacttctgccataattactaatcctttcagaggcaggtacgtgcctcacgatccgttgtaaagggatttgttctttactgcgcttccgccctcgccaccgacgtacaactttgctttcggaaactgcaagcttcagcgtttacttttttccggttcagtgaaggttctcttcgttgagccgagaactactatacacggaccgtggaccaaggcaagtggcgtgtctgaaaatgtagttaactttatgggcgtttctgggggtgttgtgtggttcggcccatgacacgcttgtttctcgaacgtgcgaaccggcacgcccggcgtagagcaggcctgctcttcccgaactgacggattccatcagtcgccgactaatgcaacacagactcgaaggtgacgccgttgcgggcggctttgcgctcggccttgcgctcctcggcgttttcgatgcgctggatgcgcagctggcgccagtcctcgcgcatgtcgcggaaacggtcggccagcgttacgtcatcgttctcggcatcgtcatcagtaccgctgccatcggccttaccgaacgtgccatcggccaccttggtgatgcccagcttgagcagtccgagcaactcacgcaacgtttccggtacgggctcatcgccctcatcggcggactgggtcaggccctcgatgcgacgacgaagcgcgtcggcgtcctcgggatcgatcttgagtccggcgatcagcgactggcgcatggtctcgtaatcgaggttggcaaagaaattcagctgttgcagcgtcatgaagcccttgagctcggggaatcggtggacgatgtattcctcgcggtcgtcggcggcgcgggtccagtcgcgggtgagctgcggatcccagttggcggtaatcgatccctcgcgcatgcggtagtggtacagcgccttgggcagacggaccacgcgcgtggcctcgccgatcacgttgcagatacgggagagatcctcgattttgcgccccaccgggaaggagaatccggtgccctgataggtggaggcgggtgccaggaaggcccagaaatagccgtcaatctcagccttgacttgctttttgatggcctcgaccggggtcaggatctgcacctcggtgaagtcgttgtggcgatagttggacagcagcggcttgttgttctcggagatggtgtcgaactggaacatcacgaggtcggcgtcatactcgcgcatggcgttcaggcagtcctccaccaacgtgggggccacggtgtcgtcggaatcggcgaagtatatgtacgcaccggtggccccggcgatgccggtgttgcgggcgtcggacaggccgccgttgggcttgtgaatcacgcgtatgcgcgggtcgcgggcggcccaggcgtcgcacatggccgggcaattgtcgggcgagccgtcgtcgaccagcagaatctcgaggttgcgataggtctgcgcaaccacagacttcacgcattcatcaaggaatttctcgaccttatataccgggatgatgatgctgaccaacggctcctgttccatgcctccagcgtagcgccgtcgtgcgaacgcggcggcgctacgggttcgcggaccgcgaaacccttagaaatcccagtcgtcgtcatcggtttcttcggctttgcccatcacgtaggaggagccggagccggagaagaagtcgtggttttcgtcggcgttcgggctcagggcggccaggatcgcggggttcacatcgcaaatctcagccgggaacaaagccgggtagccgaggttcatcagcgccttgttaccgttgtaccgcaggaacttctcgacgtcatcggtcaggcccacgcggtcgtacagcgactgggtgtactccacttcgttgtcgtacagctcgttgagcaggtcgtacgtgtagtcctgcagatccagacgctcggcatcgctcagctgggcgatgcccttctggtacttgtagccgatgtagtagccgtggacggcctcatcgcggatgatcagacgaatcacgtcggcggtgttcgtcagcttggcgtgcgcggagaagtacatcggcagatagaagccggagtagaagaggaaggattcgagcagggtggaggccaccttgcgcttgtacgggttgtcgccctcgtagtagtcgagcacgatttccgccttcttctgcagaaactcgttgttctcgctccagtcgaatgcggcatcgatctgttcggtggagcacagggtggagaagatggacgagtagcttttggcgtgcacggattccatgaaggcgatgttggtgtacacggcctcctcgtgcggggtgagcgcgtccggaatcagggagacggcgccgaccgtgccctggatggtgtcaagcagggtcaggccggtgaagacgcgcatggtgagcgtgtgctcgtcctcggtcatcttctgccagctggggatgtcgttggagacgggaactttttcgggcagccagaagttgccggtcaagcggtcccagacctcaaggtctttctcatcttcgaggcggttccagttgattgcggagacgcggtcgatgagtttcagcggtttgcgcggaatggagataggtgccatgagtgttccttattactcgttgtcgttgtcgttgtcgttatcgtcgttggacttgttttcgaactcctccggcgcggtcagccggagcagtgctctatagatggttcgtgacattgttggttccttagatggtggagccccccctcagtccgcttcgcggccagctcccctctctgaggggagctgtcggcgttagccgagtgaggggagtaacaacggctctctggttgttcaatgcgtgcggagaccgccgtctgaggccgaaggcgcacgaaggtacgtcgagtgccgaagaaaggcggtatacgctccctcgaacgatcagagcatgcaggagacgcagccttggacttcagtgccttccagggcttgctggcggatgcggatgtagtagagggttttgatgcccttgcgccaggcgtagatctgggccttattgaggtcgcgggtggtggcggtgtccgggaagaacagcgtcagcgacagtccctgatccacgtgctgggtggcctcggcgtacgtgtcgacgatggccttccagccgatctcgtaggcgtccttgtagtacccgaggttgtcgttggtcatgtaggcggccgggtagtacacgcgcccgatcttgccttccttgcgaatctcgatcttggaggcgatcgggtgaatcgagctcgtggaatggttgatgtacgagatcgagccggtgggcggcacggcctgcaggttctggttgtaaatgccgtccttcagaatcgcgtcgcgcagggcctcccagtcggccgcagtcgggatcgcgatgccgtactgttcgaacagcgcacggacccgttcggtgcgcggagtgagcgaacgacgaccatcggtgtacttgtcgaagtagttgccctggccggccggcttggcgtagtcgctcgtagcgaagctggcgaacgtgcggccatgctccacggcgagcgcgtgcgaggcacggtaggcgtggtaggccacggtcatgaagtacatgtcggtgaagtcgaggccctcttcagaaccgtactggatgccttcgcgggccaggaagccgtgcaggttcatctggccgagaccgatggcgtggccctcctcattggcgcggcgaatcgaaggcaccgcgttgatgctggtgtgctcggccaccgaggtgagtgcgcggatcgccgtctccaccgtgtggcccaagccgccatccatcgccttggcgatgttgagcgaacccagattgcaggagatgtcgcggccgacatgcgcatacgtgaggtcctcgttgtatgcgctcggctcctgaacctgcaggatttccgagcacaggttggacatggtcacgcgaccttcgatcgggttcgcgcggttgaccgtgtcctcgaacacgatgtacgggtagccggattcgaactgcagttcggcgatggtggtgaagaacttacgggcgtcgatgtaggtcttcttgatgcggtcgtcggccaccatctcgtcataatgctcggtaacggagatgtcggcgaacggcttgccgtacacgcgctccacgtcgtacgggctgaacagggccatctgggccttctgtttggccagttcgaacgtgatgtccggaatcaccacgccaagagccagcgacttgatgcggatcttctcgtccgcgttctctcgcttggtatccaggaagcgcaggatatcagggtggtgggcgttgaggtacaccgcgcccgcgccctgacgtgcgccgagctggttggcataggagaaggagtcctccagcagcttcatgaccggaatcacgccgctggactggttctcgatgtgcttgatcggggcgccgagctcgcgcaggttgctcagcagcagggccacgccaccgccgcgcttggagagctggagggccgcgttgatgccgcgcgaaatcgactccatgttgtcttcgatgcgcaccaggaagcagctgaccggttcgccacgctgggccttgccgaggttcaggaaggtcggggtggcgggctggaagcggccggcaagcatttcgtcggcgtattcgatggcctgctgctcattgccggcggcgagctccagggccacagcggcgcaacgctgcgggaagtcctcaagatagaggcgaccatcgaacgtcttgagcgcgtaggacgtgtagaacttgaacgcaccaaggaaagtgccgaactcaaagccggcggattccacgtgctcgtagatgcggtcgaggaattcagcggagtactggttgaagaccgcagggttgtagtactggttgctgatcaggta

SEQ ID NO: 479 - DNA, 6569 bp, Unknown
  R48_24m  MAG No. k141_33437
aggtattcgcccggctcgatggcatgcgtgcccggcatcgcgccgagcggccacctactgccaccacgcccggctcggagttgacaagtacgccggactcggggcggaggtggccggggcgttcgccgattccaagggcaggtacgggtaccgcaggatcaaggcggtgctcaagaccggcgtatcggagaagtcggtccgcaggatcatggcggaggaagggctcgtggcgcacgtgcccaagcgacgcaggtatagttcctacgagggcgagacgacgccggctcccgtcaatctcgtcgaccggggcttcacggccgagcgtccgaacgagaaacggcccgcggacatcacccgggatcaaggccagggacgggaagggcgtgcctctcgccgccggtcgactgcttcgatggcaagatcgtcgcatacaccgccggcttcagccccaacgcggagccggccaaccggatgccggagaaagcggcctcgacgctgccggggaacgcgcgtcccctggtgcattccgaccgtggccgccactgccggtggcccggatggctcgcgctcatggaacgcttcgggctgacgcgctccatgagcgcgaagggctgttcgccggacaacgcggccgcggagggattcttcggcgggatgaagaccgaggcggtccaccccgagaagtgggaggaacacacccgcaacgaggtgctcgccttggtcgatgagtgcatacgctggcacgaccacgagcgcatcaaacagtcgcttggttggatgagcccggtacaataccgtcaaagccaaggaatggctgcgtgattatctccaagaaaatgtccgcagcccccaacgcccgggattttgcgcactttggtctgggcttgggataggggcatggcccgtgtcctgtgtacgattttctgtcgccaaacaaaacaaaccgcgattggagacgagggcacgaagccatgccgcagcagattccacaggttcgccggcacacggccggggcgtcgaaaaaggggctcccggtccgtcggcgtctcccgggaggacggaacatgatcgaatacgtcttcaaccgcatgaagcactaccgcaagccgccacccgccacgacaggctcgacgagacctccctcgccaacctccggctcatcctcatcgccatccacctgaaagtttttataatctcttataatttctgtcatcctaagaatcaaaatcatgtcaaagtcggaaacgaaatcatgtcaaagtcggaaacgaaatcatgtcaaagtcggaaacgaaaacatgtcaaaccgagaaacgaaactatgtcataataggaagcaagaacagataatcgttgatttttcaggagtttgccgcaatgaagcaatatagaaagcgaatttacgatacagtgctgcggcaccgtcttgaagccacaggtgcggtcttggtcgagggaccgaaatggtgcgggaaaacaacgacttgtctgcaattagcacaaagcgtgctgtacatggcacaacctgatatccgcgagcaaaacatcatgcttacggatatgcagccttcgctgcttctgcaaggagcgacaccgcgactcatcgatgagtggcaaattgcacccaaactgtgggatgctgtccgtttcgaagtcgatcaacgcgacgaattcaatcagtttctccttaccggctcaagtgtgccgcccagctttacagacattacccacacaggaaccggcaggatagctcgcctacgcatgaggcctatgagcttgtatgagtccggagattctacaggtgcggtatcgttcgcttcactgttcgaaggtgaatctatgccgctctcccgagtggactccaacattgaacacattgctttcctgttgtgccgtggcggatggccgaaggcaatcgaccaaacagagcgcatcgcgctacaacagtctcgagattacttggatgccattgtcgagtcggatatctcccgagtggatgatgtgcaacgagattctcatctggcacgtcgtttattgcgttcgtatgcccgtatggaatcatcgcaggctcagtcagcacaaattgccgcggacgtgcgaggcagtgccgaaagtcccagcgacaaaaccgtgcaatcctacatatccgcactagaaaaaatattcgttcttgaggatatgcctgcgtggaatccaaatttgcgctccaagagtgcaatacgcacttcagataccagacattttgtcgatccctccatcgcagcggcagcattaggaatcgggccagccggcctcatcaaagatctcgagacttttggactgttgtttgaaagtatgtgcgtacgagacttccgcgtatacgcagacgccctcgatggcgatgtgttccacttccgcgacagaactgggcttgagtgcgatgcggtccttcacctgcgggatggccgatacgggctcatcgaagtcaagctgggagggaaccgactcatcgaagaaggtgctgccaacctaataaagctcgccgacaaaatcgacaccaccaccatgtcaaaacccagtttccttatggtggcgacaggcacaggtgaatacagtttcacccgccgagacggtgtcatggtggcccccatcagaacgcttagaccatagcattgccaggggtgaaacaacggttctgccaaaatcgggcgtgtcaatcgatgcacgccgtgattttggcagaaccgttgtgttccaagggatatgccgcgtccacgagcagacgtcgtgtatcgaccacatcaataccctcatataactgttttcgatgtgagaaagctcacggtctccaaccgcagaaaccagccacagcaaccccataacagcgttatagttctgtttgtcggcgtcgacaagagccagcagcgccgatgaaatgcacaccaaggatgtttagcgaattgttcgcagttcgcacgattcgatttgattcgattcgtgcagcccggatggttcacgggggcatgccgtcgtgatgtgcgtggatatgggcgatacgactctcgttcgggtcggcaggtcatcgtacaccagttacgaaaggatccgtccatatatggcaaggtttaccgagaatcgttggaccagcgcgattattcccgcactgctgattcatatcccaatcggtaccgtctattgctggagcgtgttcaagcagcttatcgctgaccgtctccacgccagctccgcctccgtggaatggggcttctcactcgccatcttcttcctcggcatgtccgccgcgtttgccgggccaatggtggagaaaaacatcaagaaatccgcactcgtctccatggtctgcttcgtggtcggcttcgccggcacgggcgtgagcatcgccctgaacttcctgccgggcgtgttcatctgttatggcgcgatcatgggcatcggcctgggcgtcggttatctgactccggtcaagaacctgatgctttggttcgccgacaacaagggcctcgccaccggcatcgccgtcgccggcttcggcctggccaaggccattgccagcccactgatggaatatctcatcggcacggttggcctggtcagcatgttcttcatcctcgccgcggtctacgcggtgatgatgttcgtcggcttcctgctcatcaagcgtccggccggctgggtgtacgatcccgcgacctcacacgtcagccgcaagacaatcctcaagaagcccgtgttctggggcatctggatagccttctatatcaacatcacctgcggcctggccctcatcagccaagagaaggacatcctgcacgatgtgctcaaggccttcccgcagtatgccaacctgagccccgccaagtttgccgccgccatctccggcatcatcggactggtgctcgccgtggactccgtgttcaacacggctggccgcgtgggcttctccacactctccgaccacctgaagcgccgcgaaaccgtctatcaggtaatcttcatcatgtcgattgccgtgtgcttgctgcagatcttcaccaacagcatcgacaacgctctgctgtgggccgtgctggccatgctgttcctcgtcaacgcgggctatggtggcggtttctcgacgctgcccgtgctgcttgatcagcacttcggcaccaaaaccgtctccaccacgcacggtctgacgctgagcgcctgggcgttcgccggtctgtccggcaaccagttggcctcgttcgtagttgcccacgcgcctgatcaggcccaccgctacgccgcactcatcccggtgctcaccggcctgttcgttgtggccctgatcagcatcagcctggtcaagtacctcggcgacagaaacgtcacgaaggccgtcgaagaccgaggctgagatgccgcaaaacaacgattctgccggagtcgggcgcatcaatcgatgtacgtcacgattttgacagaatcgttgttgttgctgttgagtacctgaggtcgtgcggcttacgcgccaaccagttcgagcatttgggggatgctctttttgccgaattcgacttgctgggtgccgtcggcgtgggtgatgacgatgcagggcacgctcatcgcgccgtactggtccttaagttcggggaagtgcgagacgtcgtaggcttcggcgcgcacggccgggctcagggaggcaatacgctgggaagcaagcacggtttccgggcacatcgtgcaggtgagcgagacgaggatcatgatgttcagcgggtccgtgatggacttcgcgcgttcgaccaggtcatcacccagcggctggccgggaccggccgcattgtacaggccaagcacgaacgagttgaactcgtggccggaaggtatgccgtggaaggccagaccggtgaagaccagtgaaccattgccgtccttgccggccttgccgtcgccctcagccggcacgcagatgcgcacagtcggacgggcgagcggcaggacgccggcgacgtcgaacgtggcacggccggaatcgtccaacgaaccataagtgggcagttcggtgccgtccggcaaagtgacggccaatggctcgccaaccaccaaagaagtaggcacagaagcaccatccaccgccgtgatcagccctgcggcatcgacggcgaccgagttcagcttgccattcgacaacgcgactatctcgccgatgaagccctgcaattccgctgaaagcggggtgctgtccagctcaagggcaagggtgaccgggcgggtcatgcggccgaagaccacgccaagctgctgcttgatggcggcggagaacagttcgccgggcttcttggcggcgctggctgcggctgcggcatcggcgctgcgtttggcgggagccggggcgggcgtcgtgccagcggccgaggcggcggaggcggctttggcctcggactcctcataagcggaagcagtgggacgcggcggcaccaagccggttttctcgctcatctgcttggcataacgctccagttccacggcggcaatcgcaccgtcggcggtggcggtgaccacctggcgcaggttcttgacgcgcagatcgccggccgcgtatacgcccggcaccgaggtttcgaggtagtcgtgcgtgaccacgtaaccgtggtcgtcgagctccaccacgccgcgcaccaaatcggtggcgggcacatagccggcgaacacgaagacgccgaaggtgccggcgtcggcgggcttccacgtttcggtctggccggtggcaaggttcaggatcgaggcttctcgcaggcctccttggccggcggtgacgcccttcagctcgacctgataacgcacgtcgatcttcgggttgttcttggcttcggcggccactgcggcatcgcaggtgaagtccggttcgcgcacgagcacggtgactttggaggcgtatttggtcaggaacacggattcctcggccgcggcgaatccgccgccgaccaccagtacttccttgccggtgaagaactcgccgtcgcaggtggcgcagtaggccacgccgcggccggcgtactcggcctcgccctcgaagcccagcttgcgcgggctggcgccggtggcgatgaggatgccgaaggtcttgaggtcgccgcgtgaggtgtgcacggttttgatgtcaccatccacgtcgagaccggtggcttcggcggagaggaattcggcaccgaagtcctgagcctgctggcgcatggtctgggtgagtgcgcggcccgtggtgcggcccatgcccggatagttgacgacttcgttagtgatggtgatctggccgccgaaatcgtccttttcgagaatcagcacgcggtagcgagcgcgggccaggtacagacccgcggtaaggcccgcaggtccgccaccaatgactacgacgtcataaagattattggtctgagccatgattgaaactccttgcatatacacaggcccccgctggcgggggctcccgcgaagcgggtggtggtggttcaccgattgccgcgaccaccgccagccggcgttgccgacagcccccgcccgcgggggccaacaacatgccgtagttaaaaccctcacagctggcc

SEQ ID NO: 480 - DNA, 6052 bp, Unknown
  R48_24m  MAG No. k141_33629
cccgatgatcaacgccggaggcgtcacccgctgggctggtgcactgattggctccatcgtcctgtccgccggcttcatggcagcctgctccctgtccgaggctgtcaccgaacgctactcccgtaagttcaacttcgaatacggccagtcccgcgcctggggctccttcagctacgccatcgtggccctgagcgccggcttcctgttcaacatcagcccgatgatcaacttctggatcggcaccgcctgcggcgtcggcatgctgctcatctacctgttctgggttccggccgagcagaaggaagagctcaagaaggaagccgatccgaacgccgagaagaccaacccctccttcaaggagatggtcggcgtgctcaagatgccgaccctgtgggtgctcatcgtcttcatgctcctgaccaacaccttctacaccgacaagcagctgcgtcagatggaagctgccaaggcctgaaaggacacaccatgactgacttcactcccgaaacccctgttctcacccccatccgcgaccacgctgctgaactggcaaaagccgaagccggcgtggccgagatggccgccgaacgcaacaaccgctggtacccgaagttccacatcgcatccaacggcggttggatcaacgatccgaacggcctgtgcttctataagggccgctggcacgtgttctaccagctgcacccgtacggcacccagtggggtccgatgcactggggacacgtctcctccaccgacatgctcaattggaaacgtgagccaatcatgttcgccccgacccttgaagaggagaaggacggcgtattctccggttccgcagtaatcggcgacgatggcaagctcaagttctactacaccggccaccgttgggccaacggccacgacaacaccggcggcgactggcaggtgcagatgaccgcgctgccggacaatgacgagctcaccagcgccaccaagcagggcatgatcatcgactgcccgaccgacaaggtggatcaccactaccgcgacccgaaggtctggaagaccggcgacacctggtacatgaccttcggtgtctcctctgcggacaagcgcggccagatgtggctgttctcctccaaggacatggtccgctgggaatacgagcgcgtgctcttccagcacccggatccggatgtgttcatgctcgaatgccccgacttcttccccatcaaagacaaggacggcaacgagaagtgggtcattggcttctccgccatggggtccaagcccagcggcttcatgaaccgcaacgtcaacaacgccggctacatgatcggcacgtgggagccgggcggcgaattcaagccggaaaccgagttccgcctgtgggattgcggccacaactactacgccccgcagtccttcaatgtggacggccgtcagatcgtctatggctggatgagcccgttcgtgcagccgattcccatggaggatgacggctggtgtggtcagctcaccctgccgcgcgagatcacccttggcgatgacggcgacgtggtcaccgcgccggtcgccgaaatggaaggcctgcgcgaggataccctcgaccatggttcgatcacgctcgatatggatggcgagcaggtcatcgccgatgacgccgaggccgtggaaatcgaaatgaccatcgacttggctgcctccactgccgatcgtgccggcctgaagattcacgccaccgaagacggtgcctacacctacgtggcttatgacgaccagatcggccgcgtggtggtggatcgccaggccatggccaacggcgatcacggctaccgcgccgccccactgaccgacaccgaactggcctccggcaagctggacctgcgcgtgttcgtggatcgcggctccgtggaggtctacgtcaacggtggccaccaggtgctgagctcctactcctacgcctccgaaggcccgcgtgccatcaagctcgccgccgagtccggtagtctcaaggtggattccctgaagctccaccacatgaagtccatcggactggagtagctctctcacctccctcacagagggaggttttttgtgtgcccctgtcgttcgccttcgcctatactgatggacggcatataacacaatccatcacacgaccggcaggcgcgcaggctcctcaccttactgttccacgccccggccgcaagcgccaccagcaaaccggactggcgcggaaagcaaggtgacatcccatgtccatcgccaagcgcctcaagcgccgcatgcccaccgtcatcgccgtcatcgtattgctggcagtctgggaaacgtgggtggatctaggacatgtctcccccacgatgatctccgcgccaagcgagattttcgccgccaccatcgaaacgtggaacacgctcggcccggccgcggcgatcaccggctatgagggcgtggtcggcttcctgttcgccgtgttcttcggcattatgatcggcatcgcactgtactgctcgcacacgttcaacgcggcgttctatccgctgcttgccgccgcacaaaccatgccgctgatttccatcgccccgttgttcctgatttggttcggctttgagatttccggcaaaatcgtaatcgtggcggtattcggcctcttccccatcgccgtgcagaccgtgcgcggactagaagcggtgccccagttctattccgacgtcgcattgacctgcggcgcgaccccggtctggacgctctggcacgtgaagctgcgcgttgccgcacgtcagatctatggcggtatccgcgtatctgccgcatacatcttcgccacggcatccaccgctgaatatcttggcgcgcgcaagggcctcggcatctggctgcaggctgcctacaattcgttccgcacgccgctgatcttctccgccaccatcgtcattatcctgatgacatgcgtactgatgctggcggtgaacgccagcgagcgcatcctgctcggcccggccggcgatgacgaagaccccgacgcggaccagtagttctttttaccgtcaaagacacaagccggcggccagaaccgactgaacggggcggcttctcatgaggtctccagccctgtctctataatggaacagctttaccagcgtgtggcaaaccggctttcttgagctttcatagggaatgtcgggggcgctggtcgaacggaaatcaaggccctccatatcgttttctgccgacttccgttcgaagcaatcccagagaacgatagagagacaacgaattagggaaccatcattatgaagaaaagccttgtatccaaggccgctgccctcgtgggcgcccttgctatgactttcggtttcgccgcatgtggtcagaccaacaccgccgactcctccaactccaacacctccgacctcaagaaggtcactttcatgctttcctgggcgcccgataccaaccacatcggcgtgtacgtggccaagaacaagggctacttcaaggacgccggtcttgacgtggatatcgtggccgtggcccaggccggtgccgaacaggccgtgaacaacggtgtggccgacttcgccctgtccaacttgaccaatgtgggcatctacacgctgaagggcgctcacatcaagcaggtgctgcaggtgcagcagaagccgagcgccatttggtgcgcactggcgtccaacaccgccatcaagtcccctaaggatttggatggcaagaccttcgccaccttcggctccaacgagtccgacgccgtggtgcgccgcatgatccagaccgacggcggcaagggcgagttcgacaaggtgaccgtcggcacctccaccttccagaccatggaatccggcaaggccgatttcggcggcttctacgccacgtgggaaggcgtgcaggccgacatgtacggcccgaagctcaactgcttcaccgagcctgactacggcgtgcccggcaacgccgacgccatcggcatcatcaccaatgacaagaccatcaagaacaatcccgacctggtcaagaagttcactcaggccactcagaagggttacgagtacgcgtacgccaacccggatgacgccgcgcagattctcgtggacgaagcccctgacgccaacctcaagcccgaattcgtcaagaagagcatgcaggttatcgtcgacggccagtactggggcgatccggccaagatcaaggacggctctttcgtgctcggcaccaacgacttcaagggcactcaggaatacttcgacttcctggctgaagaagacgcctacactgacagtcatgacaaggtgattcatgaggccccgcaggccaaggaccttggcaccgacgaattcctcggcaagtaatttccgatattccgagtttgaatctacgcaaaaatgcgtccttcccatgaggaaaggacgcatttttgcgtatcggccgataaggttattcatagcgaatcatgctaacaaggaggcgattccatggcccaacgtcctgaccgcattattgccagcatggataccggtgttgatgatgcgttggcgttggcgtatttgttggggtcggcggatgagtgcgagctgagcggtgtgatcgccagttatggcaatgtggatgcgaacacggcttatgccaatacttgcgcggtgcttgatttgtttggccgggcggatattccggtgtttttgggctccgagcatccttcttgggctgatgcgtttattcccgatgcagggtgtgcccagtttcatgggaaggatggactggggaatacttggctggcaggggccggggctctggctgatggagctggtgtgcctggtgatgatatgtctggggatgacatgtctgaggatgtgcccgatggggttgtttctgttggcgggtatttggtaggggacgctcatgctcatccggcgtcggggtcttgttctcgtgtgggtcgctctcggcctgtggaccgtccccagtcggctacatcgacagctctcgccagctggggcaaaaggaggcgctccgttgatgctgcggatgggattgagtatctgattgagcaggttcgtgagtttggccgagacgttaccgtgctggctaccgggccgttgacggatgtggatgcggctattactcgggcaccggatattgcaccgaaactcaggctggtgatgatgggcggtacgcttacccaacccggcaattgttgggatgcggtggccgagacgaatatcatccaagaccctgaggccgcgaatcgtgtatttcattccggcgcagacatcacaatggtgggacttgatgtgactcaccagtgtttgctaccgcgatcggcggccgaccagtggcgtgcgacggggaccaagcgcgggcggttcttggctgatctcgcggacttttccatcaaggcaaatttggaagccgcccccgcactgttctctggcggcatgccgttgcatgatccgttggcggcggcggttgcacttgattcttcactggtcgattgttttgatcttgcgttgcgcgcggagaccaataccggtgatttcaatggagtacgaggccggaccaccggagacccggttgggctggtgaatcattccatgccgcatgtgcatgtggcacttggtgcggattcgggacgttttttggatgagtttacagagaggatggctgaggtgtgccggtaactcccctcagtccgctacacggacagctcgaccgcaattacggacaagctgccgctcgcattcttctggctcgactctcgtctcgccttcgcctacaaacagcccatcgggctgtttgttttacggctcagccccctcaattttgaggggcttaacaaggactatttcacacccccagcaatcaaggaccggcttcgccggactcatcattacctggtcatgtcctatcggcctcggccaggcggcgtgaacgaacagtccaccggactgttctttatttcacgccgccaaatcggcgatcgcggtggatgtaatggtcgatggagcgccatagcacgtcacggccgcagtccgggaagagttcgggcacgaagtcg

SEQ ID NO: 481 - DNA, 10957 bp, Unknown
  R48_24m  MAG No. k141_34169
cgccgaagtgcagcagtgggtcgatcgggccaacgagggagtctcccgcgccgaatccgtacgcaagttcatcatcctgcccgaggagttcacccaggagaacggtctgatgaccgcctccatgaaggtcatccgtcccaaggtcatcaagcgctactccaccctcctcaacacccagatgtacaccaagaagaagtaagcagagcttgagtacagcaaaagggagattccattggaatctccctttgttataaccggccgaaggccgattcctagaagccgaggcgttctagttgcttggggtcggactgccagcctttggcgaccttgacgtggaggtcgagcttggctttttggccgacgatgcggttgaccggggtgcgtagcttcttcttgacgtaggtgaggttcgaggcgcccttgccgatgatgatcggcttctgtgagtcacgctccacgtaaatggacacgttgacctgcgccttgccgtcatagccctgaccggtctcgttgtcttccggatagtcgatggaatcgaccaccacggccagcgaatgcggcagctcgtcgtccagggtctcaaggaacgcaccgcgcacgagttcggcgatggtgtcttccggacgctcctcgctgatctgatcgtccgggtacatctgcgggccctcgggcgtgtgctcaatgagcacgttcttcacttcagccagattgtcgtgcttcagggcgctcaccggcacgatgtccgagaaatcggcgaaatcgttgatttcgatgagcttgttgatgagttgctgacggccaagctcgtcgatcttggtgacgatggcaatcagcgggatgcgccacttgaacgtaccgtcctcacgcttggtggcgaagtcggtacgcagtcgggaaagaatacgcttgtcgccggggccgatttcctggtcggcgggcagcaggaaggccaccacgtccacatcggccaaggattcgtcgaccacgtcgttcagacgctggccaagcaacgtacgcgggcggtggataccgggcgtgtccacgagcacgagctgcgcgtggtcggcggtcaggatgccgcgaatcgccttacgggtggtttccgggcgagaggatgcgatggcgatctgcttgccgatcaacgcgttgatcaacgtggatttgccgacgttcgggcggcccaccacggccacgaatccggagcgatacggcacgtcctgcttggtcacattctccgtttcaccggtcgcgtcgacttcggcaacgccggcaacatcggaagcatcggtgacgtcaatgtcatcgacgtcgttcgtgctgttgttctggtcggtcatatcactccttgctggcggtatcatcgccttcgacgggctcgccgtcagtttcctcatgggtcctgctattttcctcgccgccctcgacgtgcgccggttcgacgacgatggtggacaccttcttgcggcgtccggcggagtccacggcggtcagtcgcagaccgcgcgtcacggccgaagcaccgacaatcggcacgcggcccagaatcttggtcagcaggccgtacacggtatcgacatcgtcctcatcaatgtcgatctcgaagatctcctccagatcggcaatcggcgtacgggcgggcatcttccacttgttgtcgccgattttctccggctcggtacgctgggtgcggtcgtgctcgtcttccagctcgccgacgatctgttcgatggcatcctcgatagtcaccatgccggcgatgccgccatactcatcgaccaccacggccacatgttggcgggaacgctgcatctcatggaacaggtcgtccaccggcttggattcgggaacaagcagcggctgccggacgatggattcgaccgtgcgttccatggccgccgggttgaaggcggtggcgcgcacggcgtccttcaaataggccacgccgatcaggtcatccacatcctcaccgatcaccggcacgcgggagaaaccggagcgggagaacagtttcagcgcggaagacagtgtggagtcgcgctccatgcagatcatatcggtgcgcggcaccatgatctcgcgagtcaacgtatcagacagggtgagcacgttgcgcaacatttcggagacttccggatcgaagtcgttggactccaccagccggtcgatggcggccttgccctgctcgagctgaatcttctcaagctcctcgtcgtcggacagatcggagtccttggagcgacggcccgaccccttggaaccggacttgtcgccaccgatgcgtgcgaacggcgtgagcttggtggccaacgacacgatgcacgagttggaaatcatgatgtcgaccggcttggtcatgccggcggtgcgcgggcggaccagtacggagaccacggctacgataatcgcgaacaggaatccggcgagcagttcaacccacagttccgcaccccacagggatgcgatggaagacaccagtacgccgtcgagcacattgcaggcgatgcggaagaacgcacagctgccggcggtggcgtaacggtcggcgatgagccgttgcacgcgatgaatcttgtcgatcttcttcatcttgaggaactggcttgcttcggagtcggtctgcacctcgaggatgagattgttgaggctggctcgcgttacgcgggccacggcgccttcagcggcggccatggtcagcgaaagccagacgaacagggtcgccacaagtacgagaatgacggtgacggcgatcagcgtggtactggaatactccataatgttttttcggtgtccttgaatgtccttgaacggtatagaataatccgaatttggtgtgattgatttggaagtttatttggaatcgaggtcgcggccagcaccgtgcgcggcgtcgtacagggccagcgcgtcgggtgtgccggcgggcagcgtggcctgcacgttggcatcgtggcgcagggcgaagaaggtgagcagcagctgtcgctgcaggccgaacatctggcgctcctgctcgggggtcacgtggtcgtagccgagcaggtgcaggatgccgtggatggtgagcaatagcatctcctgcatggtgctgtgcccggctgcggcagcctgttgggcagcgacccacgggcagatgacgatgtcgccgagcactccttccatcacggttttgccgtcgcctgggcgcagctcgtccatcgggaagctcatcacgtcggtcgggccttcgaggttcatccaacgcatgtgcagttcggcgatgggatcgggatccacgaacatgatggtcaggtcggactgggtgctcacgcgcatctggtcgagtacccaaatacccaaatcggagaagaccttggggtcgatgacccactgggtttcattggtgacgtcaacgctcatcgtctgtctcattttggttggttgaatccgtttgctggcgggcatcgaagtcggtatggttgcggcggcccttgtgttcgatgtcgcggtggtcgccggcgatggcggagtgacggtcgtaggcggccacgatctggccgaccagctggtgacgtaccacgtcctcggttttgagatgcacgaatgcgatgtcgtcgatgccgcccaggatgcgttcgatggtggccagtcccgagcgcggcacggtcaggtccacctgcgagatatcgccggtgatgaccatcgtggagttgaagcccagacgggtcaggaacatcttcatctgctgttcggtggtgttctgagcctcgtcgaggatcacgaacgcgtcgttcagcgtacgaccgcgcatgtaagcgagcggcgccacttcgatggagccgtcgtccatgtaccgcttgagctggtcggcgccgagcatgtcgccaagcgcgtcgtacagcgggcgcagatacgggtcaaccttgtcgttcagcgtgccgggcagaaagccgaggctttcgccggcctccacggccgggcgcgtaaggatgatgcggcgaatctgcttgtcctggaaggcacgcacagccttggccacggccagatacgtcttgccggtgcctgcgggaccaatgccgaaggtgatggtgtgcgattcgatggcgttcacgtaggccacttgtccggcggttttcgcacggaccggcacgccggcggcaaaggtgatgacgccgggaaccgtgggcttgcggtacgtcgggtcgtgggagccggcagaacgtgcatgggcgcgttcgtttgaggtcgattgcgccagtttgtcacgcaccgggccgtgacctggatgttcgaggcgcacgtggttcttgagcacgttctggtcgagcatgcgacgcacggtgtcggcgtccataggcgcggtgtaggcggcttggatgatggtgttgaccaaatcctcggcctgtgcggcctgggcttcggtctgcttggagcgggagacgatcgccacgcggttgccgcgcacgataatcgtcaggtccggaaaggcgcgctccacctcgcgaatgacctcgtcaaccgggccgagcacggcgacggggtcaagttggggcgggatggtgatggtacgtgtagtcgttgccacgaagcggatattcccctactactcgtcgagcttttcgccggtcatcacgtgcgcgtgcacgtggaagacggtctggccggcgtcgagaccggtgttgaacaccagtcggtaggcgccgtgaaattccttgtcggcgatgttctgcgcgatggagacgatgtgggccagctcggtcgggtcgtcggcggcaagttcggcgacgttggcgtagtgcttcttgggcaccacgagcacgtggaccttggccttggggttgatgtcgttgaatgcgtaggtcgtctcgtcctcgtagaccttgctgctgggaatctgccctgcgatgatcttgcagaacaggcaatcgtcggattcgctcatcatgctccttggtttgatgttgctacgcaccagcttagcgcgtgggcgttactcgtaacgtcccaacacccgagacaacagcgacaacgctacaggaccggccgtcgcggctctcagaatattgtgccccagtacgcagctcaccgctccggccttgacgaaatcagctacctcctgctcactgatgccgccctcaggcccgaccaccacactgacagtccgcggccggccgtcctggagcgtgcgttccaccaactgcgtaaccttctcctccacgccggaccacgtatcggtagcatcctgatgcagcacaatcaccacatcgccatgcacgcaggccctgcggcagatggccacgacctccttgctggacgcgcacgcctccagttgcggcttaaaagcgcgccgcgactgctcggtggcggcatccagtaccgaattccacttcttgtccgtacggccgaccttccacttggcaatggatcggtccgcctgccatggcaccacttggtcgacgccgatctgcgtagccatatcgatggcctgctcatcatggccggttttcgccaatgcctgaatcagcgccaaacgggtgagcggctcgggttcgcgccccacttccacaacttcagcaagtccggcttcaggatcggccatcactgcctggattctcaagccgttgccgtcggaaagttgcaggctgtcccccgccttgagtcgcatagcctgcacagcatggcgcttgatgtgcgcgggcagggttagcttccagccggcgtgaagttcgtcgctgttcaccgggacatcgtcgacctgcgggtcgaaaagaaaaagggcatcagtcatgacttcaaggctacacgcgacacgccgggcacacgcgcgaattgcatccctgtaatttcatgctaaactatttactcgttgtccaaacgacacctgcccgggtggcggaatggtagacgcgctagcttgaggtgctagtgcctattttatacgggcgtacgggttcaagtcccgtctcgggcacagataaaccccttgcattgcaaggggtttttcgttatatgcacacacgaaaggccaccaatgcagttcatcacgctggacaccgttgacgacccgcgcgtcgaagcgtatgtgagcctcaccgaaatgcagttgcgcaatcgcttggaaccagccaagggcgtgttcatcgccgagtcccccaaagtcatcgaccgcgcgctggccgctgaccgcgaaccgctgtcactgctggtcgaggaaccttggctggagggcatgaaagacactttcgacttcatcgacgggcgctggggcgcggatattcccgtctacgtggcctcacctgagcagctcaagcgtctgaccggctaccgtctgcatcgcggcgccctatgcgcgatgcgacgctggccgctgccctccgtagccgaggtctgcaggagcgcccgccgcgtggcagtaatggaaaacatcgtggaccacaccaatgtgggcgcactgatgcgttcggcggccgcgctcgatgtggatgccgtgctggtcacaccctcctgcggtgatccgctgtaccgacgagccgctcgtgtgtcgatgggcaccgtattccagattccgtggacccgtatcaccgggttcaacgacgacggtaccgaaaacaagcattactggccgttccagggcatcgacgagttgaagtcgctgggcttcaccaccgtggccatggcattggaggatcgttcgatttcgttggacgaactgacacgccgtctgcacgcgcctgacgaagatccgacgcatatcgacaagctcgcgctgatcttcggcaccgagggcgacggcctgtcccaccatacgattgcccgcgccgatttgaccgtgaagattccgatgagccacggcgtggatagtctgaacgtggcggcatccagcgcagtggcgttctacgcgacacgctaaggaatcgcacgcgctccgaaaaggccggatccttaaacaaatctacgaaactgttcatcgcaagttcacggcacgcgggggcgaaagccttgcatgttcgaatttttctgcaattattaactatgtaaaccgaatgcaaggaagcatccggcccagcagtgcggtgtcgaaagacgctcagtaacagagaggacagttacgatggccaagaatcccaagattctgtcgattgtgcttgcaggtggtgaggggacccgcctgatgccgttaacccgcgatcgcgcgaagcccgccgttcccttcggtggtgtgtatcgtctgatcgatttcccgttgagcaatctggtgaactccgggtaccgtcaggtcgtggtgctcacccagtacaagtctcactcgcttgaccgccacatctcccaggtctggcgtttctccccgctgcttggctcgtacgtctcccctgtgcccgcgcagcagcgtctcggcaagcactggtacctcggctccgccgacgccatctaccagaccatcaacatcatcgaggacgtccagccggacatcgtggtgatcgtgggcgccgatcacgtctaccgcatggacttcgagcagatggtacagcagcacatcgagtccggcgccgagttcaccgtggccggtatccgccagcccatcgaggaatcgaaccagttcggtgtaattgaggtcgatcccgatcacccgaacatgatcaggaacttccaggagaagccggccaccaccaccggtctgccggacaatccgaaccagattctggcttccatgggtaactacgttgccaacaccaaggccctgttcgaggctctggctctcgatgagaaggctgccgacaccaagcatgacatgggcggcgacatcgccccgtacttcgcttcccgcaacgaggccggcgtctacgacttcaactcgaacgagattccgggttccacggtcactgatcacgcttactggcgcgacgtcggtacgattaagcagttctacgatgcgcacatggatctgatcgcctatgtgcccgagttcaacctgtacaaccaggattggccgatttacacgatgtccggcaacctgccgccggccaagttcgtgcacgccggccgcgaccgtctgggccacgccaccgattcgatcgtctcccccggtgtgatcgtctccggcggtgaagtgcaccactccgtgctctcccccaatgtgcgtatccactcgtgggcacagatcgtcgattccgtgctgttcgacggtgtgatcatcaaccgccgcgcccgcgtgtacaaggcgattctcgacaagaacgtggtcctgaccgaaaactccactgtcggcatcgataccgagcacgatctggcccgtggcttcaccgtcacgccggacggcattacggttgtcccgaagaacaccatcgtcgatgactgattgaccagtccagacttggaaaagccccgcatcatgcggggcttttctcgtatagagctccctcatcagagggagcttactaagcgctatcagtactttggcatgttgtcgaagttgaagccaagggcggcgagctggtcgcggccttcgggcgtgatgcgctccatggtccagcgcgggtcccacgtccagtcgatgcggaactcctcgaccagaccggccagcgtggatgcgcattcgtcctcgataaggtcggtcagcgggcaggccggcgtggtcagcgtcatcgtaataatggcgcggcctagctcatcgatctcaatgccgtagaccagacccaaatcgatcacgtcgatgccaagctccggatcaatcacctgatgcagtgcctcgcgcacgtcttcggcagtggcgcggccgatatcgtcaatcgccttgatcggaatctcgctgccatcggactgttcgtcatcccggcaaccgcatttgccatggtgaccgccacacgcacaggtgtcatcgccggacgcagcagagtgctcgatcgggcgtccgttcgggaagcccttggccaaggccgggttggccatcacgcggcgagcggcctcctcgtcctgcaggacgccgttgacggcatcgaaaacggacggctgtggttcgggaaccaaattatcgttggacatatttcctcagttctttgcagcgagggctttggcgatggagtccttcagcccttcccagcctagcagagcgcatttgatgcgcatagggtatttcgacacgccttggaataccacggcgtcgccgagcttttcttccaggttctcgtcgtccagaccggcaccgcgcgattccatcagtttgtggaatgtctgttccagatccatggcctcgtccacggttttgccgtccaccagatcgaccatcaccgacaggctggcctgcgaaatggagcagccgtggccgtcccacaccaatcgcttgatggtgtgcggttcgtcatcggagacttcgacatggatggtcgcctcgtcgccgcaggtcgggttgaactggtgcgattcaccgggcgtgcagtattcgtggctggcttgcacggtgacattggccgccgcgtccgcggactgttcgaccgccgcgttgggcgcaaaggattccttgccatgcggatgttttgacgcctcgaggatgacctcttggtacatctgttcgaggtcatccccgctcataccgaattcgttcatggtgttctgttttactccactccaaagaacttacggatgcccttggccgcttcgaccaatgcttgggcatcttcgaccgaattgtagacaccggaggaggcacggttggatgcgtataggccgaagtggcggtgcaccggctgggcgcagtggtgtcccacgcgaatcgcgatgccctgggcgtcgatgaactggcccacatcgtgcgggtgcacgccggccacgtcgaacgccacggtaccgatgcggtccacgttttcgcgcggtccgaggatgcgaatgccatcgatgtcgccgagcttcagcagttcggcggcgatggtcttctcatgggcctcgatgttctcgagcccgatgttcatcatccattcggcggcgacgcctgcggccaccacttgggcgaccggctgggtgccggcctcgaagcgggccggaggggccatgtattgggcctcgtggtccatgtaggcgagttcgaccatggagccgccgaagttggccggcggcagggcttcgagcagttcgcgcttaccgtacaggaaaccgacgccggtaggaccgtacatcttgtgcgcgctccaggcagcgaagtccacatcaagcgcatggaaatcgactttgaggtgcggtacggactggcaagcgtccaagatgaagatcgaacctacttcatgcgcacgcttgatgataggggcgatgttggtgatggcacccgtggtgttgcccacgtgggtgacggccacgaccttggtgcgttcggtgatgacttcgtcgaggttgtccgtacgcacacggccgtcctcggtcaggtcgatccacttgaaggtggcaccggtacggtaggccagctcctggaatggcagcagcactgaatgatgttccgcacgcgagacgacgatctcatcgcccggcttcagggcaaaacgcttggcggcttctcccccacggcccagcgacgcattgccgaatgcggtggcgagcaggttcagtccggccgtggcaccaccggtgacgacgatctcttcttcgccttccgctgcattcgcgccgaccagcttggcgaccttggcacgggcctcttcgaaagccatggtactacgggccgccagctcgtgggcaccgcggtgcacgccggcgttgatcgtacggtagaagttcgcctcggcgtcgatcaccgcattcggcttctgcgaggtggccgcagaatccaggtacacgagcgggtgcccgtgaatctcctgattcagaatcgggaactcgccccgaatctccttaaaatcaaccattatgttcccctacttacgtaacaattgtacgaaacgagtgggagtctgacatggcctgttcgcgaccgtaaagacttggcctgagtggcccggag

SEQ ID NO: 482 - DNA, 2965 bp, Unknown
  R48_24m  MAG No. k141_34234
ctggtttgagcggttgaggtagaaatcgaagcgggtggagccgtctggggatcggcggatggtgtgcaggatgcggggatctgtggtgggataggttggagtttgaccaccctcagtcggctgcgccgacagctcccgccagcgggagccaagtgctttgagcagctgggcaatgtcgtgacggttgaggtcgcagcccacgtagatggcggtaccgttgccatagggacggctggtgatggcgggggtgcgctccagctcccagtcggcggcggactcacctgtgtaagaggcgagcactgtagcgtccgcggctacggaagtcacgtcattctgccacaggtgggtcgtcagaccgttggacaggctgatttcgctgggctcgccttcggcttcttcaccgaggatgttgaattcttcgctgcggatgccgagcatgtcgcgtaggaggccattgccggcacctgggtatccgccgagcccgatgtggaagtactcgtcgatcaggccagtggcgtagccgacgatgacggttccgccggccttcgcgaagtcggcgatacggcgaacgtcttcgtcggacaggctgagcacggtgggcagcacgatggttttgtagccggcccagtcgtaggcgagcggcaccacgtccgcgcgcagcccggcatccaggaagccgcggtaccagtcgcgaacgtcgtgccagtggttgagtttcatgctgggcagggtttcggagcgtgcggcccattcggattccgcgctgaacaggatcgccgtgccggcacgctcgagctcagtgccctgcagcccggcgtcggagagggtcttcagcgccttaccgagctcgcatacgccgcggaagaccttggaatcggcgcccgcgtggggcagcatggcggagtggaacgcctcggcgcccgacttggattgccgccattggaaaaagcagatggcgtcggcgcccatggccacgtgggccagggagtcgcgcatgagttcgccggcccgtttgcgtgtgttcagcggcttccactgcacggctgaggtggagtgctccatcacgtaccacggcttgcccagcgcgagggagtccatgagcgcgtccgagcaggcgagttcgtccaggtgggattcgccctcatggaagtagtgatcgttggacacgaagtccacctcatccgcccatttggcgtagttcatgacgcactggtcggtggagaccatgaagttcgtggtgaacggcttgtcggggcagatctgctcgatggcgtcgcgttcggctttgtagaagtcgagcagcatgtcgttgccgaaccgctcgtaatccaactgctgcgacgggttgaccatggcgtcgccgcccatgtgacgtggcagcagcacctcgtcgaaactgttcacgtgctgcgaccagaaggccgtgccccacgcctcgttcaacgcgtcgatggtaccgtacttggcctcgcaccacgtgcggaacgcggccaaggcgttgtcggagtagtcgtagcggttgttccagccgtattcgttgcccatgtgccaggcggtcacatacgggttgtccttgtagtgttcggcaagtttgcggcacaggcgcagcgcgtattccttgaacaccgggcttgtgggctgccacgactggcgtgagcccgcgttgacgatatgaccataccggtctaccggcagcacctctggatgggattcgtacagccacagcggcgcggtggcggtggcggaggccaagtccacggcgatgccggctttgccgagcctgtcgatcacatggtcgagccactcgaacgtgaacgcgccctcgaccggctcgatcttgtcccagctgaaaattgccagcgacacgacgttcacgccggcctcacccatgagacggatatcctcgtccagcgtctcctcgggccactggtccgggttgtagtcgccgccgaacgcgatgccgcggccggattccgtcagcagggacggccacctaaatgctctatgagtagtcatattaatcaaatcctttattgtatcggctcatggccggtgctgtgtttgccggttttgggctttggctcccctcagtctcactgcgttcgacagcgtcatcggcgctttgatcaaggcgtgaatgctgcgttgcgttactgcattgccatgttgccatgttaccgcgttattgcatcgctacgttgccacgttgccacatcacattgcattgccgcattgctgcgttgccgcatcacatatcgcaacacaaacgcagcaacgcaatgacgaccggagatggcatcgccgccacccgcgaggaaccgcaatgcaacgcggtaacgtaacgcaatgcgatgcgattcccgcgtagttacaggcagttacagattgagtaccgcatcagcaatgcgcatggcggattcgcggtgggagaccagcaccacagccgcgccgcgctccttgtctgcatgctgctcacccacggccatagcgtgaatggaacgtagaataatagcctcgttcaaagcatccaaacggctggtcggctcgtcgaaaagcaccagatcagcattgcgcaggaacacacgagccaaaccgatacgctggcgttcaccttcggatagacggtcgcccaactcgcctacctgagtatcaaggccatcgggcagggaatcaatgagatcaagcacggaggccttggcgagagcctgacgcaaacgagcatcgagaccgtcagctgctgccacctgaacggcatcgccctctgccgattgcgccgccaactgctgctgtcgggaatcaacggtcttggcacccacttccccattgcctgcaacatttgcagcttcaacctcggactcaggcaaagcaatcagcagattgtctcggatagagccatcaaacaggtgggtttcctggctcatcatggcctgaatacgtcggcgagcatgcacatcgacctcgggca

SEQ ID NO: 483 - DNA, 14843 bp, Unknown
  R48_24m  MAG No. k141_34692
acgctatcgacaccgactacacccactcaatcggcattcaaaaaggccaaatctaacccccgcgacacgccgagccagacacacattttgacccttaacccgccgaacatgatggagaagatcggcagatcacggccgcgcgacttataggcgctttcgaattcgtcctgatgatcggagttggagcggccgtcggtcatgagcacgatggcggtggtgtattgcgaggcttccgactcgctgggcagctcgtcgagcgcgctcagcaggccttcatagatatcggtgccgccgctggcatcggtggcatcggcctcatgcagcaggtcgctggtgcttgtgccagtggccttgaccgggcggtgggcctcggtttcaaacgggatgagaatgttcacgtcgccgctggcgggctcgatgtacgacttcttggcctggtccgggtcgagcgccgcgttcaggcctttgaccacgccgttcttgccctctccagacatcgaaccggagtaatcgaccacccaaatggtccagctgggtttcctgagcgcggtctggtagacgttgagcgcgctgtcgatcaccgtggcggaggtcatggagaacgtgagtttgccgtcgctgaccgcggcgaggatgtccgcggtggagacgggcttggtggcgccggtgtcgtcagcccagccgagtttgacggccttggatttggcgatgccgaacacgatcggcgtggtggaggtgctggccgcgtctttgacgatgtgcttggtgtctcccatcgaaatccacatcgaggaggcaggccagacggcgtcgtgatcctggccgccggccttgagcgcgttcataatctccagcgaacccatgtagtgcatcgtcacggctacgttggattggtcggccgctttctggatggcgacggcgacttccttgttttcggagccggaggcaatgctcagggtggcagtcggtttgccgccggacggctggaaggtctgcgtggtggcggacgtgccgttgccgtccgctgtgccgtcatcggaattattgaacgccgtgcaaccggtcaacgcgagcacgccggcacataccgcggccgcaaccgcggcggcggagagaagacattatgcccataattccatggctctcccgccatctaaagcgggccgggccacaaggtgaccgcacggtgaacaatgggtgaagagctacatcagtacgcggcgcaggcaatcatggggtcgtcgtagaagccgaggatcttttcgaggtagggcttgtaagtgctgttgggcatggagaagatttcgtggcgcgattcggggaagcgcacgatgttcgcctcgccgccgccgtccttgaccagttggacgaagtgattctgcggcttattgagtacccagatgtcgcgtccggactggaagagcagcaccggcgtctccacttcggcgcaggcggacggattcagtatggcccggttgagcttcaacgcctggcgcacccattcgaacgccgcgcagtaggtctggtattcgctattctcgcaacgcagcttgaagtaccagcgttcacgcgcctcggaagcgccctcgttgccttccatcgagaactccggcgtgaagtccgactgcccgaacacacgcttcttgccgaagccgagtccgcacagcgcgccgaccagcacacgggccacgcccagcggcatgccggtggcgggggcgatcatcggggcggagagcaccgctttgtcgaacagggtggggtatcgctccaacacggccgcgccaatgccgccgcccatcgaatggcagaacaggttcagcggcatgccggctgcgtactgctggccgatggtttcggcgaagccggccagatcggccacgtagcgctgccagtcatcaatccacaccatgcaatgatcgtccacgtcgcgcgcggacttgccgtggccgcgatgttcgagcacgcacaccgaatagccggcgagcaggaagtaccagaccagttcgtcgtacttctcggcgaactcggtgaagccgtggctgatgacgatggccccgcggaagacggcggtggcgccttgttcgcggatcgcgtcgaatttggcggagtcgtagcacaggtagtgcagctggcccgcgcggccgccggtgtccataatgccggacagcggctcgaccccggccgaacgttcggcggcggacggatcgaaccagccctcctcgcggcattgctcgagcgcgggcagcaccacgtcggccatcgtttcggcgtacttgttctcgtcgatcatcgtcacctgcatggttcccatcttaggacaagcctcacgccgctgaccgcacaggcgcgtaggttgtgaggtatgagcgaaaccaatgatgtcaatgacgcaatcaagcatttcccacgcctcagggcgcgcacgctgcgcttcggctgcggcgcgccgcgctccgcacagaccgtgggcgacggctcgcgggccctgttcctgcgctccgacggccccgaggatctggtgaccgcactgtggctaagctggttcgacgagtccggcgaacaccatgagaccaagctggccgatccgcgcgaactgcttggcgcaaccgccgacagcgaggacgtgccggccgaggagaaggcccgccgcgagcgtgcgcgcgaaggcggcaccggcatcgtcggctattcgtcagatgacgacggcaatcgcatcgtgttcaccatcaacggccgcctgttcctgaccgagatcgcctggaatgacgagaccggcgcacccgagccgcacacccgcgaactggccggcgaatggctcgatgaggacccggagatgtacacgccggtgctgaacccgcgcatcgccccggatggcgagcatgtgctgtacaccacgggcagctacctgatgctggtcgatatcggcggcgagctgggtgaccgcatcaccgcggtctacggcgtgagcgtggaggatgaggacggcaatccggccgaaaacacgtggaaaatcggtctggccgagttcgtggccggcgaggagatggaccgttacgacggtttctggtgggccccggattcgcagcatgtgctgttcgaatccttcgacaccgccgacgagccgacctggtacatcagcgatccggccgatcccgagaagccggccgccggccgccgctacccgcgcgcgctgacccgcaacgccgacgtgtacctgaccgtgatcacgctggcgttcgatgagaacgaccggtacgcgggcatcaccggcaacgccgatgtggattgggatcgcgaggcgtacgagtatgtggccgccgtgagctggcgtcgcggccacgatccgctggtgctggtgcagaaccgccgccagacccgcgaccaggtgctcgaggtggcggtcgcggcggatggggccgcgctgggcgccacgcgtgtgcttgaggagcacgcgaacgagcagtggatcgacttggttcacggcacgcccgcctacacgccggatgatcgtctggtgtgctcgctcaacgatatggccacggataccaaccgtctgacggtggacggccgaccgttcacgccggctggctggaacgtgcgcacggtgctcgacgtgaccgacgaggatgtgctggccgtggtgcagcgtgcgcccgaaatcgcgaccgaggtgccgcgcgcctgggccggctcgggtgccgcttcggatgccgagtctctgttcggcggccatgacgcccgcagcttcgatgtggtgagcatgggatatgacggctcggtcgcgccgatcacgaccgagcccggtcagtggacggcctcacgcggcgcacgcggcatggtggtgtctgggcgcgatatgcgttccgcccgcgcccggatgcggcacatcgtcacgcgacgcgccgtcggcggcgtcaccgatgccgtcatcgccgccaacaccagcgatgccgccaacaccaccgacatcaccgccgccgacatcaccagcaccgccgcggaacccgggttcacgccgaacgtcacgttcacgcggctgggcgagcaccggttgtacacggcgatcatcgcgccgagcccgtccagcccgtacgcccatgccgacaaactgccggtgctgatgaagccgtacggcgggcccggcttccagcaggtcgtcgcctcccagtccttctactgggagggccagtggtgggccgaccagggcttcctggtggtcacggcggacggccgtggcaccacaggccgcggcccggcctgggatcgcgcaatcttcgagaacatgaagggcgtgacgctggccgatcagatcgaagccgtcaacgcccttcccgaggccgtctccaggctcaacgccgatgggcgcaggcccggcgttcccgcaccggacctcgacaaggtgtgtatgatcggctggtcgtacggcggcttcctgtccgcactggccgtgctggacgcgccgaacgtgttcaaggccgcgtgcgccggcgccccgcccaccgactggacgctgtacgacacgcattacaccgagcgctatctgggcctcgacccggatgtctactaccgcaacggcatcgtgcaggacgcaccgaaactcgagcgcccgcttatgctgatccacggtttcgccgacgacaacgtcaccatcgcccatagcctgcgcctctcgcaagccctgatggcggcgggtcgcccgcacaccttcctgccgttgacgggcatcacccatatgaccaacgacgagaccgtagccgaaaacctgctcaccctccagcgcgacttcctgcgcgacgccctggcctgaccggccccgggcgcgccgtgggccgtgacgtccgcggcacgcccggggcccgcgcccacacggcatgcggaaaaacggcgcaggtggtgcgtcgcacccatttccgccctgaatttttggatatttttggatattttgcacccatcgtcatgtgaaagaccggttttttgcctcatattcccatcaccgcgtaggatgggtgaggattagaaagggaggactatgagcgttctcgaccgttttgaaaaaagcgtggagggtgcagtcaacggagtattcgccaagtttggctccaaagacctgcagcctgtcgatctttccagcgccttggagcgcgagattgacgccgaggccatgcccgtgggccgtgaccgcacggtggccccgaatgaataccgtttcaagctcagtactcctgacttcgaccgtatcgaggcatggggtagcgagaccctggccaacgaactggccgataacctcaccgagtacgcgaagagccagcattacgccttcgtgggcccggtgatcgtgatcttcgaggaagaccttgacctgtccaagggcaacttcaacctcacctccgaatccgtgcagggcaatgccgtgccggtcaccaccgatgcgcagaccgaggacagcccggtgctcgaggtgaacggcaaccagtacctgctcaccaaagacaagacggtaatcggccgcggttccggctgcgatatcgtcatcgacgatccgggcatctcccgcaagcacctggaaatcgacatcacggataacggcgtgatcgcccgcgacctgggttcgaccaacggcacgtacgtggagggccaccaagtgcccgccgccacgctgctcgatggcaacaccatcaccatcggccgcacccgcatcctgtactgggcctccgcccaagcccaggagtagtcgagcacacgcccgaaagccgcccacccatgaccgaactgacattcgccctgctcaagtatggattcctgatcctgctgtggatattcatctggctggccgtgcgttcgctgcgcaaggacatcgagacgttcagtccgcgaccttcgcgcgcacgccgccgccgtgagcgtgaagtgcataaggccaaggccgaaacgccacaggcagctgcgccgcgcccgcatcgccggcccagcgcttccgcgtcgtccgtcgcctcggcgcagcctaccctgttggtcatcatcgatggtccgcttgccggcagctccgtgccgctggccgaagccgacatcgcgcttggccgcgccgcctcgaacaccgtggtgctcgatgacgaattcgtgtcttcccaccatgcccgcgtctaccgtgacacgcgctccgggcagtgggccattgaagacctgaactccaccaatggcaccgtggtcaaccagcagcgcatcaaccgccccaccatcctgcccgctcgtattcctgtgcgcatcggtgccaccaccttcgaactgaggtagccgcatgccaaaatccgccgcttcacaaccgctgttcctgtattccaccacggtgtccgatgtgggcactgtgcgcgcgaacaatcaggattcctccttcgccggcgagcatctcatcgccatgtgcgacggcatgggcggtcacgccggcggcgatacggcatcctccatcgccatccggtcactggcccacatcgagcaggacgacaccggcggcaacgtcgagacgatctcccgcatgatggaaacctccgttatggccgcgcatgacgccatcgtcggcaaggccaagcgcgaacgcaagcttgccggcatgggcaccaccgttaccgcagtggcattggtggccggctactgggtcatcgcccatatcggcgattcgcgcgcctacctgctgcgcgacggacgcctgagccgcatcacgtgcgaccacagctacgtgcagcacctcatcaacaccggtcgtatcaccccgtccgaagccaagaaccacccgcagcgcaacgtcgtgatgcgcgtgcttggcgactttgacattgacccgcgcccggatatttcggttcgccgagcccaccccgccgaccgttggctgctgtgctcggacggcctgtgcggtgtgctggaagattccaccatcgaagagacgatgaccacgctgtccgatcagggcgaatgcgcgcagcgtctggtgcagatggcactgcgggcaggcagcaccgataatgtcacggccgttattgcggatgccacgttggcgttggatgccgatgcgttcgacctgccgcaccaaacgccgttggtcggcggtgccgccagccgtaatcttgagccgattgccgacatcgtcaacgagccggtggctaccgcgcccgcactgcgtgaggatgattcccccgcccagcgcgccgcagcattgattcagcccgccagcgcgcacgagacggaggccgcgcaaaccacggccgaaccgtcgtccacacgcgtggtgcagccgtccaccgtccgcgaggagaccggtgaacgagccaatcccgataccggtgagattccggtggtgcaaaagccggatgggcgcctgtccgccgaccccaacgacccggatgtggccaaagccatccgcgatgagcaggtcgagcagaagaaggccacgcgcaccaagaagcgccgcaataagcttgcggtgattattacctgcattcttgccgtgctggcattggccggcgctggctggggcgcgtacacgtggagccagacgcactactacgtgggagatagcaacggcaccgtggccatttatcgtggcgtgccgaccaatctctttggacttgagctttcgcacgaagtgcagaccaccaatatcgccaccgcggacctgcctcagacatggcgtgaccagctgagccaaggcatcacagtcggttcgttggacgaagcgcagtcgcatgtgggtattatccgcaccgaaatgcgcaaactggccaagcagcaggaagccgacgccgccaagaaggccgaggcgtccaattccccggacagttccaaagacagctcccagagcgattccaaggacagcaccgaggattcgtccagccagtccggctcctcgtcagacaagtccggttcgtcaagctcatccgattcctcggataaatccggtatcggagcggccgacaacgcggccacgggagattctcaatgatcgttacccgtctacgtcagatttctttgttgctgattgccatggcaatcagtgcgttggcgttcatccagatgttccagcgcaccgccggcgaattccctatgcaatacgccggcatgctggcattggccgtagtgctgtttctggtgctgtgggggctgattgtgcgcttccagccgtacgccagccagtcgattctgccttgcgtgctactgctgaccgccaccggcgtgaccatgatcgctcgcatcgaccagagcgaaggttgggcggttgcccaacgtcagctgatctggctgtgcatcgccatcgtgctttccgcgctgctcatcatcttcctgaaggactaccgcgtgctgcggcgcttctcctacgtgtcgatggtggtgggcttggtgctgctgctcgccccgatgctgccgtttgtcggtcaggaagtgaacggcgcgcgcatttggatcaggattccgggactgggccagttccagccgggcgagttcgccaagctgttccttgcgttcttcttcgccgcctacctgttcgaccatcgcgaccagctggccgtgggcggtaagaagatgctcggtctgcagctgccgcgtatcaaggatctcggcccgatcatcgtggtgtggatcgcctcgatgggcgtgctcatcatgcagcatgatctgggcacctcgcttatgttcttcgccatgttcgtggccatgctgtacacggccaccggccgtaaaagctggatcatcatcggtctgatcgcgttcgccgcgggtgccgtgctggccgcaggcatgttcagccacgtgggtcagcgagtcgatgcctggctgcacccgttcagcaacgagcaatacaacaagacccccggcggctcctggcagctggtcaccggcattttcggcctggcatcaggcggcatgctcggcaccggtctcggccaaggccatccttcgctcgttacgtttgcgaactccgatttcatctacgcctctctgggcgaggaactcggtctgatgggcgtcctggccattttgatgctctacctgctcatcattgcctccggctttatcaccgccatgaaaatcaaggatggcttcggcaagctgctcgcttccggactggtgttcaccatggccttccaggtgttcaccgtggtcggcggcatcacgctggtgattcctctgaccggtctgaccctgccctatatggcggccggcggctccagtctgatcgccaactatattctcgcgaccctgctcatcatcatctcgaactcggccaatgcgcccgagccggagctgacctcggatacgttccagtacgaggctttggccgtgctgcgcaacaaggaacttgaggcccgagcccgcgccactgagccgatcgttcagcctcgcagcgcgtcggctacggcgtcgcagtccgaggcggaatcgtttgacgaccccattgtggatgccaccactccggcgtatgccggcgccgatgaaccgtacacgcctaccggtacgattcccccgcttcctcccgttaacggaggcactcgcgtatgaacaaatatcttcgtcagcttttcaccgccgtggtcgcgctgttcgtgattctcggcctgtcgtccaccatcatcatggcggtacgggccaacgcgctgaacaacgatccgcgcaacgcccgttcgctgtaccaccagctcggtgcctaccgcggtgccattctggcctcggacggcacggtcatggccaaatccgaaccggtcaacgacgcgttcaaatacctgcgcacctattccaacggtccgctgtatgctccggtcaccggcttcttctccatcaaccagaccgccgatcgcggcctggaagcctcccgcagcatgctgctcaacggtgaggccgattcattgatctggcagcgggccaaggccatgctcaccggcactacgaatcagggcgcgtccatcgaaacctccatcgaccccaagctgcagcaggttgcctacgatcagctcggtacgcgcgatggtgcggcggtggccatcgaagtcaacaccggccgtatcctcgccatggtgagcacgcccagctacgatccgaacaaactggcgacccatgacgccaaagccgcgtctcagtcctacaacgaactctctgcgggccaaaatcaaaatagcccgctaatcaaccgcgccacctcgcagctgtacccgccagggtccacgttcaagaccatcgtcgcctcggctgcgctggaaaccggcgattatcagacggacacgaagattcctgcaggctccagctataccttgccgggaaccgccacacagctgccgaacgacgaggcacagggcgatggcgtcaacggacagatctccctgcaagaggccgtcgcatggtcgtccaacaccgctttcgcccagcttggcgtgaaactcggcgcgagcaaggtttcggacatggccaccaagctcgggttcggcagcaccatcaccattgacggcaccgaatccacgggcaccccgatgacggccaccgcgtccacattcccctctgatccgaccgacgacaagcttgcgctggcatccatcggccaaggcgacaccacggccacgccgttgcagatggcgatggtcgcgcaggcaatcgccaacaatggcaaactgatgcagcccacgctggtcgatcgtgtgcgcgccgccgatctcaccgtactttcgcagaccaaaccgcaaaccatggccaacgcgttcagcaaggattccgcagacaagctcaccacgatgatggagagcgtggtgaccgaggccaatccgcagctggccatcgacggcatcaaggtggcggccaaaaccggtaccgcacaaatcggtatcgacaactctgccatcgacggctgggcgatcggtttcgcgccggcggacaatccgcaaatcgccgtcgcggtgttggtgcataacacagatgtacacggttcgctcgccgctggcccgatcatgcgcgcgatgatgcaggaggctttgcaacagtgaaacttatcgaaggacagcttattcaccgccgatatcgtcttgattcgcgtcttgcgcaaggcggtatgggcgaggtctggaaaggctacgatattcagctcggccgtgaagtggccatcaaggcgctgcgctcggacgtgaccaacgccgaggccaagttgcgccgcctgcgtgccgaagcccataattccgccaatctggcgcacccgaacatcgctgcgttgttcgaatactacgagcatgacggcatcggctttctgattatggaatacgtcccctcgaaatcgttggcggatctgttccatagcaagggcgcgatggatcccatcgaactgctgcccattctgattcagaccgcgcgaggcctattcgtggcccactcgcacggcgtgattcatcgtgacgtcaagccggccaacatcatggtttccgacaccggcgaagtgaagatcaccgatttcggcgtgagctactccaccggccaaggccagatcacccaggacggcatggtggtgggcaccgcacaatacatctcccccgagcaggcgcagggccagcaggccacgccgcaatcggacatctattcactgggcgtagtggcgtacgagggccttgccgggcatcgtccgttcaccggcaccactccggtcgatatcgccgcagcgcacgtgaacaatcccgtgcctccgctgccgaactcggtggacgtccagttacgcgaatttgtcatgtcgatgctggccaaggacccgttggatcgcccgaaagacgcgctggtggtgtcccgtacgctggcacgcatcgaacgccgtctgctggatcagcagaccgaaatggccgacaccaccatggccacgtccggcaatcgactgccgcgccgagtgaccagcacgccacgcattgttttggaggccccggcctcaagattgggagggaataagcaatgagcaccagtatgcccaccgcattggccggcggacgctaccagcttggccagctcatcggtcgtggcggcatggccgaggtccacgtggctcttgacacccgtctgggccgtaccgtggccgtgaaaatcatgcgcgccgatctggccaacgacgacatcttcctggcccgtttccgccgcgaagcacacgccgtggcccagatgaacaacccgaacatcgtgaacatctacgattcgggcgaagaactggtttcttccgaaagcggcgataccgagcgtttgccgtacatcgtcatggaatacgtcaagggccagaccctgcgcgacatcatcaaggtcaacggcgcactcagccagcgcgactgcgaacaggtgatgttgggcgtgcttaacgcgctcgactattcgcatcgcatgggcattatccaccgcgatatcaagcccggcaacatcatgatttccgagcagggcgcggtcaaggtcatggacttcggcatcgcccgcgctctggacgattccgcaaccaccatgacccagtcgcagggcgtggtgggcaccgcacagtacctttctcccgagcaggcgcgcggcgagaccgtcgacatgcgttccgacctgtattccgccggctgcgtgctctacgagatgcttaccgggcgcccgccgtttaccggcgattccgctgtggccatcgcctaccagcatgtctccgaagtcgccacgccgccatccgccgtggtgccggggctgccgaagatgtgggattcaatctgcgccaaggccatggccaaggaccgccagaaccgctacgccacggcctccgaattcaagaccgacatcctgacctacatgaacggcggcgtgccggtggcggccgcgttcaacccattgacggacctgtcgaatatgaaggcccgcaaggaagccgaacgtgatttgcccaccacgccggtggaaccgcagcagcagcccacccaggcattcaacccggtgaccggtcagttcgagcagattccaccggccaatggtgccaactcagcggcgttgcagtcccgtgcgcagcagcgtgcggcggcggccaaggccaagaagcgcaagaagatcatcatcggttcggcgatcgcggcgattgtcgcggtgctcgtcattgtgggcatcatgttcgccatgaacggctccggcaacaagtcctctgaagacaccgtcaccatccctgaagtgtgcaacgcttccacgtccaaggacaacatcaagctcaagcttgagagattgggcttgaagatgaccgaaaagcaagacaccgactccaccgagccggaaggcacctgcaccaagatgagcccggacgccggctccaaggtggccaggggatctgccgtgaaggtgtggttctccgcaggcccgcagtccactcaggttccggatgtcaaggagcgcagccaggaagaggcgcgcagcattctggaaagcgccgggttcaaggtgaacgccaccgtcaaaaccgaagacagcgccgacatcgccaaggatatggtgacgagaaccgatcctgccgccggtcagtcggttcccaagggcaccaccatcaccatatatgtttcttccggcatgaccaccgtaccgagcaatttggtcggtcagtcgaaggacagcgtgctacagcagtatgagggcaagttcagcttcaccgtggagcaggaaagctccgatacggtggaggccggtctgattacccgcgtaagccccgattcgggctcttccatcgcgcagggcgggtccatcaccatctgggtgtccacgggcaaggaaaaggtcgctgtaccgaatatcaccgctggcactgactacgccaccgccgaactcatgctcaaggccgtgggcctcaaggctcaggccagtggcccaaccgacagcaccgctgtggtagtcagcatcaatcctggcgctggcagccaagtagatgcgggatcgaccgtcaccattaccacgaaggccggcagcaccggaggcgacaccggtaccggagacggtggcaacggcaacggtgccaacaacggcaacggggggcggaacccgtgagtgagtgagcgccgggcgtgtgtgttgcgcatacgcaacgcacatagcgcaacacatgcgcaacacatgcgcaacgtaaacacgcaacgcaatcacacaacgcaaaggggaggggcttctgcacccctcccctttgctgtataaagagctatcccagcgcaacattccagggaaagcgtcgccgcgcgcggaaaagctacttcgtaaccttgggctgaaggccggcggacttggccacggcgttgtcttggccgcagaccttaagccagttggccagcagacggtagccgtcctgggtcatcacggattcgggatggaattgcacggcgtacatcggcttgcccttgaccttgatgccctgaataatgtggtcgccctgcgtccacgcggtaaccaccagcgtatccggcaccgaatcgggctcgacggccaacgaatggtagcgggtggcggtcatggggttggccacgccctcgaaaatctcgtcatcgatatgttccaccaagctggtcttgccatgcatgatggtgggcgcatggtccacagtgcagccgtacacctcagcgagcgcctgcaagcccaggcacacaccaaacatcggcacgccgctggccgcgcacaggcgaatcatatcctcactggcaccggattcggccggagcaccagggccgggagaaatcagcacgccatcgtaaccgtccagtacacccggcgcggctgggtcgatagcgtcgttacgcaccacatcaacagtggcgccaagggtttgcagatagcctacgatcgtgtagacgaaggaatcg

SEQ ID NO: 484 - DNA, 2771 bp, Unknown
  R48_24m  MAG No. k141_34911
aacctatcatcccatcgccaatcacgttcggtaattttttaccgaacaactcgatttcaagccattccacgaactatggcccccgcctagccgtacttgacgctaaggtggaaccatcacatgccgcgatgcacatgcaacgcaaacgcaacgatatgtaaggagcaactatgagcgaagagcgtaccgcatggggatggggtctggccagcgtagacgccgccggcaccaccctagacgtctggtaccccgaactgaatctcggtgaggcaccggtcgaggccgatcgtccaaaccacaatttcggcactctggctcacgatgaagccgacgcccgtggcatccgccgcgtgccggtattcgtcgtcagccagttggacgagccgatcagcaacgccgcggacgcttacctgaaactccatctgatgagcatgcgcatggccaagccgaacacgctgaaccttgacggcatcttcgcccaactcgccaatgtggtgtggaccaactacggccccttcgccgttgaagacttcacgctgcgcaaggccgacgtcgaacgcgcctccaccgaagccgctctcgctttcgcctcccaggccggactgcctgccgcagctcctgccaccaccgtcaacgtgttcggtgtggataaattcccgcgcatgatcgattacgtagtgcccaccggcgtgcgtatcggcgacgccgaccgtgtgcgcctcggtgcttacctatcttccggcaccaccgtgatgcacgccggattcgtgaacttcaatgccggcacgctcggcgtctccatggtcgaaggccgcgtttcgcaaggtgtggtcgtgggcgacggttccgatatcggcggcggtgcctccatcatgggcaccctctccggcggcggcaagctgcgcaactccatcggcgagcactcgctgctcggcgccaacgccggtatcggcatctccctcggcgataactgcaccgtcgaagccggtctgtacatcaccgccggcaccaagatcagcatctgggacaaggccaaggccgcagccggcgagccgctcgaagtcgtcaagggtgctgagctctccggcaaagacaacatcctgttcatccgcaactcggtgaatggacgtatcgaagcccgctaccgcaaggtgggaattgagctcaacgccaagctgcacaagaactgaaattgaaataatggagcgttatcttcgttgctcctcggtcgacgtacttccgtacgccttccctcggtgcgcttcgatatcgcacacattatttcaatttcagaactagccctgctcgttcttatgcagccgtcgcagcatagctggtttgcgctgtacatatagaaagcgcctcactggatctccagcgaggcgctttctcaaaccaacaatcaccgctcgtccatcggcatgaaatcgcgctcgaccggaccggtgtagacctggcgtgggcggccgatcttggtgttcgggtcggccagcatctcacggtactgcgcaatccaaccgggaatgcggcccagtgcgaacagcgtggtgaacatggccggatcgaagccgatcgcccgataaatcaagcccgtgtagaaatcgacgttcggatacaggttgcgcgatacgaaatactcgtcgttcaacgcaatatcctcaagctcggtggccacatcgaacaacgcacgctcgtcggacggcagtttctgcgtatcctcgcgctccatgatcttctcaagatacttcttggcaatcgccgcacgcggatcatatgacttatacacacggtgaccaaggccggagatcttctggccattctccttggcatccgtcacgaactcggccacagacttgccggaatcacgaatcgccttcagctggcgcagtacggcctcattcgcgccaccgtgtaacggtccggacagggcattgacgccagcggccaccgccgaatacagattggcgtgggcggaaccggcgatacgcaccaccgaggtcgagcagttctgctcgtgatcggcgtgaataatcagcaaacggcccaaagcatgcacatacaacgggtcagattcgaacggctcgtacggcacagcgaagcacatgcgcaggaagtcgtccacatagccgcgcgcgtaatcggggtacagcatcggctcatcgcgacgacggcggaagatgtacgacacaatcgtgcgggccttggccatgatgatcttggcggcctcatcgagctggtcggtgtcggagatatcggtggtgtccggatagaacgtggccagcgcattgatggcggaggcaagcacgctcatcggatgagcggagcgcgggaacgaacccatgaaggtacggaagtcttcgccaaccatcgtcttgtggttgatgtccgcgcagaactgctcatactcagccctgctcggcagctcgccgtggcgcagcagccacgccacttccagaaaatcggagttctcgcacaactgctcgatggggtagccacggtagcgcaggatcgaatgcttgccgtcgatgtaggtgattttcgattcgcactgtgcggtggtgaggaatccggggtcgagcgttacccagccgtcattgcgcagcttggaaacgacgatgccatccggccctgcactagccttcaccacgggcaggttgaacttgttcgaatcgacatcaagttgtgccgttgccattcgcgcaccttcctcttcatgaaccacttaccccaaacattaacgttcacgcgttcgcgaacgctagtgttcggta

SEQ ID NO: 485 - DNA, 19038 bp, Unknown
  R48_24m  MAG No. k141_35070
cgccgtgacggcgtgttccgcatcggtgacttctttgagtcgatcaccgggtatcgcactgcgccggcgcagaccgcgccgcacgagtggctgatgctggctgaatcgactctggccgcagccaccaatggcgaagtattcgcagaccccactgggcagttctccaaaacacgccaagggttcaaggatatgcccgacgacgtgcggcttgccttgatttccaagcgattgggcatgatcgcccaggccggtcaatataatctgccgcgttcgttgaagcgcggcgacggcgcggccgcatggctgtccatccacgagttcgtgcaggccaccgcctcgttggtgttcctggttaacgtgccgatggtggtgggctatatgccgtattacaagtggcagttcgcagcattgcgcaagctgtctggctcgatgttcgcgctgttgccgaacgtgggcgaacagttggaaaccgtgatgcgattgagttcgacagcctgctatggcggggccggattcggcgaaggcggcaagggcgcggctccagcaatcgagaaaatcaacgatgttgtggagcagattgcggtggatatcgtcagggaactcaaacgcgaacacctgaccacgtccggcgagaccttcctcgaatggcagcgcccgtatgtcgaggaccacatcgtctccgatgatccggtgcttaaaagtttgtagattcaagctccctctgatgatccggcgctttagagctccctctgtcacggcttcgccgtgccatctccctcatcagagggagatattagtgaaaggaacgtcgatgaccaacgaactgactgatgatgaactgcgcgaggctattgtgcgccatgaatgggatcagttccagcgcaccaacaatgagggtggacgcgcggcatgccaaggcaactggccggtgttccaccagatgcggctggcccagttcctcacatgggagcggccattactcaccagctatgccgctgatcttgacgcggccgaccacgtgggccgcaacctcgtgaccgaaaaatacggccgcatgatggcctccaccgcgccggaagatttcacgaagaacatagagccgtatattccgcgtccctctgaagagcgcgtggcccgtcaggaacaggtcatcgcccagcaggtcgcctgggccaaggatttccgcgagcgctaccccaagctcggcgaggcgatgcgcgtactcaccaccgccgaagacacaccatctgccacctcattcgaaacctatctgcgcggcgagcttggtacgtattccgaacggaccttccagctctacgaggtgatgattagcgagcgcgccgcagccagcccgcaacgcaatatcactgaggaaaccttgttgcacacagtccagctcggcggtttcgacactttggatgaggctgaagccgctcagcgctgacgacagtgcctccacgccgtcacgccccatccaccttcccgaatttgtgacgctcacggcgactcagtggcacatattcgggaaggagccggtaacgaccgtgaatatcacagactgaacaacccccagaaagacaatatcgtcaatgtgacaagtgcagccagtgtcaccatcacgcaaatgacacgacgcacgccgataatactggcgcgataccgccacatacgttccagttcccacgcgaacagcacgaccaacagcacggtcagcacctgcaatgccctccacccaagggaaaacaactgcggttgaggcataaccaatacagccgatacgcctacggcgctcatatagccatacaacagcacggtaatcaccattaccgctgtgccgataccggcagataagccggcaatgccgtgcaacgtacgctgttgggcggctcccagcccactcggcgtcgcatgcatggcccgcacagtcgccacactacgtcgcccggccagcaacgtctgtagccaagaaaacacagtcaagccaatacctaatatcgccgccatcacgatcagcacgggccctgccaccatcagaccggccagcacgccgagcgagccgacgataccggatctggtacgttgcggcgcggcgaagcgctggtgaggtgtcgcaccggcgacttggggcgttgcccatccatcggctttggttccggcagtcacaccgttcacccaattttccagcgcttgcgtatagccttcggccaatggcaggttcggggtgaataagccctcaccagcccgcatctgatggttgccggcaaaatagcgtacggtgacgttctcgttgccggacttgttggccgtggcgatgatccgctgcgccccctgttcgatgggcatggccgtatcgtaggtgccgtagttcaccagcaccggcatggtgagggatttcagataccggtcggcatcaaagtcggcataggccagatcgaatggcgcgtagtccagcgacatcaatttggccatgtctttgaccacgggcttgggcgcgccggcctcatgcgtataggcgctgacagccatggccatttgctcacgtccattgaacaccggtgcggatgtaagtatggcaaaggcaatgtcttgccgtttcgaggttagaatcgtggcgatccaggtgccttcggattcggcgtagatgccggttttggcggggtccacgccgcttatgccacgcagcacgtcgagcgaacgcccgtattcgcgagcaaaacgcgggtagtcgcgatgcagcacggtgtagttgtcgttgcgcttggccggcaccaaggtcacgatgccggcagaggccatggcgttggcgatatcgccgaaatcctcggcaccgctggtaccggacccgtgaatgaacagacaagccgggcgtggcccgggagcgtcgaccggttcacgtagtacggcgggtagcgtgacgccgtcgccggtcttgatggatagtcgggtttcacgcgtacgatatcgcccctcgtggggaatgttcgcatgggcaggggtgatggtggtgtcggcagaagcgatagcgatgtgcttggtgtagggccgtgtgttccattgcggcatcatcgcccagccaagtgtggcgaataccagcgtcatcgccatcgcggtggcgatgacgctcgctacccgccgcgccgaaatccgtttcatagttactatgcctccccccatcagcatagaacggtcggctcttatcggtcggctcccgtcataatgtgcttctactgggaccgtaatgcaatggttgtaacgctattttctcttcttgacggcaccgactatggcccatacaacggccactattaccagaataagtcccactacggcgcagataatagccgtcagcaattgcggattcggcgagaacagcgaaatcatccgatccggagatatgtacccgaaaaccagcgcgatcacgccgataatcacgcctaatagtccgaataccacagtaagcgcgctgatgctctgtttctggatgttcttggcactcttgacatccttagcattctggacgttcttggcgctccccccaggctggcatggtttgccggcggtctgagactgctcataggaaggttgcgctgaagatgctgcgtacatcggtacatcatcggcagatggaatcggcccaccatccccctccacggcatcggcaactgcttccagggcaatccgatctgtggatggttcgatgggcgatggagaggcagctgttgcctgcgtatccacatccgagaccggcgcatccgcatgatcgtcggggacgggtagcacagccgttttgtcatcatccgctgcggatggcagcaccgtggtatcggttcggtcatcgacggtcaccatggttgtggtctcggtggtctcgtcggtttcggaaggtatggccgtggtcggtgtcgcatcctcgatggaggcgaattccttggtttcatcagtcatgattccatctcctggttgtaacggcttgatcattccgattgcccggttgtgttcttgcttgtgctgttgccgtcgtatatatcggcaagcggctggaacgtggagcctttccaatcggaggcgtacatcacgttgacacgtgcttccactgcatagggaatattgatttttaattctgggccgttgtccggcatggcggatcccttatccaaccattcgtaatcaggcccattcatgggattggtggcgctttcagctccgaagaaaacaaagcttagacccatgtagttgttgtataccatctcgtatttgccgccgacgtcactcgaagtgaagtaggagtcggcggtgccgaaggcgtaagtgcaggaatccggcagaacgatatgcacttgcgcctgtgttgcggctatggtgatggtaccgaccggacaattactgatggaggttttgccatccagcatcttcaccgtgtgcggtccatgtgtcttgtcccaatcggaccaatcaatgattgcctgatcggtgttgtagttttcaccgttgaacgccacaccttgctgcaatgtttcgaacgtggcatcgctggcatcggcaacgaagatgccatccttttgcacatcgttcatgccgtcgctgtttctcgcattgacagattggctcagtgaaacaacagtattgatgccgctggcaccaagatcacggtagtacacgccatacgtgcctgaaacgatggtcatgcagagcgcgcatccaccggcaaccagtccgagaggaatcagaccaccggtacgccgccctctgaatccgagaatgatgaccaccagccccatcactatgcatactgcggcaatccagatggtgctcagacgcataatgccgataatgcccatgtcgtttacccaaatcagtcccatcagaccggcaaaggagaggaaggtaaggcccagtatgctcaagaccacgattgggcccgccggcttgcggcgcttggactcggtgggggcatagaccgtcgcattcatacggtcgggggcaaacggcccgttgggtactgtgccgggcatcgcgctgggcactgtgcccggcatcacgccgggcaccgactgatagaaaggccgtgaaacaggctgtgaaacactaggcgcggttcgtgaaacagattgtgaaacaggttgcggagctgaatacaaaggagatagagggaccggttgcgcggctggatatgaggcaggctgtggagctggatacgacacaggctgtgaaaccggtcgcggcgcagatgccccgaatccgtacccttcctgctggcgaatgccgcttttggccaacaaccatagcgctaaggcggcgagcgcaatacaaacccaccccgcacctggaatcacgattgccacggctaggaacaggaagcatccaaggcaattccagtcccattggccggcaatgaggtcctcggccaagatgtgcccatcgcgtacatccggcatcagaaaccagccgagtgcgtacagagctgcgccaaaaccgaagaacaatgtacatacaatcaccaacgcacgtactaatgtggggctccagccaagccgtaaagcgatgccgctgcatacgccaccgatccaccggtcgtcgccgcgaaccagtccactggatcgcacccaagtgaagaagcgtcgcgatgtcttgtttttttgcggaccaggctgcggctgtggctgatacggattcgcgtttggattgctcatgattccattacaccgcccgaccactgccacaacgctcggggaacaccctgattgttccctgaacaccgggtaaaaccccggccgcaacgccctgagcgcggcacaataggagtatgacgtcatctcccgaaccattgctgcccgcgcgcatgccgctgatgcgcccccggcagggccgctggctcaccggcgtgtgcaagggcatcgccctgcacttgggcatcggcgtgacatgggttcggattgcgttcatcgctctgaccttcctctacggcgcaggcatcatcgcttatgtattcctgtgggtgttcatgcccgccggagacccggtgacggctgcggctcgcacagtgcccgttgatcaggcgccgcttgcgcgaggcaatcagccacttgacgctcatgacgacgaatcggctgccgcaccggaatcattgtccgaagccatccaacgtgctccgaaaccggccgtcgtggcattggccggtttcgcgttgatggccaccggactgctgctcaccagcaccggtgcggatgtccagattgtgcttccgctgctggtagggttgggcggcatcgcactggcatggatgaatcttagtccgcgaggcacgcagctgttgtctatgttgggcggcatcgcactgattttcatgggatgggcattgtatgtgcataatgtcagcattcccgggtggggcacctctcctcgacgcattgttgccagcggattcgtgatgatcgtcggtatcgtggtggcggtgatgccgtgggcgaacgcgatgctgcaacgactcacccacgagcaggcattgaaggaacgcgaagaggagcgcgcggacatgaccgcccatctgcatgatggcgtgctgcaaacgttggcgctgattcagctgcactccgaggaaccgaccaccgtattcgccctggcgcgtagccaagagcgcgagctgcgcgaatggctgtatcaggaacgttccacatcggatcgttcggtgggagccggattgaagcagatcgccgccgaggtggaggacgagcacggcaagccgattgaggtggtcaccgtgggcgacgcgcggccgagcgcccagaccgatgcgctgctggacgccacccgtcaggcgttggtcaatgcggtcacgcatggcggcgagccggtgtctttgtattgcgaggccagcgacacgatggttgaagtgttcgtgcgcgaccatggcgaaggcttcgatatggacgccattccgcccgaccggctgggcatccgcgaatcgattatcggccgcgtcaaacggcgcggcggtacagtggagatagtgtccagggccggctggggcaccgaggtcagaatgcatatgccgatcgcgctgaaagcggcgcagggagaacatcgatgagcgagaacgagacagccaagattcgtgtggccgtggtcgatgaccatgagatgttccgtgcgggcgtaatcgccacgttgcgcgattccttcgatatcgtcggccaagcggcggacgtgcccggttcggtggcgatgatcgcacagaccaagccgcaggtggtgttgctggatgtgcacgtgcccggcggtgaaggtggcggcggtgccgagatcctcgccaaatcgcggccctactcccccactaccgtgtttctggcattgtcggtttcggatgcgccgcaggatgtgggggcggtgattcgcgccggcgcccagggctatgtgaccaagacgattaccggcgctgatttgatttcatccatcaagcaggtgcatgagggctatgccgtgttctcgccaaaactggccggttttgtgctttcggcctttcagggtgtgccggcggcggggtctgatggcggcgctgatggtgcggcacgggctcatgatgaggagctggaccggctgtccgcccgcgagcaggaggtcatgcggctgatcgcgcgtggttacacgtataaagaggtggcggccgaactgttcatttcgatcaagacggtcgaaacgcacgtgagctcggtgctgcgaaagcttcagctttcgaatcgcaccgagctcacccgctgggccgccgataggcgcattgtgtgataaacgacagatgagctccctcatcagagggagctcatctgctcatatcactcggcgtcgcggaaaccgttggggttcttggtctgccagttgagggaggaggcggccatgtcgtcgatggtcagctcggccttccagccaagctccttctccgccttggaagcgtcggcgtagcaggcggcgatgtcaccggggcgacgcggcttgatcgtgtacggaatcggatgaccggcggccttctcgtaagccttgatgacctcaagcacggagtagccgtggccggtgcccaggttgtagacgaacacgccttccttgtcgatgtggtcaatgacggccacgtgacccttggccaggtcgaccacgtggatgtagtcacgcacaccagtgccgtcgggcgtgtcgtagtcgtcgccgtagacctggacttccttgagctcgccgaccgcgaccttggccacgtacggggtgaggttcgccggaatacccttcggatcttcgcccagcaggccggactcgtgtgcgccgaccgggttgaagtagcgcagcagcacgatggtccaggacggatcggccacatgtacgtcgcgcagaatctgctcctggaacagcttggaggtgccgtacgggttggtggtgccgccggtcggcgtctcctcggtaatcggcagttccttcggcgtgccgtacacggtggcggaggaggagaagatgatcttcttgacgttgtgcttcttcatcaccttgagcagcacaagcgtggagtacaggttgttgtcgtagtattcgatcggcttggccacggactcgcccacggccttgagaccggcgaagtgaatgacccaatcgatgttgttttcggtgaagacgcgttccataagcgcctcatcgcgcacgtcaccgtcgtaacgcttgaccggcttgccggtgatctgctcgacgcgctcaagcgccacgggagacgagttgccgtagttatctacggaaataacgtcgtagcccttgtcgagcagttcgatgtcggtgtgggtggcgatgaatccagcaccgcccgtaaccagaacagtagtcatatctcctcctttggaaggacttgccttcggttttccttcagtattgagcttacttcacttgacctgtttcacctagcggcaaaaccaagactttcgaggaatgtttgcgtggtggctttctgcttgaagacggccgtgttgccgaggatgcggtagcagacgctgccgagctcgtcacgtacggcttggtggatggcctcgcggtcgcggtttccggccaatgtttcagcgagttcgccccattcgagactgaattcgctgacttcatcgggcaaatcgcggccttcggcgagcgcctcctcgacgatgccgagctggtcgacgagccgtccgggcaggatgaacaggccttgggcttcgatcagtccaatcggctcctgcttgaccggccagtattcggggtgtgcatggaaaataccttccgggtactcgtcgctgatcgcattgttgcggaagatgagactcatctcatagccacgttcggtgatgatcgcgctgggcgagagggcggattggcggttgccgtccgcgtcatggctggcgatgccgttcgccgcgtcgtcataaccgacccatgcctcgcggatgatgtcggatacgtcgatgatgctctggcggtttttcgacaccacacgcacggcggtaccgggccagtcgaggatttcgaccacggcgtccggatagtcggcgagcgtgaaggcggcccaagtggcggccttgtgcatcggcagcagttcgccgccgccctggtagtggtcgtgggcgagcaccgagccgccgatgcgaggcagcgcggcgttgcatccgaggaagtatccggggaagcggtccacgaagtcgagcagatggccgaaggtgtcgcggtccacatgcatcggcgtgtggtcagtgttcacgcagatgccgtgctggtcgaagtagccgtagggcgagaactgccagaaccatgactcaccgccgagcgtgaccggcagggtgcgcagcgtgcgcttgtcacgtccggcgaagccctcgttctcatggcagatcgtgcacttcgggtagccgccggacacggcgttgccggccgccgccttcttcatgttcttgaattcgggtttggcgaggttgatggtcaccgtcagcccgtgcgagtcgaagcgcgggttccggtcgagctgggcacgcttgacataattgttggccacacagtagtcgtagaaccattgcatggcggccatgccgccgtccctgtgctcgatgagcaggaaccggtcgtcgagatcggcggggttggcggagaggatgcccatgatggtgtcggcgtaggccgggccttcctccggatcgaagaggccggcggttgtggcggcggcgcggaaggcggcgagtagggggtcgggggtcttttcgtcagagggggcctggcttcggctgccgacaatgtcttggactgcgtctgacactgacgccgccgacgttgtggttttgggtccggggtaggaatccaggtggaagagggcgaagatttggttgcgggtccagtctgcgttgcgtggatcgaggtcgagatgatccaaggcgtaatcgactagggcgtcgatgctggcgtatacctcggtcagctgatcgctcattgctcggcccccatcatgctggttcgggtatggttcgactgacggctcacttggcagcctccatgatgtcggctacgatggcgtgggtttcactggccttctgctccatctcctgcacgagtttgatctgggtgcgggtgcgcaccagattgtgctcggggtacttggtggcaaagtagatatcgccttccaagtagtcggcgagaaagcgcatgccgcattccatggtgagcaggttgccgctgaacggcagcagttcggcctcgcgcgcggtgatgctgccacgtagttcgcccacgaatccttccgtgtaggcacggaacagctcggtgctgaaatgcaccttgctgaggtccttttcgtcttccagagcagtggacgcaccaaagcgtatggaatcgccgaagtcgaacagcatggagccgggcatgatggtgtcgagatcgatgatcgcacgcgccttgccggtggtggcgtccatgaggatgttgttgagcttggtgtcgttgtgggtcacgcgcaacggaatcgaaccgtccctgagcccatccatcacgacggcatactggtcggcgtggctcagatagaagtcgatttccggctggcatgcggcggcgcggccgagcttgtccgcggcgagggcggccttgaagtcctcgaaacgatgcggggtgtcgtggaagcgggcgatggtttcggtcagctggctggcgtcgaattcggacaggaagttctggaagtcgccgaatgcgctgccggcctcgcggaacacgtccgggttcggcacgaggttgtacgacacggtgtgttcgatgaacttgtagacgcgccatgcgccgccatcgatctcggcccaggtggcgccggaggtggtgggcacaatgtccagcgtctctttgccctgagccttgagagtggaggtgaccagttcgacattgcgcatcagattcaccgtatcggggaagatgctggtgttcatctgttggaggatgtagcgggggccgtccgtggtcaccagataggtggtgttgatatggccgtctccgtaaggttcgatgccggtcacggcaccttccagcgcaaaatgcgaggcgatgccgaataaaacttcattgctttcggtcatgatgggtccgttctccaaaacgcgggaatcaggcttcacgccatgcgatgccgctgtcgggcaggtcgaagtcctcggtggtgccatcggccagagtcaccgtggtccgctgcggctgatcggtgttgttgattacgcagtacaacccttgctcggggaagtgcgccacctcgcactccgggttggacgagctccaagccgcatacttgtcttcgttgtgggaggcgtagaacagcacgcgttccagcagtcgggcgttggccgccgaatagggcagaccggagatgtacacaccgcggccttcgccataatcattggtcgcgagctgcacctgcccgccgtccgcgcgcagcagggtcacgttttcattgaccggatacgtgttgagcacgggttcgccgaagtcgatgccgcccaacggcttgatggactggccaccgccgcaaccgctcagcgggatgcggtagccggcctgttcccaagcctcgcgggccgccgggtcgaccggcacatcggcggtgatgaagtggtccggcaccaccggtgggaagtacttgtccacggagagggtctgatagcgctcctcgtccacgccaatcacgtcggccagctggaagaaccggcccgcttggaagcgcggtgccgagctcggctcgcccacgcccacgaacgcgccgccaccacgcacccaggcgcgcacggtttccacgagcttcgggttggtccacacgtcgccgccggtgaatgcggtgtcgaccgggccgccgttgatgattacgtcgatatcactatcgatgccatgcgcgagtacgtcgtcgaagctgatgaaccgcacgttcacgcgcatgccggacagggattccagaatgccgtagtaggagtaggtctgcttgttgggcagggcgtgtgccacggtgaacgccatccaggaacgcatcttgccccaggaattcagaatcgccacgttgagctcgccttcggcggccaccccaccggtgcggtcgtggatgtcgcggaattcgtcggcgatatgggtcaccgtgtccacgaacttcgggaacttggcggccaaggagaggtagccaccgtagcccatacggccgatcggcgaacgcaggatcgcgcggcgggccttacgccagttgtcgaggccttcgatgctcgggtcgttgccctcgtagaacgtgtcggggaagaagtacggcaggaagcgtccttccgtgtatttgacgcccggaatgtccgcgatcatgcgggtggtggtgccgtctccgatggagccgacgaccgcatccaaacccagcttttcgaacccgtccttatacggttcggtaccgatccactggtcgccaaggaacatcatggcttccttgcctgccgcgtgcgacatgtcggcaagccgcttgacgttctcgcgcacgaatccggagaggaagtcaatccagtcgcgttgcgccttgcggggcacgcgccacgcggagttgtaggcaccgccatccacgaaatcctccggacgcagacggtaaccgtactccttctcgaaatcgtccaatgcgcgcgggctcacggtgcaggcgcaaccgaaccagtcgaccaccttttcgcgacgcttggcatcgaacaggagcgtgaactggtagaagaacgtggtgaaacgcaccacatccacctgcgggctgtccttcagccactgctcgaacgtatcgaacacgaacttgcgggtggccggatggtagatgtcgaacggaatctcgtgttccttgtctccccaatcattggtcaggtggttgtacatctcgaccgggtcccagatgatgtaggccaggaaactcaccgtgtattcgtgcatcggcacggcagcggtcacgtgcacggtgtcctcgcccgggtcgagcgtccagccggacgggtccacgacctcgcccgtggtgcggtccacgacttcccagtacttatgagggtcggcgtcacggttaggcttgagctgttcctcgaagaaaccgtccatcagcggcacatccaccgcgttggactcggccaggatacgggcggtcagcaggtagacctgcggggtctcgtccatgtgcagggtgatccactcgttgtgggcgcgggtcgggaagtaggcgctgtagattttcttgccaagagcgagcactgcctcgtccagatgcgtgccatcggagttgcggatggcgtccgcaccccacaattcggcgagttccttggtcttttcggcaaaattctcttcactgggcagcgtgaagcggccggtgctggtcatgagtgctcctttgtggggttggtcatcaaaaaactacaaagcgacgaattcgtcgcatacaaaatgaccggcgtcatcgcgggccctgggaccctgactgcgtagatccttgacgcttacggtgacgccggacgattggaatcgtgtcactgaatatgggagggacgttgcccggcaccggaaggagtgacacgacatgccgggcagcggattggttagcccttgacggcaccggcggcgaggccggactgccagtagcgctggaggccgaggaacagcacgatcacgggcagcacgccgagcaacgcacccatcatcagggcgccgcgatcggtgaacgtggccagcgagaccatgccgtacagaccgagggtcacgggcttcaaggtgtcggaagacaccatcatcaacggcagcaggaagttgttccacgtggccacgaacaggaacaggaaaatcgtcaccatggccggggccaggagcctcagcacgatggtgaagaagatcctcgcctcgctcgcgccgtcgatgcgggcggcttcaagcagttcgtccggcaccgaactctgtgcgtacgtgcggcccaggaagaagccgaacggcgaaacgcagcacgggatgatgatcgagagcatagtgttggtcaggtgcaacgtgtggaagatcgagtacatcgggatggtcagcagggcggacggcatgagcatgcaggccataatgatgccgatggccgcgttcttgccgcggaagttgaattttgcggtggcgtagccagccatcacagacacgatggtgccgatcaatgccgagacgcccgagtagatcagggagttcagcacccagcgccagaagttgccacgagtccagccaagcagcttggaatagttagtggcgatggcattgggcagctggtcaagcggcacagcaaaccacatgccgttgctaccggtcatctgggccggcgtcttggtggacgcgatgatggcccagtaaatcgggaacaggaagtagatcaacaccagtaccagcagcaccacggtgagggtcttcacggccgcggacggtcgcatggagcgaggcaaatcgtgttgcgcagcctgacgctgcttttcgagcttgcgctcggcctttttgcgggcgcgttcttcaacggttgcggagctcattactcgttcaccttcctttcggccaaggtgtacagcacggcaagcacacctgcgatcagagccatgacaatggcgatggccgaggccggaccgtcaccagacggggtaatggtgccctgagaagtgttcatggccatcatcatcggtgtatacgacttggaaatacccggatcagccgtagacatgatctgcggttcgttgaacagctgaatggtgccgacgatggaaagcagcatggccagcagggccgcgccacgcacgttcggcagcttgatcttcgtggcaatctgccaaccattggcgccgtcgatacgggcggcctcatagaggtcatgcgggatggcctgcagtgcggcaaggaaaatcagcatgttgtagccggtgaaggtccatgtggtgatgttggccatcgagccgagcacgatgttcttgttgaagaagtccacattgacgccgatggcggcaagtcccttgacgatcggcgagatttggccgttgtacaggtagacccagataatcgaggccacgacgccggggatggcgtagggcaggaagtagcccagacggaaaccggtgacatgcttgaccacgaacgagtcgatgacgatggccaacgccagtgcggcgatgatcatgatcggcacctgaatcagggtgtagagcagcaccctgccgacgccggaccagaagttgccggaagtaatagcatactggaagttctggaatcctacgaatttattgaccagctcgccaccgccgtatgcgccaccgccctcggtgacctgacggaagaagctggaatagatggcccagatgatgggcaagatgaacacgaaagtgaacaggacggcgaacggtgccatgaacgcccagccggtgcggttctcgcgcttctgagcgccggaccgcttcggcttggcggcggcacgcctaggtgctttgcccttcgcctgagtagtggatgcagtcataatacaaaacctgtcttcgcaaagaacagtaaaacaaatgacaagggccacagcgcccctgcagcaatacccccaaacaatacggaaggccggagtatgtgccccggcctttcgctatggtgatgcgaggcatcggaggtcttggacggccggctatttcaagccggcccgttgacaagacctagtgaggtcactccttgacggacagaccgaggttcttcagcgtatccaccgaggtcttctgagcggtgtcgaacacatccgaaaccttggcagaaccatcggcagccttggcggcggtctgtttcattgcagcgccgactgcggagaagccaggcatgtaggtgaagtcacccatgttgtcgttcgcggtcttgaactcagccatgacatcctgtccgctgaagtagtcggaccacttctgcggggtcttggcatccgcggtggtggcggccacgacaaggccctgggagacaaggtcatcaacctgggtgttgaaccagtcaaggaactccatggcttcggccgggtgcttggaacccttgagcacggccacaccggaaccaccatcggcgccggtcttggtgccattgccgaaccagtcaccgagctgggtgaccttccactcaccagcaccagtgccaccggcggaatcgatgaacagcggggcttcccaagcggcggccacggtgccgatcagctgaccggactggatggagttatcaaacgatgcatcccaacgcgggttggtgagggcggccttgttgtcgatcagctgctggtagacatcggccacggccttggagcccttagtctgggtgttgacaacccaggagttgccgtcgaccttgtaccacggaccggaagcgccggcctggccggacatcatcatcatggcctcatcaggttggaaggtcatgatgtacttgccttgggcagcggtcttcttggcggtctcaatgagctcgtcagcggtcttcggcacggtgatgccgagcttctcaaattcagcggcgttgtagaagtaagtcagcgggccggtgtcctgcggcagaccgtaggtcttgccgtccacctgcatcagtgcgaacgggccggaagcgaaatcgtccttgtacttggcggcctcatcggtgacatcctgcagaaggcccttggtgaagacctcaggaacctcggagtaaccgacctgagccagatccggcgcattgccagccttgacgtcggtctcgagcttcttgatcatgtcggcggcattgccatcgaacttggtggctttgacctgaatgttcgggtgctccttgttccacttggccacaatgtcgttgaccaaggtcatgccttcggaatcgggcagacgatgcatataggtgatgttgaccacaccgccatcgctgccggacttcgtgtcgccggcagtgtcgctgccgccgcaaccggccaaaccaatacccattgctgctaccgcggcaagagcagccacgatgcgcttgttgtgcgataccatatctctactccttcctagtgaaatcatcacctcagcgtgatgactgattgctaatttaggcctttgctcttttattgtcaacttagctaacaattaccgcgcgtcccgttgaggtgagtggcattaaaccgattcgatgctcgattgtgcgggtttgttcatttcattaactccccttacaaagcaacgtacttttggtccaccggtagacctaatgagatattggatagcggcaacaatccaagacgtcagcttgcaatcgtccaccacaaattgcaagcacttgccaacattatcggttttcaggttgccggcgcgatacccgactaggggggcaccgcgccttaatgagacgctacacgagcagtctcagcaactggtagagctgccacaggctacgcacgttgaagtgcgtgccgtcaaccgtggcgttcgcctcgccatcgcccacatggacgatcacggtgcgcccgttcacggtcagactaccgtgcatcgtgatatgattcatcttgcaaccttgttgattaaaggcgcaagccggtaatcaacgcaaaggcccgatgccgcaaacgtcgggccttttcttatcggctcacgccgattggcccgtcatatcaacggggacaccgcatgttacggcatcacaaaccaatatatcagcaccccggtggcgatcaagaagacaggttccagaaaaagaaaaagggcctgggcatgttgcccaggcctcggttcgcggacagggcgagattcgaactcgcggagggttgcccctcaacggttttcaagaccgtctctttaggccgctcagacacctgtcctgatgcgcgttcacacgcgcaagtattcattatacagaagggagggatgttgatatcggcagtgcggtcggtcttggattcgcctgctggctattagcgatctctccctcagtcagctacgctgacagctcccccattaaagggagctaaagcacgatgagactcaggcctcccacttagtgggctcgatgacttccttgccgcccatgtaggcgcgcatggcctgcggaatctcgatggagccgtccttctgctggtggttctccatgatggcgaccagccaacgggtggtggccagcgtgccgttgagcgtggagaccggacgggtgccgccatcttccatacgctcgcggatgttcagacggcgagcctggtactcggtgcagttcgaggtggaggtgagctcgcggtagcggccctgggtcgggacccaggcctcgcagtcgaacttgcgggcggcggaggagccgaggtcgccggctgcggtgtcgatgatgcggtagggcacttcgaccttggcgagcatctcctgctccatggccagcaggtgctcgtgctccttgtaggagtcctcctgcttggcgtagacgaacatctccaccttgtcgaactggtggacgcggatgataccggaggtgtccttgcctgcggcgccggcctcgcggcggtagcaggaggaccaaccgcagtagcgc

SEQ ID NO: 486 - DNA, 31873 bp, Unknown
  R48_24m  MAG No. k141_35488
aggcccaggtcaaggacgagcatgaggaggtcaaggagctgggcggcctgtatgtgctcggcaccgaacgccacgagtcccgtcgaatcgacaaccagttgcgcggtcgttccggccgccagggcgacccgggtgaatcccgcttctacctgtcgctggaagatgacctgatgcgtctgttcaacacccagctggtggctcaggtcatggccaagggcatggaggaaggccagccgatcgaggccaagtccgtcaccaagggcgtgcgcaccgcgcagaaggccgtcgaatcccgtaactatgagattcgcaagaacgtgttgaagtacgatgacgtgatgaacaagcagcgcaccgtcatctactccgagcgtcaggccgtgctcaagggcgaagacatccacaaggacatcctgcgtttcatttccgacaccgtcgagtcctacatcaagggtgccaacaagggatccgagaaaccgaaggactgggattgggagggcctgttcaaggcgctcaacaccgtgatccccaccaaggtcgacgaagacgaggtcaggaagatcgtcggcggcctcaagggtgcgaaggccgtcgaggccgtgcgcgacctgatcgtcgaggacgccaggcagcagtacggcgaaatggaggagaccatcggcgagaccggcttgcgcgatctcgaacgccgcgtggtgctcgccgtgctcgaccgcaagtggcgcgagcacctttacgagatggattacctcaaggacggcatcggcctgcgtggcatgggccagcgcgacccgctggtcgaataccagcgcgaaggctaccagatgtacaactccatgatcgaggccattaaggaggagaccgtccagctgctgttccacatcgacatcaagcaggtcgccaccaccgacgaggccgttgacgaggtcgaggagaccgccgaaagcgccgacaccatcgccgtggcctccggccccgacgagaacggcgaatccgtggtcgaggccgccgagggcgaagtcgaggaagaggacgaggatacggacgccaagcaggcgatcgccgaatccgcagccgcctccggggccggcgagtccacgctgcctgttgccggaccggctccgatcagccacgccgaaagcaaggtcccggtttccaagcgtccgaagagcgaagagctcaagacgccgtgggccgacggccgcaccttccctggcactggcaagaacgccccgtgcccgtgcggttccggccgcaagtacaagatgtgccacggccagaacgagaagtgacgcatcgctagttagtaactagctcatggctccccacacggggagccattttctatgcggttcatcagcatgtattcgtgcggtgccgtacgcgcgggacggcacgcgattttcgcggattttgacgtcgtatcccacactgttgcgggatggcacgagtgtcaatcgattgactagcgtggcgtcccgcagtacgaattacggaatcgttgaaattccgccattctcggtgttatggtgtcacggtccgcaaagggtgatgtgggacggcacggctcaaacggcgaaaatgagttgccgtcccgcagttttacgggatagcacaaaaaagaggcttctgctgttttcgtgggttgggttcttggttgtggtgggcgtatgtcgagtccgccgcggcggagcatgacgagggcgatgggattgttcgcgtggtggaagccgtaggccatgcggatggtggccttgctcctgttgtcggacgcctcgagcctggcgtttgaacagcccaattcgattgtcccgaggatgtcgggcccatgacggcggatctttcgggcgcgttcgacgatctcggggatgcggctgtgggacgcccggaacacccggcggtccagttcggtcccggcctggtcggccggtcgtttgggcatcgtccggaggggttccctgtgccgtcatgaacggtagggccggcccgtggggtccgtgtcccgcaggttcccggacgcctcggaccgtctgtcggtcagcttgccggggttcttcaggacggtgtatctgacgccgcgcatgcgcttgacggatttctcgtccccgtcgcggcgcgcctggttccacgggtgtctcctgactttgtcgggcgcgtcgctcgtccaactgacgatgtggaacccgtcgggcgcgcgttcggcattcgggcaccactcatgcacgcatgagtcgatccaccgggccccgtccccggcgacgaccctgatggaggcgcgctgttcgggcgtcaacgtttggaagaacaggccgaacacgtccctgccgtacccgtcgtgcgcccatatcgcccgatgccgttcgtggtcgacgatcacggtgatgcacgtgtggcctttgcggtagccggtctcgtccacgccgatcgacgtgaggtcgccgaacggagacggcatcgacgctttcaaccgttcggcgaccctatgggcggcgtcttccggcggcgcgccacgcgacgtgcggaaaaccgcttacggtcttctggttcgcgacgctcatcggccacgcgcgttccgattcgaaatcgcgtgtggaccggctgcccggctcggcccacggcacggaagcgaccacgacgccgcacgccgccgccctggtcatgcccgcggcgcctccttccgcatcgggagcatcggagcatacccgcacgtggacgcacccggatctcgagcacgggttcggaacgcggcggcgaatccgtgatccgcgcatcctctgcaaccgtgcctttgacgttcggcaatccggtgaatgggcttttgcccaggcgttcttcgtgattcatttctttggtcggaaaacagaatacgcgggaacgcccctcacgcttacgaaaccaacggctcgacgacgaaccgacatccacgaaaacagcaatagcgccatattttgcaatatggaagattcagggccttgaaatgacgaaccattacaatgagcggcgaacatacatcacacggcgtaggaaacgccaaggagggcatcatggccgagatcacatggaagtcgattctcaccaagctggtcgggggagaccaccttactgctgaggaatcggagtggttcgtggacgacctgatgcaaggtaacgccaatccggccgccgtgggtgccgcgctcgctatgcagcagcagctgggactgaccgccgacgaggtgcgtggtgccgccaaggccatggtctcccacgccgtgccgctgaacgtttccggtgggaccaccgacatcgtgggcaccggtggtgacggcttcgccaccgtgaacctgtccaccatgggctccgtggccgccgctgcagccggcgtgaagatcgtcaagcacggcaaccgcgctgcatcctcgaagtgcggtgccgccgatgtgctcgaagacctcggcctgccgctggatttgaagccggaggccgtcggcgaagtgggcgacgaggtgggcatcaccttcgcgttcgcccgcaccttccacccggccatgcgcttcgtgggcccgattcgtgccgcgctcggcattccgtgcgtcttcaacatcctgggaccgttgaccaaccccgccaacccggcacacgtggccatcggctgcgccaaccgcaaggtgagcccgatcatggctgccgtctacgccagccgtggtcagtccggcttggtctacacttcgcatgagggcatggatgagctcgcccccaccggcccggtttccgtctgggagattcgcgacggcaaggtcaccgaaaccgagttcgacccgaccgtggatctgggtctcgccaagattaccgtcgaccagctcaagggcggcgtgccggacgtcaacgccaacgcatttaaggacttcctggccggcaaggacattacgtcccgcaccaccgcgctgctcaacgctgcctccgccatcgtggctgacggcaatctggtcggcaacggcacactggccgagcgcttcgccgaggcctacaagctggccgaggatgctgtcgactccggcaaggctgaagccctgttcaacaagtggatcgaaaccgccaagtccaaggcgtgatatggaatgggtttgctcgaatatgtttacctttccttcattatcaactatttcgagttgcaggagtccatcgacttcaattcgtgacctatcttggctcggccgcaattacggacgagctacgcctgtgatacattggttcgccatcgctcacacctcgcctacaaacagcccactgggctgtttgcttaacggctcggcctcagagaggggagccaaggactacacaacctacgcgaactacaccctcgcgccgtcgtcgtaatagccaccctgatcaccggggcggtctttgcggttgaggattttggccaccaatccgcccagacccaaaatgacgcccagcccgaagagaatattgagcagcgcgcctaagagaggaatcgcgttcaagccgggaacgaatatcatcaccgtttcgcctgcgagaccgatgatgagcaacgccgtcagcagtaccgtagatgctttgaccggaccaagatcagggttcgggggagtgaagccgccatcatcataggcgtccatcacattatcggtatccagccagctggagccggtgaaatcacgggggcctgactgcttgccttttttgccgccacggctcgggcgagcatcatcggtgaacgagccgatatccaagtcatctacggaaagcagtgcttccttctcgcgtttcttggcctgcttctcgaactttttggcctgcctggaggaagccacgtcatgcaagtcggcctgatgctcggcttcgaacgcggcccacgccgcatccaaatcgttcatgtcatgcgattgcggtgtatcggcaccattcgtggccggtccggcggcaccgggagtcgacgacttggacgaagtatcggaatcctgtccgttgcccggcgtgggggttggccgctctccgtcggcattgctattctggttctcagtcataactgtcactctaatcaggcgaccggccaatggctagttcgtctgcgggaggaatgccaagtgctctactggttcttcgtcaaaggtctcggccctattgctcatcatcgtttgagccctgctgtcagcggactgaataacgtgcctcgagagggtggcgcgattatcgcagccaaccatctggcggtgattgacgatgctttgattccgattacctgcccgcgcatggtgcacttcatgggcaaagccgaatacttcgagggcaagggattgaagggcaagttcaagaagtggtggttcacgtccgtgggcgtgttcccggttgatcgttccggtggcagcaagtcgcttggcgcactcgagcatgcacgcgagattatcgaggatgggcacctgttcggtatccacattgaaggcacgcgcagcccagacggtcgactgtacaagggacacaccggtgccgcacgacttgcgctcgagaccggttgcccgattgttccgaccgccatcatcggctcggacaagctgcagccgattggcacgtcgattcccaagaagggcaagaccaaggtgttgtatggcaagccgattgaggttgcgaagaagccggctgatgaaattacacatgatgatttgcgttcgctgaccgatcgtgtttccaccgcaatccagaaaatgagcggtcaggaattcgtgaacgaatacgcccagaaggtcaaggccgagctcaaggcccggcaggccgctgaagaagccgaaaagtaattaacaaatgaggctccctcgtctgaagacagagggagcctcattcaaatctcacacgatggtgagggtgatgacggtggggttgccgttggcatcgcgcaagcgaatcttgccgccgttggataggtccgtatcgccacttttcacggtacgtaccgtgccgaacaggccaccgagcaccttgtcggttttcacctcgaacccgagaccttcaagtgtcttggttacggcgctttcctgtttgccgacaaggccggacggtatcgtcgccatctccggacccttggaaatcaccacgtccacgctatcgccccacttcagctgggctccggcttcctgagacgcggaaatgacttgaccggcctcgaccttgtcatcgtactgttcggtgacattggccgtgagcttcaactcgccgagcgcggcttgcatctcatcctgggtcttaccgacgatgttaggcatggtcaccggcatcggtcccttgctcaaagtaaccgtcacctcatcgttgtgcttggccgtggtaccgggatcaggggagatcgtcaatgccacaccctgcggcgtgtccatcgaatactcatccttcgactcgtcatgcttgacattatcgaagccggccttcttgagcgcgttcaacgggtccttgccattggccgaattcgcgtcgagaatatccttcgggatggtggtcatccgcacgcccttggacaccaccaccgtaagctcctgattggctcgcttgcttatgcggctgttcacaacggccttggtcttgttcacggaagaagagatgatcttgccttccgccacgtcgtcgctgtattccttgtgcgtcttgtaggggatgccgagagccttcaacgtgctctcatacgtggcccaatccgcgccggccaacgagcattcggtgcttgcattcgcatcgcaggtcacgtcatccggcttgggcacactccaatagctgcccggtccggcaaaccaccaccagccggcggttccgccgattgcagccagtaccagcacgatcaccagtacgatgatgagcggttttttgctgcgctgcttctttggcccggtgccgttggaagcgacgtccggctcatcggaaagggcaagcgctcgggtgaaggcatcgccggcctgaggcagcacttgtgtctcgctgccggactgtgccatgatttgcgtcttatggggagctgaagcatcggctggcgtcgacgaatcaagtgccgtggtgggggcgaccggaggagccggaggattgacgtctgcggcgccaccggtatcgacggtattgcttgcgacatcatcggccaaaaacgctggtacggacggcttgaacgttgctgcaccggcaggtacgccggtcagcggggcctgctcggcgatattgcctaccagcgctgcagcggtggcatcggtatgatcacctccgatgggttcggcatgcaaacggtattgccacgcctccagcggcaatttggcggccaactggctcaattcctcagctgctgccgcgccatcggcggggcgagcatccacctgacgcgcggtcagatgggcgatgaacgccgccacggacggatcaatgccctgacagaccgtggccacggacggcacgtcctcatgaacatgcttgaagacaagcgtcaccggattatccgaatcgaacggcaccttgccggtcagcatctcccatgccatgatgcccacggaatacaggtcgccttgcgcggtggcctgattgttctcgatcatttcgggagccagataagcggcggtgcccaatagcatgccggtggagctcaatgtggcctggctggcggccttggccagaccgaaatcagtgatctgcacatggccgcgatcattgatcaaaatgttctcgggcttgatgtcacggtgaaccacgccggcgcgatgtgcggaagccagaccatccagcgtctccgcgaccacgcgcagcgtctcacgtacggagaatgtgccttgggcgttcatctcatgccgcagattgacgccatgcacatattccatgaccagaaaatcaagtccattgaactcgccggtgtcatacacctgaacgatgtgcgggttggcgatggacgcggccgaattggcctcgcggcggaaccgttcgacgaactgctcccgatgcgggcctttggcgagttgtgtgtgcatgaccttaatcgccacggtgcgccccagacgctcatcgatggcctcatacacggtggccataccaccctcggcgatattgcgcacgatgcggtagcgtccctcaatcatctgcgcgggctcgttctcactcatgttgtatcgtacggttcctttaatcacgactaaacatgttcagtgtacatggccccggttacgcggccggagcatcggcgcatagttgtcacgggttttcaccggtgttcatggtctcatgacccggcggctcgcattgtggactatcgcaaggattcggggacgaatcgcgcacaagcctcggtcagacggcgctgcgcttcggaattcagctcaagaccggcaatcgccttacgggactcaccccatagggcagcgatgcgctcgcgggatcgatcaagagcaccggtcgacgtgaacagttcaatggtgcgggctacctggtcgtcgttgcgacaatccgcttcgaagatggcaatcagatcggccttatcctccgtatctgccgcagacagagcatcagccaacagcactgtgcgtttgccttctcgaatgtctccgccaacgggtttcccggtattgcggcttgatccgacgacatccaacaggtcatcggccagttggaacgccagtccgagcggccggcctacggccaacgcgcaatgcctggcctgatccgggctctctcctgcggccagcagtgcaagcagcagtggggcgatggtggtgtaactggctgtcttccagcggaatacgttcaatgaggcgttcgccagagcttcgggatcagacaacggggtcatctcgacggccaagtccagtatctggccgatctccacctcgcgctgcatggtaagaaacgcctcgttcaaggcatcggtgttgggaagacggctggcggaccggtgtgtgatttcaatgcaggcggtggccagaatatcgccaagcatcaggcccaagccacggcctatggcaccgctgtgtacggcctgttccaaggcacggtgtgcggaaggcttgccccggcgcagatcggattcgtcgatgatgtcgtcatgcaccagtgcggccgtctgaaacacttcaatggcacaggctaggtcgatcatggcgtcacgccgatcaggagtcacgtcgccggcaagaatatcgaaggcgtccaatgcgagcaacgcacgcagtcgtttgcctccttggctggaggaggcggcttggcccacaacctgttccatcaccggtttcagggcgtcggcaacctcgtcggtggcgggggcggcagtcagttcccgcaccaactgaatgatgcgtggctcgatgatttcgcggttgttagcagttgtgcacatgcctaataacttatccacagggtctgaagaacacaagaacgttgggaatcaagggttttgaagctagaaccacaatggtcgttttttcctgcgtcatacggcgttttcagccatagtgggcacacaccccctcggcgcatgagctatccggctcggcgcgcaccacaacaccaatagattgcacaccattagtcaaggaggacatgatgaacaacaacacgccgcacaagccgcgtaagagccgacacgccaaacggcacgccgccgagcagacggagccctttggctttgatgagttggagacgagatcacaggaatttcgcaatgatcgccgacttcgaggcgcgcaacaggctaatgccgactgggtggccgaaccattggatgaatggctgtcttgtctcgatgccgggaacaccgacctaggccgagagacgatggccgcgtttgcggtgggcatgcgtgagaccttatcgattcgtgatgcgcttattctctcgttggttattgatgaaagccgttgccccaagtcatggctcatggaattcgcggcgcgaccgcatctggcacgtacgagaacacgaatgggcgagctgctgacctgcgcattcgaggatgaaggcatgatgccggataaggagcgttgccatgccggcatcggtatgttgctcgatatcgcggaagcctcaccggtgccgtactgcatacaaccattggccgtaatcgcctacaccttatggtggctgggcgatccgcgagcaatggtgttcgccttgcgatgcctgctgctcgatgaggattgttcgctggcggcgatgatattctcagccgccgatcgaggcgtggcaccggcatggtgctcgggctgaatgaacagaaacggcggatttccgaggttttatgcgcgatgcgcggaaggaaagcgtgtggtgatcggcaacacgtcgggcaacgatgtgggaataatcgtccgtggagggtggtttactcacatagttgacgatttgcccttgccagaagtgggcccgtgtggtatatgcacttcacggcgagagatctgaaggagcagttttggccacgaaggaaacgacggcaaccaagcagacagccgagtccagcgaggagaccgagaccaagaagaaggccagctctacgaccaccgcgcgcaagacttctgccaagaagtccaagtccgcagagccctcgaaaaagaccacgcgcaagtccgccgcgaagaaaaccgcgaagaaggccaaggacgatgagctcgtcaaagacgaggacactcaggtcgatgacgagcttgatgacgatgccgaggtcaacgacgacgatttggacgttgacgatctcgacgaggatcttgacgacgttgacgaagacgatgccgacgacgaagacctcgatgaggacgatgccgacgacgacgatgtggaagacgacgaggacgaggaagaagccaagtccaaggcacccgagcagcccaaggaaaagggtgcctacgtggtctccgacacggatgatgaggaagagaacatcatcccttcgggcaatccgaagcgtcgtgtaatcgcggccggcgcaaccgccgacccggtcaaggactacctgaagcagatcggccgtgtgagcctgctgaacgccgaacaggaagttgacctgtccgagcgcatcgaggccggcctgtacgcccagcacctgctcgacaccgaaagtgaaggcatggagttcaagcgcaagcgtgaactcaagtgggccgccgccgacggcaagaaggctaaggaccatctgctggaagccaacctgcgacttgtggtctcgctcgccaagcgttacacgggtcgtggcatgctcttccttgatttgatccaggaaggcaaccttggtctgattcgtgccgtcgagaagttcgattggaagaagggcttcaagttctccacctacgccacgtggtggattcgtcaggccatcacccgtgccatggctgatcaggcccgcaccattcgcgtgcctgtgcacatggttgaagtgattaacaagctgtcccgtgtacagcgccagatgctgcaggatctggggcgtgaacctacgccggacgagctggcccgcgagctggacatgccggttgagaaggtgcaggaagtgcagaagtacggccgcgaaccgatttccctgcacaccccgcttggcgaggatggcgattctgagttcggcgaccttattgaggataccgacgccatcgctccgtccgacgccgtggccttctccctgctgcaggaacagttcaagcaggtgctggaaactctgtctccgcgtgaggccggcgtcatcaagatgcgctatggccttgaagacggccagccgaagacgctggacgacatcggccgtgtgtatggcgtgacccgtgaacgcatccgtcagatcgagtccaagaccatgtccaagctgcgccacccgtcccgttcgcagaccctgcgcgacttcctggatcaatgacggtcggcccgcttagtaggccgaccgcgcgaggagtttgacagcccagtgggctgtcagacgacggagccatccgttgaaggctcccctgaagaggggagccaaattattagaaaataggactgtatgcccaaagaagaatacggcgccaaggacctagctgttcttgagggcttggatgcggtgcgcaagcgtccgggcatgtacatcggcaccaccgactcgcagggtcttatgcactgcctgtgggagatcatcgataactccgtggatgaggccttggccggcttctgcaacgatatcgtggtcaccctgcacaccgacggttccgtggaagtcgcggacaatggccgaggcattccggtggataaggaaccgaaaaccggcctgtccggcgtggaggtcgtactgaccaaactgcatgccggtgccaagttcggcaactcgtcttataacgccgtcggtggcctgcacggcgtgggctcctccgtggtcaatgccctgagctcccgactggacgtcgaagtggatcgtgacggcaagacgcaccacatgaccttccaccaaggtcaccctggcgtatacacggatgccgacccggccaatccgtctcccgattccccgttcaagcgcactcgcaagaaccgacccaccgagctggaaatcatcggcaaggtatctcccaaaaccactggtacccgtattcgctactggtatgatccggagattttcaacaaaaccgccgaattctcatacgaacagctcatcgaccgcgtgcgccagaccagcttcctggtgcccggactcaaaatcaccattgttgacgaaaacgtaccggaaacggcgactgacaccgccgaagccattgatgccgacgcagtcgaacctgcgcaagaccaggccccggctttggacgtctcgttcaacgatgccgaactcttcgacgactccaccgaggctcaagccgacagtaccgagagcctgtccgaggaggacttctcgctgacggccggcgaccaggtcgtcgatggcgcgttcggcgagcagcccgcgcacccgcgcgtcgtggaattcctgcacaccggcggcgtcaaggacttcgtcgacttcctatccaaaggcgagccgatctccgacatctggcgcatccaaggcgagggcacctataaggaggagacccagaccgtgggcgaaggcggtgaactgcacgcccaggaaatcgaacgcacctgcggcgtggacatcgccctgcgatgggtcaacggctacgacaccacaatcatgagcttcgtgaacatcgtggagacgcccggcggcggtactcacgtggacggtttcatgaacgccatcaccaagcagattcgcaaggcggtggaagacaacgcccgcaagctcaaggtgaacatgaaggactccgccatgaaggtggagcgcgacgacatccaagccggactcgtggccgtggtcaccgcacgcgtggccgaacctcagttccaaggccagaccaaggacgtgcttggcaccgcgcaggtcaagccgatcgtcacccggctcaccgacaagcaattcggcgagatgatcaccggctccaaacgcggatacaaggaacaatccggccgcgtgctggagaagatcgtcggcgaaatgcacgcacgcatccagtcgcgcaaggccaaggaggtcacgcgccgcaagaacgcgctcgaatccgcctcgatgccggccaaactctccgactgccagccgggcaatgacgacgtggccgaactgttcatcgtcgagggtgattccgcactcggtaccgccaaggccgcccgcaacgccggtttccaagcgctgctgccgattcgaggcaagattctgaacgtgcagaaggcgtcgattacgcagatgctctccaacaaggaatgcgcagccatcatccaggtggtgggcgccggctccggccagagctttgacatcgaacagtcgcgctaccacaagatcatcatgatgaccgatgccgatgtggacggcgcgcacatccgtatcctgttgctgacgctgttctaccggtacatgcggccgcttatcgaacacggctacgtgtatgccgcagtaccgccgctgcaccgcatcgcgttgaccggctcgcacaagggcgaatacatctacacgtattccgatgacgagctggccggcaaactggccgacctcgacaagaagcacatcggttacaacgacgacatccagcgatacaagggtctgggcgagatggatgccgaccagctggcggacaccaccatggacccgcgcacgcgtatgctgcgccgcatccgcatggaggacgccgcccaggcatccgagatcttcagcctgctgatgggcgacgacgtgccgccgcgcaagcagttcatcgtcgacaacgccgacgatttcgaccgctccaagatcgatacctgatcgaagacgtcgctgataatgacatcgtgcttaccgagaatttccgtaattggcgtttgaggtgagcacgttgtcatatgttttatgcgtgttgcccatgagtcattcgatagactgatgacatcgttatcacaaccggtgccgtactgtgaatgggagatggaacatggccagtctgttgcttgccgtcatctatgtggcgtttatcagtctggggttgccggattcgctactcgggtccgcatggcccaccatgagccaggatctgaacgtgccggtggcgtgggctggcggcatctccgcggtgatttccatgttcacgattgtctcggcgctgctttcggaccgaatgacattgaaattcggggcaggcaaggtcaccgccgtttcggtggcgttgactgcggcggccttggcaggtttctccgttgccccgaattactgggtgctgttggccatcgccataccgtacggccttggcgcgggtggcgtggatgcggcgctcaataactacgtagccattcactacgaaagccggcatatgagctggctgcactgcatgtggggcgtcggcgcatcggtcggcccctacatcatgggctatgcgctgtctcaagggcaaggctggccgtggggctatcggtacatcgcgatcctgcaggtgatgctgaccgtcatcctggtgctgagcctgccgctgtggaagaaacgtggcacgaccgggggcggcgaatcgaccgatggtgccgcatcatctgacggcaatgccgagggatgtggtaatgctgaaggggcgtctgttgctgaacgcaaaccgctcggcgtggccggcgtgctcgccattcgcggtgccaaggaaatcctcgtgatgttcttctgctactgcgccatcgaatccacggcgggtctgtgggcctccagctacatggtgatgcacagcggcatcgacaagatcaccgccgccagctgggccagcctattctatgtaggcatcaccgtggggcgtgcgctttccggctttctgaccatgcgattcaaggacccggtcatgattcgcctcggccaagtgctggtgctcgccggcatcctcaccatgttcgtgccattgcctcaccaccttggcgtggtcgttgggctggtggtcatcggcttcgggtgcgcgccgatttatccatgcgtcatccactcgacgccggcctacttcggcgaagacaaatcgcaggccgtcgtcggcgtgcagatggcctgtgcctatgtgggctcactgctcatgccgccactgttcggcatcatcgcgcaatatgtgacaatcagtctctacccgtggtatttgctggtgctcttggtgctgatggtggccatgcacgagcgtcttcgtaagttgcgcggctgatcatgcgcgcatttgggcccgccgcctactatgcttggagcccatggtgataagtgaagaagaacataaacagatgcccgagcccgtacgggaacgattggaagcgctgaaggatgcgccgggctcggtaatcgtggtcggctcgatgaacgccgattacaccgtgaccaccaaacgactgcccaagccaggcgaaaccgtcaatggtggtgccatgaaagtgttgccgggcggcaaaggcgcgaatcaggcgtctgccgctgctcgcctcggtgtcaatgtccagttgctgggcgcggtgggcgaggactccaacgcggacttcctattaggcaagctggatgaggccggcgtcgacaccgccgatatcctgcacgttgaaggccccagcggcaccacggtaatcaccgtgagcgctgagggcgagaataccatcgtctattcgccgggttccaatgccaaggcaagtgccggctatgtgcaatcacatcgcacgaccatcgccgaatgcgcggtattgggactgtgtttggagagcccgatctccaccgttatcgccgccgcacagaccgcgcatgacgctggcgtgaccatgctgctcaacgactcgccatttatggacgagctgcctcacgaactggtggaagccacggatattctgctggtcaaccagcatgaagtggctcagttactgggtctgccggacggcgatgtggaatcactcgactggtatgaggtcgccgaacgattcaccgattacggattcgaccgggcgatagtgacgcttggtgcgtcggggtcggtggtgatcgagaacggacgttggcatcgcgtatccgccgcgcaagtcaatgcggtggacaccaccggttgcggcgactcgttcatgggaactgtgctggctggcttggccgctggccatacgctgctgcaatccgcgcaaatcggctcctatgtctccgcctatgcggccaccaagcttggtgcccaaagcgcctacggcaccgccgaagaagtcatcgcctacttcagctgacctataatcgtacatatgtacgaaaccctgagcctgttttccgaacccaccaaggtgtggttcgagcatgccttcggtcagccgaccgaggcacaggctcaggcatggccggcaatccattccggtcgtaatgtcttggtcatcgcacctaccggctccggcaaaacattggctgcgtttctctcggccattgaccggctgatgaccgtgccacgcacgcggcgtgccggtgtgcgtgtgctgtatatctcgccgttaaaggcgctcgcggccgatgtggccaagaacctagaacagcctttggagggcattgccgcacaatgcgaggcgcaagggctgcccgtgccgaagatcgcggtcgtcactcgttcaggcgacaccaccgcacaggagcggcggcgcatagcctcccatccaccggatatcctcgttaccacgccagaatcgttgtatctgttgctcacttcgaaggcagggcggattctcggcactgtcgatacggtgatcgtcgatgagattcatgcagtggcgggcaccaagcgcggcgcacatctggcggtaagtctggaacggctggagaaccttgtcgcggaatcgcgcaagcgagatgcaatcgatgcggatgctgatgagggcagtgataccgccatcgatgctggcctcagtgaccttcatatgcagcgcattggtctatccgctacggtgaatccgcctgaagaggcggcgcgattcctgggcggcggacaaccggttaccatcgtgaatcccggtgggcggcctgcaatggatctgcgcatgattgagccgttggaaaacatgcgtgatttgcagtccgtgaatgccaagcagcgtgtcggtggcgtggaggctgaacggtccgctccgcatatcagcggtgtcacgccggccatgcagcgacttgccgaacgcaggggcattgtgccggtggatgatagagatgtttcttccacttctggggacgattctgatgcgagtgatgcgttcgattcctccgcgttggttggagcggcgggcgaccgtacctccggttccatctggcccgtggtggaacgcagtattttggatgagattctcgcgcaccgcaccacattggtgttcgtcaattcgcgtggtgtggccgaaaagctcaccgcgcgcctcaatgatctctatgcgcagacccggcatggcaccaatcccgacactgtgcgtgatccgggctctccggaaggccgcgaagggttctccacacattacgatgctgtggtcggttccaccaccatgcttgtcggctcgcatgagggcgatgatgtcatcgccatggctcatcatgggtcggtctccaaagaccgtcgcaaaatgattgaggaacggctcaagcgtggtgaattgcgctgcgtggtggccacctccagtttggagctaggcattgatatgggctcggtcgacttgatgattcaagtcgatacaccgttgtcggtctcctccggattgcagcgtgtaggtcgtgccgatcatcaggtcggtggcgtctctcacgcattgttctacccgctcacccgtcagcaaatcgtcacgggggccgcaagtctggaagccatgattgccggcgatatagaaccattggccgtgccgcgcaatccgctcgatattcttgcccagcagaccgtggccgctgcctcgatgcacgatttgaacgctgatgactggtatgccacggtgcgccgtgctgcgccgtttgccgaactgccacgtgacatgttcgatgcggcaatcggcatgatgtccggcgaatacaacagcgaggaattctcggccttccggccgcgactggtatggaatcaggataatggcctgatttccgcccgtcccggttcgcagaaagtggccgttacctctggcggtacgattcccgatcgagggctgtacaccgtggtcctgcctgaggcggacgccggcaaaggccagcgtcgcgtcggcgagttggatgaggagatggtctacgaatcgcgcgtgggcgatgtcattacgctcggcacctccacatggcagattcaggaaatcacccgtgatcgtgtggtcgtgactccggctccgggccgcaccgcccgtctgccgttctggcacggtgaaggcgctggccgtgactacggtttcagccgtaccatagcccgcttcacccgagaaatcgccgccggattagacgtgaagcggactggggggagttctgccgcagaaggtccagctgtcccaaccttcatcccaacaatcctcacccgtctccaccgagacggcctagaccccaacgctatcaccaacctggcccgcctactctccgagcaacaagccatcaccggcacagttcccagcgaccaaaccctcatcgtggaacggacccgcgatgaagacggcggctggcgcatcgtactgttaagccccttcggccgccgcgttcacgaaccgtggtccatggccatcagccgcagactgcgccaacgctacggtttcgatgggcaggtatatgccgccgatgacggtatcgtcattcagctaccggacggtgacggacatattcctgctcaagacctgttccttttcgacccagaagacctcaaagcagatgtagaacgtcaagtgggcgagtccgtgctattcgccgcacgattccgcgaatgcgccgcccgatcactgttcatgccgcgatccgatccgggccgtcgcgtgcccctatggcagcagcgactgcgcgccgcacagctcctgcaagccgcacgtatggtcaagaacttcccgctgctgctggaaaccgcgcgcgaatgtttgcaagacgtatacgacatgcccgccctgaacgaggtgatgaccggattgcaagccggcaccattaccgtgaaggacgtggagaccgagccgccatcgccttttgccgagaacattctctttggcttcgtcggcgtggtgatgtaccagtatgaccaacctcaggccgagcgcagcgcgcaactgttgtctctcgatccgcacgtgctcgaacgcttgctcggcaccaccgacatggcacaagtgctcaacccggacgtgattcgcggagtcgaacaggaactgggggagcgcactttctggaatgaacttgccgacgatgatgtgactggtcgcgtgacccgttacgccaaaacccatggtcctttcaccgccgatcagctcatggacgatctgcacctcgatgctacggatgccgtgcatactttggatgtactggctgccaaaggcgagttgctgcaaggccactttgtagatgatgacaagcaaggccaacagtggctccataaggacgtattccgccgcattcggtctcgctcattggccaaggcgcgtaaagcagtcaagccagtagaaccagaggcgttccagatgtttcttatcgaccgacaaggtatcgggccggtcggcggcgaacgatatgaaggtgccgacgggctcatgcgcgttatcgagcagctggagggcatagcactgcccactgcactctgggagtcggcggtattccccgcacgagtacgagactaccaacctgcattgctggatgagttgctgaccagcggcgatgtggtctgggtcggctcaaaaaccgggggaaccagtgcgatggaccccggtgaggttgctttctatccggcggattcaatattgctcagcggtgtggaacatggtacgacatcgaacgcttcagacgccaccatgccggaagcgattctgaccgcattggactcagggggagcgttccatgcccgtcaactggtggatgccgccaaacgtgtgtggaatgaggccgcggagccggacatcaatccaaacaccggtgaaatcattccgcaagagtggagcgaacagcagttcaaggatgccttgtggagcttggtctggcaaggtaaggtcaccaattccagcttcgcgccggtacgtgcattaaccgcaggcgcagcaagcccgcgtaaatccactacatcacgtcgtcgtgggcgtgtcgctccgattcaccgagccactacggatatgacgttaggaggtttgtggtctgccgtaatcgggcaagctgaagccgaagacactgatcagaccgagcaggcgctcgcactggtcgagacgttgctggacaggtatggcgtcatcgcgcagccggtgatcgacaaggaaaatatcccgggtggctactcagcgttgtatccgatattgcagcgcatggaggagcatggtcgactggtacgaggcatgttcgtccgtggtttcggcgcggcccaatttgccgagcgcgacaccgtggatgcgttgcgtcatccgtcagagcctcgcggccagtccgtggtggcattgagtgtgctcgaccccgcaaatctcagtggctccgccatcgcgtggccggacgcgcctgccggtgcgggtaaaccggcacgccgtatcggagccacggtcgtgctcaatgcgcaaggtgcgctactatacgcggctgccaaagccaagcacttgacggcgttcgatcaatcggtcggccatgaacccgccgccaatgattccgacgaacaaatgcgcaaggccgccacagaactggcctacgctctcaaacgcaatggcaccggttccgtgacattcagcgacatcaatggcgaacccctcaacgcccgtcaccccttcgcccgcatcctccaccagtccggcttcacccccgttccccgaggcatgcggctgtactgattgagcccagctatcgaatgcggtagttggagccgcgttgggtcatgatgaggccggcgtgggtgagcttcttatccagtgtgtagagggcgttcctgaggagcccttgttgctcgaagaatgggccaccgacgagcttgaccaattcgctggtgttgacaaactggccatcagccttgaccagtgcttcaagcaaactgtattccagacgggacagtgaaattgcggtgtgtgtggatgcgtagtaggctttgcgattcgtggtatccaacgtgagattgccacgaatgatcatggtgggggagtcggtggcaagcgagccgacgtatgagagcagttcgccatcggagaatggtttgctcagtacggcatccgggtgtcgtacattagctcgtgcgctagcggcagcattgtccgtgcactgttcggcttcggcatctgagttgtttgcgtgtgaatccgcgctgaaggagctgtagggcgtctcttcgatcggggcgtactcgtcaggcagcgctcgccagcggctgccttcgccgatggttttgctgagtggcgtcgaagtcagcagcaggattttaacggaggcacgggcattgtgaagggattcgatgagttgctcggtggagatgccgagcagggattcatcgagaatcactgcgtcaaatagctccttggtgaccgcggcgagcgcgatactgccggtgcttgccaaggacacctcatgacgacaggcaagcagcgcaccacgaatggcgcgggccaacggttcattggatacggcaaccagtagtctcatcgccacctccttgatgcttagtgtaggtcgggtttagggtctcttctctatgtgtttggctcactatcgttcgctcctcgcctacaaacaccccactgagggtgtttgctttacggctcggcccatcagagggagcttaattgaggttacgcaatgaaggcgatgggggaggcgaggtccactccggagccgtctcggcgcatatcgggcttgggaagctcgaccggggagcctgcggatgtggaggcatgcaacgggtagagaccaacccaggcaagaatcagcgtgttctggcccttgaggaagcgctgggagcgtacgccaccggtagcgcggcccttggtggggtacatttccagcggggtgaccttggcggcgccgttttcggtgccgggtagtgcatcggagtcgccggccacggtgagcaccaccgcgccggagccggaagtcaaaccgttctcgccctcctcataggtccatgccaccttgccggcgggaaccacgttgaatgccgccacacgggcgccctcggccagcttgatgccggccataccgcccgcggtgcgaccctgcgggcgcacgttcttcgcctcaaaggtcagtagcgaggaatcggaggagatgaacaccagacggtcgtcatcctcggccacggcggcgaataccacttcgtcgccatctttcagatcaatgacgggccaggaatccatggtggtgggtgcctcacggttccaacgcttgatgacaccgttacgggtaccgatagccagcgacggcaacggcttggcctcggcggcaccattctcgctctcgtcctcggcactggccttgccggacgtcggctgctccatggcgatcgccgtaatcacgcgctcgccacgaatcggatcggtggattcggtcatgccgatcagttcgtcggcttggaccccacccttcagcgacaacgtggcagaagcaggtagcgccggcaaatcaaccacatgcgcgagcaccaggcggccggctgacgtgaccagcccgtacgtggcgcgcgtggaggtctcgaagattgtggtgatttgatcgtctcgcagacgttcatcggatgtggaccgtacattgaacacgtccatcgcgcttggcgtggtacgggcaatcaaaccggtggcgctcatcatcaccacgcacggctcgtcttcgatcttcaaggctccggtcagcgcggaccgctcgccggtcttcttggcggcggctgcggctgcggccacatcggcttcggcggaggaaatcgtggtggcggccttcactgcttcgagtgcggacttggacacacccgaagccccggcgccctgcgccacgaccggcgtcagcgtgccatccgggtcggcgtccagcagcacggtgcgacgcggcgagccccacttggcgaccgcctcgtccatctcgtcggtgaccacctggtcgagcgcttcggcggaggccagaatgcgggtcagctcctcgatgcgcttcttcaggtcatcgcgttcggcctcaagttcgatgcggttcatcttggtcagacggcgcagacgcaggtcgaggatgtactgggcctggacctcgtccaggtcgaacacaaccatcaaacggcttttcgcggcatccgcatcatctgaggtgcggattacctggatcacctcgtcgatgtccagcatggccagcagcaggccctcgaccaggtgcaggcgctccaacgccttcttcttgcgatattcgctgcgacggcggatcaccacacggcggtggtcaacccacacctgaagcatctccttcaggcccatcgtgtgcgggcggccctccaccagcgccacgttgttcatggcaaaattgtcctgcaacggcgtgtgcttgaacagctgcaccagcaccgcatgcgggtcgaaaccggtcttgatctcgatgacgatacgcgtgccgttatgacgatcggtcagatcgaacgcgccggaaatcccctccagcttgcggttcttcacgccgtcggaaatacgctcgatcaccttctccgggcccaccatgtacggcagctcggtgaccacgatggcctgcttgcgggccgtgacatgttcgatatgcgtggcggcgcgcgtggtgagcgtgccacggccgttggcataggcctcacggatgccgtcgcggccgatgatcgtgccgccggtgggccagtcggggccgggcacgtaacgcatcagttgttccagggtggcgtccgaatgcgccatgaggaacttggcggcgttcaccacctcgcccagattgtgggtggccaggttcgtggccatgcccacggcgatgcccgagccgccgttgaccagcagatttgggatggcggccggcagcacggtcggttccttgagcttgttgtcatagttcggcgtgaagtcgacggtgtcctcatcgatatccgcgttcatgccgagggccgccgggccaagcctggcctcggtgtaacgggaggccgcagggccgtcatccagcgagccgaagttgccgtggccgtctaccagcggcagacgcatcgcgaacggctgtgccagacgcaccatggcctcgtagatcgcggaatcgccgtgcggatggagcttgcccatcacctcgcccaccacgcgggcggacttcatatacgggcggtcgggagtcaggttcatctcgcccatctggtagacgatacggcgctgcaccggcttcaagccatcgcgcgcatcgggcagtgcgcgtgcgtaaatcaccgaatacgcatactcgaggaaggatttgctcatctcctcgttcagcggcgtctcgacgatatgctccttgaccgtgcgcggatcgtaggtttgcgcggacggtttgcggtgtgatgccatgaaactccctttcgaacgcccccatattagcgggagggcgcgaaacagtgcgcagagaacggttctcgataacaactgtgcgctggtttcggtgcgccaatcgcacatgtttgccgataaaatggcgtgattccagcgtttcagtcgatgtgcgtttgtttgattatgtgcgttggggcgcacagttgttattgagaaccgttctctgcgcactgagccaaggggaggggtgctacttgaatgggcaactatgagtgttgagacgccggatatggacgagttgctgcggctggtgcccactgtgggctatggggatgacgccccggccgatcggcgtgggggagcactgcacctgtccgccgtgctgcccgccttgtccgccgcgattgggcatccgactcccaccaaggtccacgccgatcccaaggcctgccagcgcgcgttgggactgcccgacgccgaatcggccatcgtggtgctcgtggacggcctgggcttctggaacctcgccatgcgcctcggacacgcgccctatctgcgttcgctgatgaacgaacgcgccaatcagcgtcccatcgccacctgcgctccaagcaccactgtggcggccatggccgcattcggtaccggaacctgcccgggactgaccgcaatggcgggctatacgcagctcgaacccgccagccataagctcatccaactcatccagttcaaagacgcgctggcacccaaaccagccaatccgcacattcctgtgccacccatggtcgatccgctcgaccagcagcgcgaggagacggtgttcgagaaacttgcggctcaagaggtgcgcgtcacaagctcggggttgcccaagttctccaaatcgccattgaccgaagccgcattgcgaggcaccgactatcaaggcaacgtcaccccacgcgatcgtgtgctggccgcctcacgtgcctcccgtacccccggcctgacctacctgtacatccgtgacgccgacaaagtcggccacaattacgggtgggattccgaacactgggtggccgcattcgaacatatcgacgcccagctcgcgctcctgaaacgcagcgcacccaaaggcacgctgatcgtcatcgtagccgaccacggcatggtgcaaaccgacatgggccagcggattgacatcgccgttgaaccgcagctcacccgaggcgtgtcactggtcgggggagagccgcgctcgctgatgctgtatgccgagccggatgaacgacctgaggatatagcttgccggtggcgcgattacctgcaagaccgagccttggtgcggaccagggatgaggccatcgcggacggattgtttggaccggtctgcgagcgagtccggccgatgctcggcgatgtggtcgtgcaggcagcgggagccgtgaccctcgtcgattcgcgtacgcaaggagacaaagccacccacctgccgagcgtgcatggctcccaaacggcattggaaatggatattccctgcctgatcgatatggcctgattcggaaattcagtctccgaacagaatctcgtcccagcttggtacggccgaacgtcctgatttacgcttggccggtttggctggtgcctcgtgtttggtggcggcggattcggccgcccgctcctgctcggtggctaccagctgtgcattggggccacgccgtacggtctcgtccgaaatattgtcagaaccctgctctggtgccgtggcaggcgattgctgcaatcctgcggcagatgacgaaacaggtccggcggtctgcgaagagaccgggctgggggccgtagcgtcatgagcctggttcgtggccggtgagatggacgtggataggtccaccgggggcatggaacctgtggaagtgacggagggccggatcgcggcaggccgtgcggccggaatcgaaggcgtaggcgccgcccaagcagacacggcgcgctcgatacgcgcggaacgtacggagtcgccgggcagttcaggaatcgtcggcttgagtttggaatccgtggctgattccggattctgttcgccgagcagttttcgagcggcattgttcaggctcatcacggaattgtcgtgcatattccacgtccattcggcatggatctcacggcccgcggaagtgaatatcgccacgatgcgccaaggctcaagtccgcgccgggtggatttccaggtcactgattccatgccgattccagcagaggccagcgtgcgttccaccagttcgctgatggtgcgcaccctgctgtctttgggtgccgccacggcaaggaattgttcgatggcgtactgtttctcggtctccacggccatggagaaacgacgtaccagcgtttcgctcagatgatatttctccgcgacacgggccggatcggcaccggcgcgaatcagcgactgtatctgggaaatcggcaaagtggactgctgatgcggctggggggcctgtcgcatctcgcttctgacctgcttggcctcaagaatcgcccgttcgagcgtgtcgtccacgctcacggccatttccctgccgccaatggagaatacgaggtcccccgtcttgctcacgcgtacgaaacgggctttttcaagccgatcatctggcatattcgcaccactttccgtcgcaaagacattacttcttttaagtatgccccacgtgtcgaactttacgagtatttcaaatcgtgtatcctatgggcgagtacggcgctgaccgtgctatatatatcgacttacgaaccaaagacgacgaaaggaccatgatggctcaggattatgattccccccgcaataaggatgaggacgaggaatcgctgcaggcgctggggaagtcctcgcagaacgcctcgagcgacatcgacgacgatgagaacgccatcgccgaagactacgaactgccgggcgccgatttgagcaacgaggattcctcggtgaccgtcatccccatgcagggtgacgagttcatctgctcgcagtgcttcctggtcaagcatcgcagccagctcgcctacacggacgaggatggccagccggtgtgtgaggagtgcgccgcctgatggcgttcgacgagacctacaacgagcccgaatccaccgaggtcctggtcaagagcctcgaccccgaacatccggcccagctgcactatgcccacgcgggcgatgctggtgccgacctcatcaccaccgtcgatgtgacgctgaagccttttgaacgggtactggtgcccaccggcgtggccatcgccctacctgcgggctacgtggcgttggtgcatccgcgttccgggctggccgccaagcagggcgtcaccgtgctcaacgcgcctggcaccgttgatgccggctaccgtggcgagatcaaggtgccgctgattaacctcgatccggaacgcaccgccgtcttccatccgggcgatcgcatcgctcaattggtgattcagcggtatgttgaggcccggttcatcccggctgaaaccctgcccggatccgatcgcgccgaacgtgggttcggttcgacgggagtggcgtcctgaccggattgggccggttgaatgaccaaggtgatgacggcaacgacggttgcggaaccaatgatggcgaacaggtgcatgcataaggctccggttcgcggttacaatgaacttcatgacgagggaggtgactggcatggcagagattgatggcgagcagtacgccgcccgtaagttgggttgtgagatcagtgccgatccgctcaatccgctggatccaatcaagaaagtgtgcaagtcccaccatcccggtgaggatttgtccatcctcgaccgcgcgtaccggcgcgccgtcatccagcattgcacgcaacggcgcaagtcgggcgaaccatacatcatccatccgttggccgtttcccagattctcgcggatctgggcatggggccgattgtggtggcggccggtctgctgcatgatacggtggaggacaccgactacacgttggatcaatgccgtgccgaattcggcgacaccgtggccggtctggtcgatggcgtcaccaagctcagccagcttgaagtgggcgactccgcccaagccgaaaccattcgcaaacttgtggtggccatgagccgcgacgtgcgcaccttggtggtcaagctcgccgaccgtgtacacaacgcccgcacctggcgctatgtgaagaccacgtccgcccagaagaaggcgcgtgaaaccctcgacgtgtacgcgcctttggccaaccgactcggtatgaacgccatcaagacggagctcgaggaactgagcttcaaggtgctctacccgaagatctacaacgagatcgtggtgctggtggctcgccgagccggccagcgcgatgtgtacctgaagcagattctggcggagatcaacgaggatctcgacgagcagaacatcaaggcatacgtcaccggacgcccgaaggactacttctcgatttatcagaagatgatcgtgcgcggccatgatttcgcgaacatctacgatttggtcggtgtgcgcatcatcgtcgacaccattcaggattgctatgcggcgcttggtgccgtgcatgcgcggtggaacccggttcccggccggttcaaggactacatcgccatgccgaagctcaacatgtaccagtcgctgcacaccacggtggtgggccccggtggcaagccggtggaaatccagattcgcacctgggacatgcaccgccgcgccgagttcggcatcgccgcgcactggaaatacaaggaaaacggccaggccggccgcgccctgagctcgccggacaagtccgaccgcaggcgtgacgagaagaaccaggagctttccgaagccgacaatctcaaatggattcagcagcttgccgattggaccagcgaaacccccgactccaacgagtttctgggttcgctcaaggaggatctcggctcgtccgaagtctacgtgttcacgccgaaaggcaagatcgtatccctgcccgctcatgccacgcccgtcgacttcgcgtatgccgtgcacaccgaagtgggtcatcgcacgatgggcgcacgtgtcaacggacgtttggtgccgcttgacaccacgctcgacaacggcgacaccgtggagatcctgacttccaagtccgatactgccggtccttcgcgcgactggctgagcttcgtcaagagcccgaaggcacgaaacaagatccgccagtggttctcgaaggaacgtcgtaccgaggctattgaggaaggccgcgacgaactgacccgcgctatgcgcaaacgtaacttgccggtcaatgcgctgctgaccaccgaggcattgatcggtgtggccgacgacctcaatttcccgaacgccgacgctgtgttcgccgccatcggtgatgggcagatctccacgcagaacgtcatctcgcatctggtcaaggatgccggggccgacgaggtcgatgaggaggtcgagcaggaggctctgccgctcaagcccgtggagcgcaagacttccagcagctccaccggggtatccgtcaagggcgtgggcgatgtgtggatcaagctggcccgttgctgcatgccggtgcccggtgacaatatcatcggcttcatcacccgtaatcagggcgtatccgtgcaccgcaccgactgccagaacatgatcgatctgaaaaacaagcagcctgagcgtgtggtcgaagtcgaatggaccagcaccaagggcctgttcatggtcaagattcaggtcgaggcgctggatcgacgaaacctgctttcggacgtgacacgtgtgctttccgaccatggcgtgaacatcatttccggtacgatcgccaccggttccgatcgcgtggccaccagccagttcagcttcgaaatggccgatccgcagcatctcaactcgttgctggcagccgtgcgcaagattgatggcgtgttcgacgtgtaccgcatcaccggtgccaaggaatccgccgaacctcgactgcgcaagatgaagtagggatgtgggtggcatacggcggggccccggtccgaatcgtcggatcggggccccgccttgtggcacttgtggcatgaaggtgtgggcggtttttaccgcttcacttcgatggagaggattcctgcgggctcgagcgggcggtcagatgaatcggtgtccagtgcttcgagcttgtcgacgaccttcttggaggcgtcgtcggcgacttcgccgaagatggtgtgatggccgttgagccaaggggtcggcacggtggtgatgaagaactgcgagccgttggtcccgtggactttgccgtccatgccacggcggagcccggcattggccatggccaacaggtacggcttgtcgaattgcaggccggggtcgatctcatcgtcgaattcgtagccgggtccgccggtgccggtgcccagcgggcagccgccctggatcatgaaatccttgatgatgcggtggaaggtcagaccgttgtagaagggttcatgggaaggctgtccggtgtacgggtcggcccattccttctcgccggtggcgaggcccaggaagttggccacggtgttcggggccttgtcgtcgaacaggttgatggtgatatcgccctcagaggtgcgcatgatgatggtagtcatggctccaagtgtctcatgggcttgagaccggggaagagacgtgattgcgggaatggcgcggagagctgggaatgggcgtgggcaatagccgggacaacatgccg

SEQ ID NO: 487 - DNA, 5219 bp, Unknown
  R48_24m  MAG No. k141_35535
ccacatacttcttggcgatgtaccatgcgtcatcgtccttcacaccggctttgatcaggccatcggccacacgccagcgggtttcggatcccggaacccattcctcggcgaaccgggccatgatcttgtcaagttcgtcaccgctcttgccgatcttgacaagagcttccttggctgcggcggtcagatcaggcagttccttggagccgaggaaggtctcgtcgtcattgcccttgagctccacttcgtcgccggccaaagccttggcgaattcggaacgcttttcgtggtcgatgtccatgttgttggccaccaacgcttccttaacctgggtgccgatgcgccacaccgggttcaggttgctcatcggatcctgcgggacaagacccatcttgctgccacggagcttgtcgaagtccttctgcttgaagccggagatctcctgtccatcaagcttgatggagccgccgacaacatggccggttcccggaagcaggccaagcacggccatggcggaggtggacttgcctgaaccggattcgccgacgatggccacccactggccgggatacacgttgaaggacgagttgcgcacggcatgcacagccttgccttcatcggtggtgaagtcgacctgaaggttcttgacctccagcagcggcccgtgggcgcgctgcatggcctcgaggttgttctcggtattcatttcagtcatcgaattcctcacttactctcaggccgtacggctcttcggatcgagcgcgtccttgaccgcatcgcccatcatgatgaacgcgagaacggtgatcgccagcgccgcggacgggtagaacagcaccatcgggtcggtgcggagcatcgactgcgcgctggagatgtcgccgccccagctgacggtggtggtcggcagaccgatgccgaggaagctcagcgtggcctccgagacgatgtaggagccgagggatgtggtgcccacaacgatgatcggcgcgagggagttcggcagaatgtggcggaacaggttgcgcatcggcgtcgagcccaacgcggtggacgcggtgttgaattccagattcttcgattccagcacggcgcctcgcgcgatgcgcgcggtgccgacccagccgaacagggcgaggaccagaacgaccttccagatggaatcgttggtgcggaacatctgcagaacgacgatcgcgcccagcagcatcggcaacgccatgaagatatcgacgatgcggctcagaatcgcatccacccagccgccgaagaagccggcgatggcgccgatcagcgtgccgaccagcaccaccaacagcgtggacaggatgccgacgctcagcgaggtgcgcgtgccgtagaccacgcgggtgtacacgtcgcagccctgcacgtcgaatccgaacggatggcccgcggcggcgggctccaaggagttgtcgagcgtgcagtaattcggatcctgcttggtgaacacgcctgggaacaacgccacgaacacgatgaacaggatcaacaacccggaaatgatgaacagcgggtttctgcgcagcgtgcgccaagcatcggcccacatgctggtggcgggaacggagtcgtcgacgttgtcgacgctctgcaacggggtctcctcgatcggggcgacgtagcgttcctgcccgggaagggcggtcattgttttctcatcagtcatgatagttgcgactccttccctatcacgcgtaacggatgcgcggatcaagcgcggcatacagcagatcgaccaacaggttgcagaccacgaagatcagggtcagcaacgtgacgacggagaccacgacgttggcttcgcccttgaggatgctctggtaggtcaggaaaccgacgccatggatgttgaagatctgttccgtgatcatggcgccgcccatcagcgcgcccagatcctggccgaggtaggtgacgacgggaatcatcgaattgcgcagcacatggcgcagcatgacggacttattgctcatgcccttggcgcgtgcggtgcgcacgtaatcctcggagatgttggaggagatctcggaacgcgacaatcggatgatataggccatggaaacggagccgagcaccatagccggcatcagcagatcgaagaatcccggatcggcacctgcggtgaccggcaggatgcgccatttcacgccgaggaaatactggccgaggaagccggtgacgaacgtcggcacggaaatcagcagcaacgagacaatcagaatcacggaatcgtaccacttgcccttcttcaggccggcgatcacgccgaacaccacgccgaagatagcttcgaacacgaatgccatcagaccgagcctgatggtgaccgggaatgcgatcgtgatctcgtcaagcaccgactggccggagaatgtctggccgaaatcaagtgtcaacgcgttcttcaagaacaagagatactggatgatgaacggcttgtcgaggttgtactcggcgcgaatctgcatttcgacggcgtgattgacgggcttgtctccgaacatggccttgaccgggtctcccggaagagcaaagacaagagcgtacaccaacaatgtagtgccgagaaccactggaatcatctgcagaatgcggcgcagaagatatttgcccatttttggttgctccttttccatattccggttggccgccagtccgtactgacctgcgaatgaggcctcaccagaatcaaataccccgtaagtctaccgcatcggcagacttatgttgcgccaaactaaagaaatcctgagaatccgccattcaacggctgcgaaatcctctcgcgcggctggcggagaaccggaaaaaatagacaaaatcagtcgatgaaaccaaaaacctccgcatatgcgttccatgagcgcagcacatgctgaatgcattcggcgaattatctgagagcatccatcagcagggagcgtgcgcacagaatacgaaaaagggaaacagggtgtgccctgtttcccttgtcacagcgaagtgaatcctatgacggatcggaatccgccatcaacctcacttggtgagctcgttgtagaccggcaggttctgccaattcatctcgaagcccttcacgccggtcgcggccacgccgttggcgttggagtagtacagcgggaaggcaggaagctccttgagcagaatctcctgggcctgctggtagatcttgttggcctcatcggtgctcttcgcggcggaggcctcggagcacagcttgtcgaactcggcgttcttgtagtcgccgtcgttcgaaccgttgccgtcggcggccgcggaggagtacagctggtagaggtagttctccggggacgggtagtctggctgccatccagtgcggaaggcgccctggatggagcggttggtcacgtcgttacggaattcctggaaggtaggaatcgggttggtggccacgtcgatgcccagggtgttcttcacggagttcaccacggcgtcgtagatcgacttcgcaccgccgtcggcgttgtaggcgaaggtgagcttgccgtcgtagtgggagatggcctcggccttggcccacagttccttggccttcttcgggttgtacttcaggttctcgctgcccttgagggagtcggagtagcccggggtgagcggggaggtgaattcgacggccggggtgcccagaccgttgagcaccttcttgcagatggcgccgcggtcgatggccatggacagcgcctgacggcggagctggccttcctcggtgttggtctgccagtgttccagagatgccgggatggtgaaggtttggctcacggagccggccttgctgtacggctggacagaagagtcggacttgaaggtcttggaagcggaggtcggaacgctgttcatcacgtcgaggttgccggcctggatgtcggcgtatgcggcctcgtcatcggtgtagatcttgaaggtcacaccgtcgttcttcaccacttcgttgcccttgtaggcgttgttcttgacgagttcgatctgcttgttgtggctccaggacttgaacttgtacgggccgttgccgaccggcttctcgccgaaggccttcggatccttgtagaaggattccggcagcggggcgaaagcgctgtagccgaccttgatagcgaacacggagtcaggctggttcaggtcgacggtgaactcgtggtcgttgacgaccttgaggccttcgagctgctcgtcgcccttgaggttcttggcgtcctgcagcttgtcgaagcccttgatggtggagaagaacgaggagcacttctgcgcgttcttggcgttggcgacgtagctccaggccttggtgaaggattcggcggtcactggggtgccgtcagcgaacttccagccgctcttgatcttgatgtcgaactgggtgccgtcgtcgttggacttgatggactcggcgacttcgttctgcgcgttgcccttcgtgtcgtaggaaaccagacgggcgaacagcaggtcgatcgggatgccgccgccggtctcgttggtgttgcccgggatgagcgggttctgcggttcggaatcgtatgcggtgatgacgttggaacccttgtcagcggtggagccaccgttggaagagccgcaaccgctgagcagcatgccgaatgcgcatgcggccgcagcgaaagccagagctttcttcttcatggaattcatattctccttatccattatttccagagctgtaagaccctgttcaaaaagaaggcggacgtcaataccgtggcatcaacgtccgtcttcgttctgatagtaggttcattatcactcgattaagggacaaccactccatatccgagggaggcccatacaaaatagtcaaatcaaaactcatcatctaataaaataaaccgttttttccgcttatcgccggaacaacttatccgcatcgtgcatatggacggacacggacatatctgttcgctgtcagcgtactttgccgattcgtatcatgcccgaggaaatgcctgaccgtatcgggctttcaactgttcgatggatacatgcgtgtaccgttgcgtggtcttcagtgaggaatgtcccaggagctcctgcacctcacgcaaatccgctcccccgtcaagcatatgcgtggcggcactgtgccgcagagcatgagggctaatgtcgggaacgccggcatcacgcgcgcatgcgtgcaccacacgacgtaccatccgctgatc

SEQ ID NO: 488 - DNA, 3115 bp, Unknown
  R48_24m  MAG No. k141_35677
gccgacattcgtccgggcatcacgctggcatgcaccgagtgcaaggagcgtaactacatcacgacgaagaaccgccgtaacacgccggatcgtcttgagttaaagaagttctgctcccgctgcggcaagcagactatgcatcgcgagacccgctgagcgagttcaaagctttcaacccgaccaattggtcgggttttttgttttctccgaaaccttcttggcacctttccaactgccttccccgcacgctaagctaatcaccatgactaatttcgcagatctcaccactattgccgtaggtgggccaatcgcatcctttattgaaccgacctcgcgtgtcggcgttatcgaagccgttgaagatgccgacgccaaaggcttgccgttgtgcgtgatcggaggcggatccaacatgctcgtggccgacacgccgttcgatggcatcgtggtccgtgatgcgcgacacgccgtaagtgtgcttgatgaggcagcgcctgccgaaaacgacgaaaaaatcgtgcatgtcaacgccgaagccggctgcaattgggatgatttcgtcgactactgcgtcgggcttggtctggaaggcgtggaaggactttccggcattccgggtaccgtcggcgcgtcggtggtgcagaatatcggcgcatacggccaggaggtcgcatccagcgtcgaaagcgtagaagtctgggaccgcaaagacaagcaaaccaaagagcttaccaatcaggaactgcatttcggctatcgtatgagtgcgctcaaagccagcatgtatagtgctccggccacacctgcagccgacttcttcccgacaccgcgctacgtggtgctgtccgttactttcgcgctgcatcacagcgaaaccggcgtggtcggctacggtcagctcgccaaagcgttgggagtggaagtcggcgaccgtatgtcgacaacggatattcgcaacgcggtattgaaagtacgtgcctccaagggcatgcttgaggattcccaccgttacttgaccgaagccatgcgcggcaccaaaaaaagcgaactggtcgccatcgcacataatgcgcagcgcacacaggcaggcaatgacgaacccgactacaatcgccatagctgtggcagcttcttcatgaatccgattctcaccaaagaacaggcggcaaagcttcccgaagacgcgccgcgattcagcgcgaccctgccggatggcacgccaggagtcaaaacgtccgcagcatggcttatcgatcatgcaggcttccataaaggctacaaaaccagcgaaaacgctactgcggggctgtccaccatgcatacgttggcgttgaccaaccgaggaggagcctcggcagccgatatcgtgaaacttgccaaaaccgtgcaggatggtgtcgagcaggcgtacggcatccgtctcgttccagaaccggtcgtcatcggcatgagcctcaagtaaacgtaagaacgaagggagaagggaaacataatgaacgtattacgtaagaaatccgtcgagcagacgctggcggaaacagaggagtcggggcgctccctgaaacgagacctgacctggtgggatttggccattatgggcgtggccgtggcagtcggcgcgggtatcttctccatcggcgcccaggcggccgccttccatgcgggtccggccgtaatcatcagcttcctcatcgcaggcgtggtatgcggcgcggccgtaatgtgctacgccgaattcgcgtccatgattccggttgcaggatccgcctacaccttcacctacaccaccgtcggtgagatcatcgcgtgggtgatcggctgggatctgatccttgaaatgctgatggcaggctccgtcgtctccaaatactggggcgtctatctcaacgatttcttccgacttgtcggatggaatatcaataccaacgtcaccatcggatcattcaatttcgatttcgcgccaatcatcgtcgtagctttcttcacggcacttttggtgtgcggcacgaaaatcggcgcacgagtcgacggcgcgctcaccatactgaaaatcgccatcgtactattcgtggtaatcgtcggattcttctacgtcaaagccgaaaacttcaccccattcattccaccgagcgaaccggcgaccgccaccggatccggcgtggccgcaaccatggaacagccattatggcagtgggccaccggcatgacccccagcatttacggcattgccggcatcatctccggagctgcgcttgtgttcttcgcgttcctcggctttgatgtggtcgccaccacctccgaagaaaccgtcaatccgaagaagaacgttccgctgggcatcggcgtgggcatgggactgatcatcgtgctctataccctcgtcgccatcgtcaccaccggcatggtctcctacaaagacctcgccaagcagaaagacccgtcgctcgccacggcattcgaaatggtcggcgctgattgggccgccaaaatcataagttttggcattgtgatcggcctggccaccgtggtcatggtgctgctgctcggcctgacccgcgtggtgttcgccatgagccgagacggcctgctgccgcgctcgttcagtcacacaggcaagcacggcactccagtacgtctgcagattgccgtcggcgcggtcatggcactcatcgcagccagctgcaacgtcagtatccttgccgacatggtgaacatcggcacgctgtcggcattcacccttgtttcaatctctattccgatcatgcgcaagaagcgccccgacctgaagcgagtcttcaaaatccccggcaatccatgggtgcctatcctcatcgcgctcgccaacatctggctcatgctcaacctgagcgtgctcacttggattcgattcgtggtctggcttgcggttggcttctgcatctacttcggctacggctaccgccacgcccgactcggcacgggagagctggaagttggcaatcaagagtagtcttgaacggtaagtgttaaggaggtaaccatgccatacgttgtcgctcagccgtgcgtcgatgtcaaagacaaggcctgcgtggacgaatgcccggtcgattgcatctacgagggctcccgttcc

SEQ ID NO: 489 - DNA, 4712 bp, Unknown
  R48_24m  MAG No. k141_35737
ggcccgcgcgtgagcatctatacgccaaaccacgccatcgcccgcaagcctcgactggaaggctggcagcacaacgccgacgtgaccatcggcaacaatgtgtggctgggcggcaatgcagtgatctgccccggcgtcaccatcggagacaactcgattatcggtgcgggcgcagtcgtcacccatgatattcccgccgattccatcgccgtgggcaatccctgccatgtgattgccgaagtcccggatgactggactcctgaagagcgggccgctgccgagggtcggtaggtttgctgctctgaccaactgttacggcgaaaccgggatacaggagagaaaggaacaatgcaatgacgcaatatcatgtttccgcgcaggcggcgaagacgaatggcgccggcagcgaggccgacccgtttctgaccatcggccaagcggcggccatcgcccgagccggcgatgaggtgattgtgcatgccggcacctatcgggaatccgtcgacccccgattcggcggcgagagcgccacgaaccgcatcgtctaccgtgcggccgcgggcgaaccgcgcccggtaatcaccggctccgaacgtatcgacacatggcagcccgaaggcgatggtatgtggaaagccgtaattccgaacacattcttcaacggatacaacccgtacgtggaaaccgtattcggcgattggaccgtatatccggacccaaaggccgaggtacgccacctgggcgatgtgtatctgaatggcaaatccttctacgaagtcgtctcgctggacaaggtgcgcaacccacagcgttgggataccggccgtgacgccgccaccgattccatcgtgccgctgattgatccggataccaccgtgaacgtgtggtgctgtgcggtcgatgatgaggccacaaccatttgggccaatttccatgaagccgacccgaatgcggaacttaccgaaatcaacgtgcgcgagacctgtttctacccgagccgcccgttcgtcaattacattacggtctccggctttgaaatggcgcaggcggcctgcccctacacgccgccgactgccgatcaggtcgggctggtgggcccgcattggtcccgcgggtggattatcgagaacaatcgcattcatgacgcaaaatgttcggcgatctcgctgggcaaggagatctccaccggcgacaacgaatcgacgcgcactcatcgcaagtccgggtaccaataccaaaaagaggccgtctacaaggcgctgcatgccggttgggagaaaggcgtagtcggcgggcacgtggtgcgcggcaacgtaatctacgactgcggccagaatggtgtggttggtcatatgggctgcgccttctctctgattgaaggcaaccacatataccacatcggcaccaaacgcgagttcttcggctgggaagtggccgccattaaaatgcacgcagccgtcgacgcggtggtgcgcggcaaccgggtgcatgattcggtgctgggcatgtggcttgattggcaggcgcagggcaccgtggtggattcgaacgtgttctaccgcaacacgcgagatgtgatgaccgaggtgacccacgggccgattacgtttatgaacaacgtgtttgcctctgagttcagtttcgacgactatgcgcaaggcgcggcgttcgtcaacaatctgttcgccggtcgcattcgtcacaccgccgtcttggaccgatccacgccataccatttcccgcacgtcaccgatgtggccggcgaggcattcgtctacggtggcgatgatcggtacatcaacaacctgttcttggctgtgggcgattccgccaaaccgttgcgtaccgcggatgccgccggtgcggccggtatggcggaagccggaaccgcgttctttgacggctatccgtgctcgcttgcggagtatgaacagctgattgaagaggccggccttggcgatgaggagttgtatcgcagcgtgaagcagccggtattgctggcttcgaacgcctatgtttcgggcgcgaaggccgcttccagcgaagccgaggctgtggtgagtgatgacggctcttcgttggcattgcgcgaaaccgatgatgagctatggatgaccatctcgttgcccgaatcgattcggtcggcgactggaccggtgatctccactgctgatcttggccagccgcgcatcgttgaggagtatttcgaaaatcctgatggttcgccgattatcgtggaccgggatgtcaccggtgccgtgcgcggcgagcgttcggcccgaggcccgttggcggaatatgacgatagggaagtacttatctggtcgaaatgacggaatctgcggtttacggtttgcagcgcgacatcatgatctggttgctggcctgttgaatggccttggcggggtcaatctgccagtgtttggcaggttggcttcgctgaggggtgttgtgtggggtcgttttgccagtgtttggcaggtcggccccgctgagaggtgctgttggagccgggccgccaatgtttggcaaatcagcccttttcggtttgcattggtaacaaattcgatatatggttaaatcaacgaactaaatattgtaagtccatgcgtacctacgcaacgtcaatggagatactgctatgcgcgcacatcgtattttgctgctctcgctctgcctgttggccgtggcctatgccgtcctgctgtttgttgcgccggccgccgcgccaatcggcatcgcactgaccgccgccggtctggtgctggtttcgacacgctatgcgtggcgtgccaagttcctcgcgttattcaacgaagcgtgattgatgcatcacggtgattgactggttcggttcgtcctaggactcccatgcaattcccggccaattcgcctgtcgcattatgtatcgtgcggttatatggagtcatggccgcaaggcctgacaattgaatcttcatcctctcttctcctttgaagcccggcccgccgctgggctttttctttggtcggcatgtcggggcagtgactggtatttttgtgaccgatctcatggcttcagtttcggcgtgtcgttatttccgacgaatcgtatcgataaaattcatgtttcgtatggtctataaaaatgccggaaaatcagcgttgttaccgctcacatttagttaatcgaatgaatcaagtatgccataatccgctcagttgtggggaaaataggcgatatcaaattgttaaatcaaaaaactaatggtatatttttatgcaggttcggcaagggttgcctgaccaaaaggaagaggaaacaagttcctatcaatgtcgaaaggaattcccatgaataagtggaccaaggtgctcggtgtggttgctgcaaccgccatgctcatcccgctggccgcctgtggcggtagccgtggcacgaccactgccggtggcaacggcggtagctccgacaccgtcaaggtcggtatttcgatgcctgagcagatgctcgagcgttggaagatcgatggcgagaacctgaagaagcagcttgaaggctacggctacgacgtcaccctgcagtatgcagatggcaagaccgatctgcagacctcccagattcagaacatggccaacaacggcatgaactacgtagtcatcgcctccatcgacggcactgcgaccggagctgctgccgagcaggtcgcctccaacggcggcaaggtcattgcctacgaccgtctgatcatgaacaccgacgccgttgactactacgccaccttctccttggaggatgtcggcaagatgcagggcgagtacatcgagcagaagctcggtctgaaggatggcaagaagggcccgttcaacgtcgaactcatggccggttccccgaccgataacaatgcaggctactacttcaagggcgcttgggacgtgctcggaccgtacttcaagtccggcgtgctgcagtccaagtccggcaaggttccttcctctgctgatgattggcagtccatcggtatcgataactgggatcgtcagaaggcccagaacgagatggagaaccgcatcaactccttctacaacgatggcaccaagcttgacgccgtgctcgcccagaacgacgccgaggcaaccggtacctacaacaccgtagaggccgctggctgggactactacccgatcatcaccggtcaggacgccgagaaggccaacgtgcaggccatcgtgcagggcaagcagtccatgaccgtctacaaggacacccgcgagctggccaaggccaccgccgaaatgatcaaggacatggtcgatggcaaggatccgaaggctcctgacaccttcaacaacggcactaaggatgttccgtcccagctgctgaccccggtcaccgtggacaaggacaacctcaaggaaatcctcgtcgacggcggctacatctccgccaaggatgctggcctgtgatccgcaggatcgctgattcgattcatccaacggcctaacggctaacagataagggggcgccgcgctgcgtggttgcggtacggtgccttcatcatgcacaggggcattactatcggaggaggtaactgtggctacgaacggtgacgtgattttggagatgcgtcatatcgtgaagcgtttcggcccggtcaccgcgttgaacgatgtgaatatcatggtcaagaggggccagatgttctcgatctgcggtgagaacggtgcgggca

SEQ ID NO: 490 - DNA, 8460 bp, Unknown
  R48_24m  MAG No. k141_36224
cgccgcacctcggcctgactcggagtgctcatttattcctcggtttcaccatcttcgctggactcaccgtggccgaacagactggtttcgtcatggcgatcgtcgtcaacggtcgggtcggcccagtggccggccttgcgttcggccatcatcgcgtcgcgcacggcggcacgggcgtccatcatctcgtggtattgggcacgacgttcggcgttggagcggcggtgcgtgcgcgggtcctgttcctcaagacgcagatccttgcctcgggcaccgaggttggagccatcgagcatttcagcaccggcggagatggtcggatcccaatcgaattcgaccatacgggcaccacgaccgatgcgcacttcgtcgccggggtgagcacccttgcggcgcagctcgtcctccacgcccagcttggccaagcggtcggccagatagcccacggcctcgtcgttgtcgaagttggtctgcatgacccagcgctccggcttgacgccacgcacctcgaagaacacttcgccattgccgagttcgcggcgctcgaccgtgaactcaagcgcactgccgccctcatcagcgcgacgcggacggcggcccttggtctctaatggcttgatgaccacgcgcgtctcctcttcggcctgctcgcggttggccacttcctcacgcatctcatgcaccagcgcagacaacgcgaagttgagctccttcagcccctcatgagaggcggtggagatctcaaagaccttcagcccgagtttctcgaactccggacgcacgaactcggccaattccttggcctcgggcacatcgatcttgttcagaatcacgatgcgcgggcgttcgggaatcgggatggcgcccaatggcagttcgagcttgtcggcgtagagtgccaactcgttttccagcgcgtggtagtcggacatcgggtcgcggtccggttcaagcgtggcgcaatcaatcacgtgggcgatgatttcggtacgttcgatgtggcgcaggaactccagtcccaggcccttgccttcagaggcgccaggaatcaggcccggcacgtcggcgatggtgtatcgagagtcgccggcgatgacgacgccgagattcggcaccagcgtggtgaatgggtagtcggcgatcttcggcttggcggaactcatcgccgcaatcagggacgactttccggccgaggggaaaccgaccaacgccacgtcggcgatggacttcagttccagaatcacgtcgcgttcctcgccgagttcgccgagcagggcgaagccgggggcgcgtcgggtcttgttggccagggcgatgttgccgaggccgccggcaccgccctgggcgacgacgcagcggtcgccctcgtggcgcaagtcggcgagctgtgcgccgggatgcttggctttgccctgttcgccgcgcgcctcaaagacgacggtgccgcagggcacgggcagaatcaggtcctcgcccttggagccgtccttattgtcgcccaaacccatggtgccgctgccggcgacacgatgcggcatgaaacgatagtcgagcaggctggtggcgttacggtcggccacgaacaccacggaaccaccgtcgccgccattgccgccgttcggaccggccaacggcttgtatttctcacgacggatgccggccgaaccgttgcccccatcgccgcccttgacatggacggttactcgatccacaaaatcactcatattgattaccttacaaaaaagccgcgtccttacgggcgcggcttgaaaaagcttgacgctatatcgctcaggcgatgacgtcgacaaccttgcggtcgcgacgcacaccgaacttcacggagccatcggtgagggcgaacagcgtgtggtccttgcccatgccgacgttgtggcccgggtggaagttggtgccacgctggcgaacgatgatgttgccggccacgacggcttcgccgccgaacttcttcacgccgaggtattgcgggttagaatcgcgaccgttgcgagagctggacgcacccttcttatgtgccatgattcatggtcctttctataactcaggcaatcgccgtgatcttgacgatagtcagcttctggcgatgacccttacggcgagcaacaccagtcttgttcttgtacttctggatgtcaatcttcgggcccttggcttcatcgttcacaacctcagccttgacggacaccttggccagatcggcggcggcgagggtgaccttgtcaccatcgacaacgagggagaccgggaattccacggtatcgcccttcttggcgtcgagacggttcacgaggatgacgtcgccaacctcgaccttttcctgatggccaccggccttcacaatcgcgtacattatcgttccttttatgttttggaaagctaccttgcctaacacgcaccgagcctgcggtcagacaccgagtttcaaatctacaccaccatgcggactaaatcaaatgatttttgcccgcgtgtcaagcacgacacacctgttactcttccgccgtattgttggcggcgacggcagcggcggcaatctgagccagtttggctttgacgtcggcgctggaaccagccggttcgggagcgggagcggtgccgcgaccgtgcttgttggttttgacgaacgggtcgccaccgcgaagcgcgtagggatcgtcgtagtcggccgaaacggtcggctgatcatgcaggatgaaaccacggcccttgcaggtcgggcattcctcggagaacgcctcgaccagaccctggccgatgcgcttgcgggtcatctgcaccaaaccgagcgaggtgacttcggccacctgatgcttggtgcggtcgcgtgccaggcattcgaccaagcggcgcagcaccagatcgcggttggcgggcatgaccatatccacatagtcgatcatcaccatgccgccgatatcgcgcaggcgcagctggcgggcgatctcttcagacgcctccaagttgcagcgcgtcaccgtttcttccaaggacttgcccttgccgataaagcggccggtgttcacgtcgatggtggtcatggcctcggtgcgatcgatgacaatcgagccgccggacggcaggtagacctgacgttccatgcccttacgcagctgggagtcgatggaccatttgtcgaacacgtccttgccttcgtgctcggccgggtcccacttctccagcttgtccttcaggtcgggggccatggtgtcaaggtattcctcgatacggtcgtagaccttgtcaccttccacgatgagcttgctaaagtcgtcgttgaagatgtcgcgcaccacgcggatggccacgtcgggctcgccctgcaggagtttcgggcgcttgccgtgccagaattcctcgcgcttggcgttgatgcgctcccactggcggaccagtgattcgagatccttgacgatggcgtcttcggatgcgccttcggccgcggtgcggataatcacgcccatgtctttcggggcgatcttggagacgatgttcttcagacggctgcgttcgcgctccgaaagcttgcggctcacgccggtcatgccaccggagggcacgagcaccaggaagcggccggcaagcgtgacctgagaggtcaggcgggcacccttgtggccgatcgggtccttagtgacctgcacgagcaccgggtcgccggacttgaacgccagctcgatgcggcgcggctgaccttcgagacgagcggcatcccagttgacctcgccggcgtagagcacaccgttgcgggactggccgatatccacgaatgcggcctccatgctgggcagcacgttctgcacgcggccaagatagatgttgccgacggtctgtacttcctgaatgtcggagacgtaatgctcgaccagaacattgtcttccaccacggaaatctgggtgtggtgttccttctcgcgcaccaccatcaggcggtccacgttctcgcggcgtgcaaggaagtcctgttccataagctggctctggcggctgcgctcacggcggttgtcacggcggcgctgcttcttggcctcgagacgagtggagccttccacatcggtgatttcgtcgatgtactgctgcttgcgggagcggcggaccagcggctgttcgctgttctgactctggtcgtcggtgccctcgccgttcttgccgccacgacgacggcggcgacggcgagtgacggtctgctcctcatcgtcctcatcgcgatcacggtcatgatcatcgcgatcgtcacgacggcgggaacgcgtatcctcggcatcgttctcggcggtatcgtgctcgccgttggcaccggtttcgccgcgtgagccacgacggcggcgacggcgcgaacgggtgcgggtgacgtcggattcctcgtcgccctcctcctcggcaatcggcgagtaggcgatatcgtccagctcgaggtcttcctcaatctgctcgacttcggcggctgcacggcgctcctgggcgttcagacggcgggagcggcgcgaacggcgggagtccgaggtgtcgtcggcgtcgaaatcgtcgtgatcggcgttggtatcgccggacgcggcgtcacgggaagcgtcacggtcggcggaggcgcggccgcggtcgtcgcgatcgtcgcggcgacggctgcgcggctgggcatcgtcatcgtcgtggctgcgcgagcggcgggagcgacgagacgggcgttcgtcggcgtcaacatcgtcatcacgagtgtcagcggtatcgtgcgcatccacggcggcgggcagcaccggttcctggaacagcagggacgtcatcggcttgccacggcgcacggtctcgtggccagagggcagggattcgaccgcgtcgaacaggcgctcatccggggtgtcctcgtgcgtatccgcaactgcacggcgagaacgacggcgaaccgtacggtcttcgtcatcatcatccatatccataggcgcacggcggaggcgggagcgaaccgggcgatcctcgtagtcatcatcgtcggactggcgggagcgagagcggcggcgaaccgaacggtcctcgtcgtaatcgtcatcgtccacgactgaacggcggcgggaacgcggggcggcatcgtcatcgaaatcatcggcactgaccgtgcggcgcgaacggcgcggacgatcatcctcgctatccaagtcggccactgcggaagcggcgcggcgcggacggcgcggagtctcgtcgtcatcatcggtatcgctggaagatgcggcggacgtacgacgggtgcgacgcggcgtttcggcggcatcgtcggccgtggaaacgcggcgcgtacggcggcgggttggacgttcggcggaatccttggaatcgctggattcatcggaatcgccggaatcggatgacttggaatcggccgcggtgccggcattgggaagcgcgggggcttcgaacagcggggtgcgttcctgcacttgcagttccagggaggcgccggcagcaccggtgccgcggaccacgcggcggccgccacgacgacggcgaacaggttcgacgggctgggaggcggcggcaggcgcagcgttcacggctgcagccgaatcggcattggatacggttgaattatcggttccgtcgttgacgaaaccttcacggttgtcagtgggcacaatgctcctcgcggcgcgctgcatcacgacgcctatttccaggcctatacgcttgactcacaccacgctctcaccgtggccgcgcgaaaacgcgccgcgtaaaggcaacttcgtctcaagtctgtcctgcgggtggcggacaccggcgcttgcgttgtctcattctcgagagccgcaaggggatcgacgccatctcgcacgctgatggttatgcagaaccaccatcctttagtatgccacatattttgtgcgggcgtggcccggcgaggctgacgttctctcggctcccctccctgcggtgacagctcccctcagagaggggagctggagaggtgtcagaccagccagtcggtaagaattgcggtcatggcggccaggtcggattcgggcacctgctcgtcgtgcttgtgcgccagcagcgggtcgccggcaccgaggttgacggccgggatgccgagctgggagaagcgtgccacgtcggtccagccgagcttggccaacgggtcgcggccggtgcgctccttgaccagtcggaccagatcttgggcgagcggggcgttcaggcccgggcgcgcggaggggctttcgtccttcatttcgatgccgtagccctcgaacacgccgccagtggccacatgctcgccattgccgagttcggcaccggcatccgcgcccatcatcagagccttggcctcggccagcgatttgtccggggcgaagcggtagttgacgtgtacgcggcattcatccggaatgacgttcgtgcctttgccgccggaaatcagcgtggcgttgaggccctcgcgatagtcgagcccgtccacgttcacggtggccggctcgtaagcgttgagtcggctcaggatgtcggccgccttgtggatggcgttctctcccatccacgcgcgggcggagtgcgctgccacgccgtgggtcacgacgtcgaagcgaatcgtaccgttgcaaccgccctcgatgccgctgttggtgggctcgccgatgatggcgaaatcgccggtgatccaatcgggatgggcctcgacgactttgcgaaggccgttcttttcggcgacgacttcctcatggtcgtagaagacgtaggtgaggtcgactttcggggtggtttccggcgtgcggccgtcgagcgtggcggcgaggtagagcatcaccgcgtcggaggccttcatatcggtggcaccgcggccccacagcacgcggtcttcgggatgagcgtgggcgatttcttcgcgaatcagcgaatcgccgggctccagccacttcggtgggaaattgtcgatgaccggcacagtatcgaggtgcccggccaagatcacacggttcggctcgccgaagtcggtgccggccaccactgtgtcgccgtgacggcggacggtcaggtgctcttgctcgttaaggaaggcctcgacctcgtcggtgagggggccctcgtggtcggacacggagaagttctccatgatctgggtgagcaggctgttcagctgctcggcagtggatgcggtgcggttcaattcaagcgtcatgtgaacagcgtaccgcgtgggcggcgggcccagcacacccactacatgagattttgcggccgaatacatttttatgtgccacactggggtggcgaaagggaggattatgtcaggtctaatcagcgccatgcaaggcttctgcgttatcggcatcgtgattgcggtgggatatgtcgccgcacgaatgcgaatcggcgggccgtccgctcagatggtgctcaaccggttctccttcttcgtatcgagcccgtgcctgatgttcgccatcctctccaaggaaccgatcttcgacatcttccatccctcgattatcgtggcgttcttctccgccgtgctggtaggcgtggtgttcctggtgctcaaccgcatgttcttccacctgaacgccccggacgccaccatcggcgccctgaattcgctgtacctcaattccaataacatcggcctgccaatcgccacctacattctgggcaatccggctctggtggcaccgattctggtcatgcagcaggccatcttcacaccggtgggcctgacagtgctggacgtgaccaccaagggcaaggtctccatcaaggaaatcgccaagcagccactgcatcaaccgctgcttatcggttcgctgctgggcattgtggtctctgcgatttccgctaaaagcggctggttcccagtgccgaaattcattttcgacccgatcgacatgatcggcgattcagcggtgccaatgatcctgatggcgttcggcatgtccctacacggcaccaagccgctgcagcagaagggcgatcgcccggccatcttcacggtcgcggtcctcaagaacatcatcatgccgatcatcgcgttcctgctcgcctacttcgtgatgggcttccgcggctccgagctgtatgcctgcgtggtgctcgccgctctgcccaccggccagaacgtctacaactacgcggcccgctacaacgtgggcctcaccttcgcgcgcgacggcattctgatgagcaccatgaccagcccggtgtttatcgcgatcatcgcggcgctgctgagctgagccggcaactgtaatcaccgtaaaaaaacttccgcgaaatccaccgtaggattccgcggaagcctgagatatacactacttgagaatcgccttaatcgcctcatactgctgagcagtgagttgcaccgctggctcacggatcagggtggaaatgttcagtcccttggccttgaccgcacccttgatggcggagatgaacaggtcggtctgatcgtacagcgccatc

SEQ ID NO: 491 - DNA, 19026 bp, Unknown
  R48_24m  MAG No. k141_36688
taaacgaccagtgtaggccgaccgcggatggatttcatcgtataacggaatacctcgtaccgatgtacgtagcccttccgtattattatgcgtcgaggaacgctattcccggcatatcacacgatatgccgctttgagagaactaagacggggcattttatggccaacaatacattttccttttcctctcctgacgatcaggagacggcggtgctgcagcctgtggccgccgatgggctgttcgcagccgcggccacaggtaccgccacgccacagcaaagcgacaatggcaccaataaccatgccgacaatacagcctatgtgggtgaacatgtcatggcatctaccaccgctaaatcacatggcaaggccgcacggattgccatcataaccatatttgcagtgttgcttgccgcattaatagcctatttcttcgtcggacgttggtacttccaagacaaggctgcgcccggtgttcatttgggcaatgtctctgtcatgggccagacccgcgaagaacttgcgaatactgtgaagcagcagctgaataacaccacagtgacgttcaccgccgaaggcaacagcgtcaaagcctcgctgaaggaccttggcgtcaccgtcgacacggataaaaccgtagatgcgctgttgaacgcgaagaccggcgacgtggccaagctcaatattttcgatcagccgcatatcgctctgaccgccaccagagacaaagagactgccgaacaattcgtcaccgccggcctggtcgatgaggccgaccgagcgcagattgccaccgttgtctacaacaagagcaccaagcagttcgattacaccgcgggtcaggatggcaagggcccggatatcaatgttgtcaatgctgcagtcaaggaggccgtcgcgaccccgggcgaaaatgcgacggtgccggtcaagctacagactgcaaagaatccgattgatgacgcgagcgcacagcaaacacagtttgacgccaatgccaagcttggcctcaaactgaccgtggacaacggcgtgaacaagagcgtcaccatcccggccgataccattgcctcattcctcaagcccacggtgaataaggcgggtggcaccatgagtctggtagtcgaccgcgatgccatcaccaagtacgtcaccagtgacagcgtaaccaaagaactgactgttcccaaggtgacacgcgaggtctacatcacgccgaaagacgaaggcggcgtggaaattggtgccgataagacactcggtgtggatggtattgaagtgactggtgccggggacgcccccgaacgtctggctaccgccatcgagcagaaccagtccactgattccactgtggctgtgaaagacagcccatatgatgtcaagcaggtcgaggtgcctcataacttcgatacggcaaatggcgataagtgggttcatgttgatctgacgaaccagactgccactgcatatcagggcaccacggtggtcaagaagttcaacatcgcttctggcaagcccaccgccgatggttccatgctgtccgataccggcacgttctacgtgtatctcaagtacgaatcgcagaccatggttggcgaaggctacaaccagccaggcacgccgtgggtttcctactataacggcggcgaggctctgcacggtgttcctgcatacatgtggggcgagcaccccatctatgtgcagcagggtatcccaggctcgcacggctgcatcaacatgcaggtggccgacgccaagtggatgtacgacttcgccaccatcggcactcgtgtggtcgttgatggcaccacaccgacttccggtcaggcgttgcgcccggctggtgcggatgccaccggatggcagggcggcaacgccagctgattcgatccatgtttaatcgataacggaaaatccccgacccttgtgggccggggattttttgtaggtaccaatcgatagcgagtccgccgataagcgtggtggcaccgtcaatacggtgccaccagtaccgtcagtacggtcagatacgatccaacgcctgcttgagatcggcgataaggtcgtcggcgttctcgataccgaccgaaatacgcaccagattggcgggcacctgcagggtggtgccggccacggaggcgtgggtcatggcggcgggcacctcgatgaggctttccacaccgccgagcgattcggccagtgtgaagatctgcgtgtggtccacgaagtgcttggccgcctcggcaccggccgcgagctgcacggagacgatgccgccgaagccgccgtgcatctggcgggcggcgatttcatgacccgggtgggactcgaggcccgggtaccagacgcgctcaatcacatcagagggctgggattcgagccattcggccaccttcagggcgttggcactgtggcgcttgacgcgcagatccagggtcttcaggccgcggatgtccagccaggagtcgaacggggagggcactgcgccggcggcgttctgcaggaaggcgaccttctcacgggtctcctcgtcgttgaccaccacggcaccgccgaccacgtcggagtggccgccgatgtacttggtggtggagtagaccaccacatcggcgccatcggccagcgggtgctgaagggcgggcgaggcgaaggtgttgtcgaccgcgaccttggtgccgtacttgtgggcaacttcggcggtggccgcgatgtcggtgatgttgagcagcgggttggacggggtctcgacccacacatactggtagtgcttggaggccaatgcggtttccacggctttcagatcggtgatgtccaccacgtcgaggcccacaccccacggcacgaacaccttggagagcaggcggtaggtgccaccgtacacatcgttgccgagcaggatgttgtcgccgggcttgatggtggagcgcagcagcacgtcgatggcggccaagcccgaggagaagctcagcgcgtacttgccgccttccacggcggcgagctgctcgtcgaagctggtgcgagtggggttgatggagcgagagtagtcgtggcctcccctgaggcccaacacgccatcctgcttgaaagtggaggtggcgaagatcggcgtgacgaccgcaccggtggtcgggtcgggctcctggccggcgtggatggcgcgagtggcgatgtcggtgttggcgaacttggcgttgtattcagcggacatgatattgggttcctttcgggattgttccgtattcgaaggtaaaacaggtgcggttagttagtgcggatgttggtattgattcttttgatagctagttatggagtccatccgcagctccctcatcagagggagttccgttaaggtactgctcggcgagggagggcttgctggtgcgttccacgatgtcgccgtagccgttggcacgcatccagtcgtcattgaagatcttctccagataactgcggccggaatcaggggcgagcaccaccacaatctggttctcgtccaaatcattggcaagcgcgtacttgatggcgctggccacggccatgccggacgagccgccgaccagcaacgcctcctcgccggccagacggcgggtcatttcaaaggcttcggcgtcggatacgcgcacgatgtcgtcggtgatgttccggtcgaaagccttggggtagaagtcctcccccacgccctcgatgtcgtactgatggacttcgtcgcgtgaggaagcggagtagatggagccttccgggtcggagccgatgaccttgaccgcgccgttggaggcttccttgaggtacttgccggtgccggagatggtgccgccggtgccaatgccggccacgaagtgcgtgaccttgtggtccgtagcctcccagatctcggggccggtggtgtagtagtggctcagcgggccgttcgggttgtcgtactggttcgggcggaagccgccgggaatcgtgttggccagtcgttcggcgacctggtagtaggagcgcgggtcgtccgggccggcgtcggtcggtgtgacgatgacttcggcaccgtaggcgcgcagcaccgcgcgcttggattcggaaaccttgtccggcagggtgaaaatcgtgcggtagccgcgctgctgggcgaccagggccaggccgacgccggtgttgcccgaggtgggctcgacgatcacgccgccgggcttcagctggccggactgttcggcggcgtcgatgatgcgctcggcgatgcggtccttggaggagccgccggggttgaagtattcgactttgacggcgatggtggctttgacgccggccgcctgcgggatgtggttgagcttgacgagcggggtgttgccgatgagttctgcgaggctgttgtggatggtcatgtgaagtccttcgttgctggggttgtgggggttttgctgcgttgcgttcgtgaaccgacgttcccaaacgaatggactgtggctttggtttgaaaatcgagtattcccgctcactgtacggtgaatccgaaaagtgaaccggtttttcatgttaaccacggctcgcgcattacacgattacgcttgtgccatcggatacatgaaaagtatgcggcagattcgccgcgattcgaatgctccatctcaagttatgcgtcactgaccgctcgcccaggggcgtcggttagcgacaacaacatgagataatctgcatgcctcacaccatagcacaacccgcgacaagcgcgtgtcgccggcggccggctcccctcagagaggggagccaaaaaggtctataacgaggctgcctcgatgagctgacgggtgtaatcggattgggggttgccgagcacttcggcggtgggacccgtctcttcgacgcgcccgtcgtgaagcacgaggatgcggttggcgatgtgctgcaccacgccgagatcgtgggagaccatgatgatggcggtgctcggccgggcctcacggatagcggcgaaggcgtcgaggatctggatgcgcgcggccacgtcgatggcgctcattggttcgtcggcgaggattaccttgggctcgttgatgatggcgcgggcgatgaccacgcgctgcgcctggccaccagacaggtcgattgggtaccggttcaggaagtccgccggttcaagacccgccatggtcagagccgcgaccacccgctcgtcgatatcggtgttgttcagatcacgtcgctgcagactcagcggttcagccaccgatttggcgacttgccaacgcgggtcgagtgatgagaacgggtcctggaacaccagtcccgattcgcggcgcagggtcgcgaatcccggcgattttcggccgccgacaatggattggctctcgtattccacactgccggagtccgcggattccaagcccagcataatgcgggtcagcgtggatttgccggatccggagccgccgatcacggccagacattcgccggcgtggacgtcggcggagacgtcgaagaggacttggtggcgtgcggtgcgcggtccgaaggatttggtgatggagtgggcggagaggagtggcacactgctgttactcatgcgaatcctccttgggggtgtggagggtgagggtttgggcggcggcgaccaagcgttgggcttgcggcgtggtcggtgcagcaagcaggtcggcggtgggtccggattcgacgatgcggccggcgtccagcacgtagcagcgggtggtggcacgcgcgagtacggagaaatcatgggtgatgaacagcatggatgcgccggcgtcgtccaccaacgaggtcagcaggtccacgatctgacgttgcgtgatggagtcgagcgcggtggtgggttcgtccgcgatgatgaatcgcggtgaggtgatcagcgccgtggcgatgcccacgcgctgctgttggccgccggacagttcgtgcgggtatgtgccggccacgtcacggtccagtccgaccttgtccagcatggtattcactcgctcagcacgttcggccttggtcagatcgtagtgcagtctcaacggcaacgcaatctgctgcgccacggtcatcaccgggttcagcgcatgggccggattctggaataccgtacccacataccggccgcgcagatcggcaagcgtatgctcgtcggcgtacgcggcggaatcgtggcccgaggtggcaaccctgcgttcaccggcaacatggtgcctatctgccgcgccgcgttcttcgtcagatcctgagtcatcttcctgcccatgccgcgactcggcggtttctccggacaggatggcggtttctcccatcgtgatggtgccggacagcacggcctcgcgcggcaacaggccgagcaatgacttggcgatcatcgatttgccggaaccggaggaaccgatcaggccgacccgttcgccgtccgcgatggacagatcgacatccatgacaatcggtttgccgccgatagcaatattcagcccgtgaatttcaacgctcatcatccgtctccttcggcgctgccactgcggactgcgccgcagtgtcaccggctcccctagccaccggcacaaccgcaccgggcacagtcatctgccgcaacgcgggattagccaccgggtcggtggcgtcgcgcaacgcgtcgccgaacaggttcagcgcgaccaccaccagggtgacgatcagaccgggccacaccaccgtcaacggaaacacgttgatgagtttgaccgaggtggccagcgaatggccccagctcggcacccccgcgccgacgcccacgcccagataggtcaggcccgcctcggccagcaccgaagtgcccgccgacatcgacgattgcaccatcagcaccggcgtgatgttcggcacgatgtgtctgaccagtacgccgaacccactggcaccgttcgcccgggccgactgcacgtatcccgagcgggcggcgagcagggcggccggacgggcgacgcgcgccagatgcagcccgtagccgatggagcacgcgccgatcaccacggccgcggatgcgccgaacggcacggcgagcagcagggcgatgagcacggtggggatggagatcagcgcgtcgaccacggcgaccgacgccgaagcgagcgccgaagaacgggcgaccatcagcccgaccagtaggatgccgatggcagccgagcagacaacggtgagcagggcgatggcaaggttcgtacgcgatccggccatcagccagctcagcacatccgcgccggtgccgtcggtgcccagccaatgcgcggacgacggcttatcccacacgtggtagccgtcggtggccagcagcgactgcggggtccagaacaacgacaccagggcgacgaccatccacaaccccagcacgatcagcgagtagcggccggtgccacgggaccagatggtgcccagaaccacgcccgaacgacgccatcgaccattgcgatcaaccatcattcctcctttccggcggccagacgcgggtcaagcagcgcgtgcagcagatccaccgccaggccgatcagcaggaagaacgcggcgagcaggaacagctcgctttgcacggccaccagatcacggttgccgacatcgcccaccagcagggcgcccagaccgggcagggcgaacaggttctccaccaccatcacgccggtgatcatcgaggcgaacgccagccccaccaccgagacgagttgcggagccgccaatctcaatcccacgcgcagcaacgcctgggtgcgggtcatgccgcaggacatggccatatcgatcggacctccctcatcggcgatgccttccagaatggagcgcgtgtaacgcatgatgcccgcaccggacacgaatccggtggcaagcgccggcaggatcagggacgagaccgcccgcccgggagcgccccacccagcggcggggaacccctgcgagggcagcagaccgacaaggcccacgccccgtgcgaacaggaggatgagcagcaggccgctccacagggccggcacggcgccgcccacgatggacagcacgcgcaggaaaccgcgcacggccggcgaccgggagatcacggcggcggcgcccatggacaagccgagggtgagcgcgatgaccagactcatcacgatcagcgggaacgtgatcgtcgcacgttggccgacctgggaggtcaccgcccgaccggtcagcgccgacacgccgaggtcgccgtgcagcagccctccggcccagtcgagatactgcacgacatacggccggtcaaggccgaattcggcgcgcagggccgccacacgcgccggcgatgcgttcatgccggccatcacgaccgccacgtcgcccggcaggatgcgcagcatcgcgaacaccagcaccgaaatgccgaacagcgccgccgcgaacagcagcaagcgttgcatcaagaaccgcataacgcctcccttatcgattccctcgccaccgcccgtggcgtcaccggccggatgggccgtccacggtcgggcgcgcagcggaatcgctcccgcgccgcgcccgagcgatgggttccgggactacttggtgtaggtgatccgccagaggggcagcacggtctggctcaggttctgcgggaagccgtccacgcccttggcgtaggcgatggtgaccttccagctgaacagccagtcggccggcgcgtcctcggagacgatcttcgcggccttggccagatacttcgaggcctcgtcatcggaggtggcctccagcgccttggcgtacagggcctgcacgtccttgttgtcgtagtggaagtagtagctcggcgtggtccatccgtagaagtcgtggctttcggcatggtccacgagcgaaagatcgtagttgccgttggcgtgcacgtcttgcagccaagtggagaactccacgtagttgatcttcaggtcgatgccgatgggcttgagctggctcttgagctggtcgccgagctcggtgccgtacacgttggcgtaggtgagggtcaggtccagcggcttcgactcggagtatccggcctgctccatgagcttcttggccttggccacgtcatgcgggtacaggccgctcagatcctcgtaaccgggatcgaccttggggatcggaccgccgaggggggcgtccacgccgccgcgcgaggcgatgatctgcttatggtcgatggcgtatcggatggcctggcggacgcgcttgtcggagagcttgtcgttggccatgttgaaggcgagcacgaacttgtcggaaccatcaccggacttgaccacatagttcggatccttgcggaacggatcggcaagggtggcggagatgggtgaaagcacctgcacgtcgccgctcttgagggcgttgatgctggcgttctcgtccggcaggaaccggacgatcacgttctcggtcctcgccttgtgctcggtgccccaatacttggggttcgccttgagcacgatcttgtcgttcgggtcgaaggagaccacggtgtacggacccgagcccaacgcgccgttcttctgatcccaggtggcgtccttgtcgtagaccaggccgggacggctggtgaggtaccacagcatgttcgagttgggcgcggagagggtgagcctgaccgtgttggcgtccacggcctcggccttgtccaggctcttgacctgctcgtagtcgtagtacttctgggccttgagctcgttgatggaccacgccacgtcctcggcgtcgagcttgtcgccgttggagaagttcatcttctcgttgaggtggaacgtgtaggtcaggccatccttggagatctcccagctcttggccagaccggggtggaccttgttgtccgagccgcgcgagacgagaccctcgtacacgttgccgatgaggatctgctcaagggccgaacccgactggtggcggatgtcaagattgaccggggcgagtttgaggccgacggccacggtatcggatcggctggccgagccggaggcgttcgcgtccttgcccttgcctttccctccgaagacggtgacgcccacgatgagcgccgcggccacgacgaccgcgatcagcgtccacagccaccatttcgggccgccgttcttcttgtttgatgatttcgcgcgcgcgttcaggctcgcgtcggtgctggcggcttgattcgcgccgtcgatgttcctgtcttcggttgcgccggactcgccgtgcacaccattgttctgggacatggatactccctgatgcattcgggcatgcttacgcccgaatatggtttcgttgttatcttgcgtggttgaccgcccattcgggtcgatcaccacgttctactatatccccggacacgccggaggcaatggctatactggattgcggcgccgacggagggtccgcggcgaccacaacacgcggcgcatcgtcgggcaacgacgcgggaagcgctggcgtgggcacacgtgcggccttggcataaggccgggaggcagctatggcacatattcttctgggcgtcaccggcagcatcgccgcattcaaggcctgtcatctggcatccgattggaccaaggccggccacgaggtgcgggttatcgaaaccacagcggccgaaggcttcgtcactcccctgacattcacctcactgacccatcaacccacccgtaccacgatgttccccgcttatccggccgcgcacggcgacgtgacggccaatccgaccgtgccaacgaccatcaatcatgtggccgatgcggcctgggccaatctgctggtggtggccccggcgagcgccgacgtcatcgcccgcatcgcctgtggattggcgaacgatacgctgacgtccaccattctggcctatgaggggccgaagatcctatgcccggcgatgaacgtgcatatgtacaacaatccggccacgcagcgcaatctgaaaacctgcgccgaattgggctggcagattgtggagccggaggaaggcaatctggcttgcggcgacgtgggacgaggccgtatggaagagccggcgcgcatcgaggaagtggccgctcggctgctggcggatgcgcaggatgaccaggctccctcatcttccccgctcaaggggctgcgcgtgctggtcactgccgggccaacgcaggagccgctagacccggtccgctatctgacgaaccattccaccggcaagatggggtatgcgattgcctcggccgcagccgaatttggtgccgacgtaacgctggtctccggtccagtcgccttgaccgcgcccgatgcggtggatgtggtgcgcgtcacgaccgcgcaggatatgttcgatgcggtggccgacgccttcccggcggcggatatcacgattatggccgccgccgtgggcgatttccgcgtggccgagattgcgccggagaaaatcaagaaggccggccgcagcagcatcaccgtggagctggtttccaacccggatattctggcgtgggccggcgaacgcaagcgcgacgacggctcgcagatcctgtgcggattcgcgatggagaccgagcatctgattcgtaatgcggagaagaagctgacgtccaagcattgcgacatgctggtggccaacaatctgcgcgacgccggtgccgggttcggcaccgacaccaacgttgtcaccgtgctcacgtccggagcggaggatgccggcaccccgaagatcgagcattgggacaagatggacaaaaccgtgcttgcgcaacgactgttgctgcggctcgcagcgttgcgttccggcggcgcgagcaatgtcgatgacgagaacaaggaggcctgacccatgctgatggcggtcgatatcggcaatacgaatatcgtgatcggttttctggagggcgaccgcatcgtcggctcctaccgcatcaccaccaaggcgacgcacacctcagacgaatacggtctgatgatcacgcagttcctggctttgagcgattacacggccgacgatgtggacgatgtgatcgtctgctcggtggtgccgaaggtgatgtattccttccgcgcctcgctgatcaaattcctcggattggaaccgatggtggtgggccctggcgtcaagaccggcatgaacattcgtctcgacgaccccaaaaccttgggctctgactgcatcgccgactgcgccggcgcctaccacacctatggcggcccggtgctggtggccgacttcggcaccgccaccacgttcaactatgtggacggttccggcacgattcgctccggcttcatcaccacgggcatccgcaccggggccgaggcgttgtgggggcagaccgcccagctgccggaagtggagatcacgcaaccgcagtcgattctggccaccaatacgcgcactgctatgcaggccggactgtattacacgttcctcggtggcattgagcgcacgattcagcagttccgcaaggaaatcgatgagccgttccaagtggtagccacgggagggctcagccgcattttcaagaacgacaccgacatgatcgacgtctacgattcagacctgatcttcaaaggcatggcatacatctactcgcgcaatgtgaagtaacgcggtgtgcaggcatcggccgcgcatagcgcagtcgattccgtccctccccgaaaaacctactcaaaaccctacttaatcgtaaagccctgattgaggccgtattctcggaggtctttctgccattgggccaggccgtcggagagactgactttcttgccgggcttctccaatggttcgagcgggttgccttcctcgtccttcatgcccatctcaatggcttcctgtcgctgctgataggcgtggaaactgccggaccactcgtatgcctggcccaccgtcgatttgaagtcactgcgcgcatacacttcgaatggcagatactggtatccgaccgacacatcctcggcggcctccgacagtacccggttgaacttctgcccgccgaaatacgggatttcaatgccacggtcattggtaatcgtggttttatccagaaaatcagcggaattcagggtggcgtaatcggccgggaaggcaccgccgtctacacgcgcgctaatgccttgggcgtcatgcgccacaaagtccacgaaacgataggccgcatccggcttacgggtcagttgcaacacggtcagcgccgagccgccattttcggcgttggcaggctgcccaccataggtgggcatgggagccacgcgccacagaccggccgcgcccggcacattggacagcagcaacgacggcatccaagccccagagaacacggaggcgatggtgccggtgcccactctgcttttccaccgatccgaccatgtggcggaggtggtgtcaacaagcccctcatcgatcattttctgccagaattcggtgaaccgttgggtgccggcatcctcatccaaatcgatggtcacggttttgccgtcggccgacgtgtggaacggctgaccaccggcgagccagaccatcgcgtcatagaaactgccgtcgcccgagtcggcggcgatatacgcgccgatctccttgagcttttcggcggcctcgtaatagtcatcccaagtcttgatcttggtggcgtccacgccggcttggcggaacacgtcttcgttgtagaagaagcccatcgggcccgaatccatgggcagtccataggtacggccggcgagctgcacggacgaccatgtgccgagggtaaagaagttggaataatccgagccgattttgtcggtcagatcaagcaattggccggagaccgcgtactgcaacagtgcatagtattcgatttgagccacgtccggcgtgccgtaaccgtcttgaatggcggtattaagattgccgtagccggagatattggtccatttcacgcggatgtccggattggctttttcgaaacggcggatgacctcccccatgctcggttcccagctccatacgctgatctccgtacggttgtcgtccgtggcctgcccgcacgaggccagggatacggaaaggatggcagtcactgctatggttgccattcttttgattcgctgtccgatcactcgcatggtgacgagtgtactaggcggggcttaaaacggtaaaagccccgtgacgggattcgtcacggggctttgtgtatcaggtgagattagctaggcagtctcagcgagggttcaaggcttacttcacggtgaagccctgatccttgccgtaatcctgcagtgccttctgccaagcggcgataccgtcagtcagcttctggtcgccggtgtaggacttgccaaggtagtcgccgaagatggtgcgggccttgacctcgtagggcaggaactggtagtcggaggacacgttctcagcagcctgagccagaacctcgttgtacttctgaccaccgaagtagtcaacgtcctcgccatcggcgttcttcacagtggtggtgttcttgaaggagtcggactccatggaggccttgtcagccgggaatgcaccgccggccacacgggtggccacgccgtcgccgtggttggcgtactcgatgaactggtaagcagcgtcagccttcttggtggaggcgagcacagccagcgaagaaccaccgttctcggagttggtggtggagccgtcagcggtcggcatctgggtcacacgccacttgccagcgccgtcagcagcggagttggccaggttggcaggcatccaagcgccagtgaacagggaggcgatggtgccgtcgaccatgcccttgaaccagtcctcagaccagccagcggtcttggtgtcgagcaggccctcgtccagcagcttctgccagaagtcggtgaaggtcttgacgttcttgtcaccggtcaggttgacggtgacttcggaaccatcggaagaggtctggaacggctttgcaccggccagccaggtcatggagtcgaagaagccggcgtcaccggtgtcggaggtgatgtagtagttgtcgcccagagcgtgaatcttcttggcggcgtcgtagtactgatcccaggtcttgatctgctcggcgtcaacaccggccttgtcgaagacctccttgttgtagaagaaggccattgggccggaatccatcggcaggccgtagaccttgccggcgaactgcacggaagcccacgggccaggggtgtagaagtcggagtagccggaggtcttgtcggtgatgtccagcaggttgcccttgatggcgtactgcgggatggcgtagtactcaacctgagcgacgtccggagcaccggagccagcctcgatggcgttatcaagctgggtgtattccttggtgttggtgccgacgttcttgagatcgaccttgatgccggtcttcttggtgaagtccttggcaacctgggtcagcgtgggctcccaagcccacacggtgatttcggtaacgtccttatcttgagccggcttgccactggcggtgtcggaaccgcaggcggcatcggtccacgcgagaatcgccccgtgcgccgcgacctggcctggcattgcaccgaaaccaacgagatgggcatcgacgacttctaccgctggagccagaaagccggcaccgaaatcatgcttgccgtcaacatgggcacccgggggctgaaagccgcgctcgacgagctcgagtatgtcaacggcgcgcccggcaccgcttgggcggatcagcgcgtggccaacggcatcgaggagccgatggatatcaagatgtggtgcatcggcaacgaaatggacggcccgtggcaggtgggccacatgagcccggaagaatatgccggcgcggtggataaggtggcccacgccatgaagctcgccgagtccggtctcgaactcgtggcctgcggttcctcgggtgcctatatgccgaccttcggcacgtgggagaagaccgtgctcaccaaggcttacgagaatctcgacttcgtctcctgccatgcctactacttcgaccgcggccataaaacccggaccgccgcctccatgcaggacttcctggcctcttccgaagacatgaccaagttcatcgccaccgtctcggacgcggccgatcaggcgcgagaagccaacaacggcaccaaagacatcgccctgtccttcgacgaatggggcgtatggtattcggacaagtggaacgagcaggaagaccagtggaaggcggaggccgtgcagggtttgcaccacgagccatggcctaagtctccgcatttgctggaagacatctacaccgcggccgacgcggtggtcgaaggttccctgatgatcaccctgctcaagcactgcgatcgcgtgcgttccgcctcgcgcgcccagctggtcaacgtcatcgcccccatcatggccgaggaacacggcccggcatggcggcagaccacgttctacccgttcgccgaagccgcccttcacgcgcgcggccaggcctacgctccggccatcagctcccccaccatccataccgaggcatatggcgacgtgccggccatcgacgcggtagtcacgtgggatgaacaggcccgcaccggtctgctgcttgccgtcaaccgcgacgccaacaccccgcacacgctcaccatcgacctttccgggctgcccggcctgcccggtctcggcacgctcgcgctcagcaaggcgcaactgttgcatgaggacgatccgtaccgcaccaacaccgccgaagcgcccgaagccgtcacgccgcaaccgctcgacattgcaatgaacgccaccggcacctgcacggcaacgcttcccgccatctcctggatcagcgtggaattccacggctaaaagacggagagtcacgcccgtaccaagtacagtcaagtccaatacgaccagggcccgtcaatcaccatacgattgacgggccttgtcattcacttcggatatttcgaaccacggattcatcaggcgcgcgccaacgccggtgaggactcgcgcagggagaggctatagggggcctcgatggtttgggcgggggcacggctgccggattcgacctgttggatgatggattcgacggccagtcgggcgatggcttccctgccggggttaacggtggaaagagacggcaccatgtaggccgattcctccacgtcatcgaagccgataacgcgaacatcatccggcacggcaacgccgcgttcgcgcagttcacgcagcacgccccacgccagcaagtcattcaaagcgaacacggcatcgaattgcaggccactctccagcatggtgtccaccgcgaccaaaccgtcggcgctcccccagccttgggtttcgataagcagactgtcatcacaggggatgccgcgcgcggccagcgcctcacgatatccgtgggtgcggatggagcccgacgagaaatcgtgctcggggtggggcacggcaccgactacggcgatgcggcggcaaccggcatcaagcaggtgataagtcgcggcggcggccccttcgcgattgcgaatcactacgtgcggcgcgttgacgccgaacaaacgttcacccaacagtacgagcgggtaatcgccatccaaagccgcgatatcgtcaaccgtcatcatcagagggcttaagatgagcccgtccgcgctgtgcgtgcccatcgatgcgatgctttccagctcgcgggcacgattgttagtggtggattccacgatgacgccgtagccatgttgccgggcctcggccagaatatcctcggcgagttcggagaagtacacctgccgcagatcgggaataaccagcttgagcaaccgggtacgcccggaacgcaggtttctggccgacgagttgactttgtatccgagcctgtcgatggcttccgcaatacgcgcggccatcgcctcgctcatatatggctgtttgttcagaaaattagacaccgaggctaccgaaacaccggcctcatgggccacgtccgccatcgtcactctgtttttgcctcgcacggtgaccaccctacccgactttgctggagatacgaaaacgactcccctgctacgatgagcagcaagggagccgttgggtaattaggcgctatgcgcggttttacagcttgacgacgagtacgccgttgggctggatggcggccgtgtgctcggactcgttgacctgggccagcgaggcgaccagcggttcgccttccacgtccacgaccgcaacatcgtgggtgcggttgaacaggaacacgaagtggttctcgccagtttcgtccgcacgctcgacgcgcagcacttcaccgcgatcgtcctcagccgaagtctcgatgccgagttcctccagcagcacgggcaggctcttggccaaaccctcacggccgagacgggcaccgacgtatgcggccttgccgtcgccgaagtcgttgacggtgatggcgggagcgccgtcgaaaccggtccacttatctgccttgaaggaggcgaccacgtgagcggtatcggccacggaggtgatcacgtcggcgaaatcgtgcgccacggttccgttgtccaagtcaaggtggtccatggcaccggggaagtcgttgcccatcggggcgaattcctcaacgcgcacacccaccacgtcacggatggagccggggtagccacccagccagacgtgatccttgtcgtccaccagaccggtgtagtaggtcacgaacagcttgccgccgttcgccacatactcgcgcacgcggcgcgtggtctcttcggataggatggtcaggctcggcagcacgacggcttcgtactcgtcccagggaccgcgaaccggcaccacgtctgcggtgagaccgttgtccgccagcgcgcggaaccacgcgagcggctcggtccaatggcgtacctcctgagtaggcgtggcggtgtgttccgtagcccactgggactcgtaatcgaagacgacggcgaccttggacttgaccagcttggtgctcagcaggccctcgtcagcaagcttgttgaggtcggcacccagctcgcacacatcgcggaagatctgggagtcggggcccgcgtgaggaaccatcgaagagtgccacttctcggcaccggccttggactggcgccactggaagtagcagatggcgtcggagcccatggcca

SEQ ID NO: 492 - DNA, 6908 bp, Unknown
  R48_24m  MAG No. k141_36779
aggccaacactgcacgcattcgacgatgtgcgcatagaagccgttgccagcggtttccgcattggccagggacaggccgtggctgccttcggggaacaggtgtgcttcgatgctcacgccggcggcccggcaggcctggatgagcattagcgtattctccacgggctcggcttcgcggtcggaggtcacggcgtagccgccaccaggcaaaatcaggatggccgggcgtatgcggtccggttccatctcctcgctgttgtcggccacatagccaaagaatcgcgcctcgttatataacttaagaatcgtgagaatcaaagcaattcataacctaggaatagtgagttttacggcattatataacttaggaatcgtgatataatagctcataaatccttgaaaatactaggaatatgagcttaacatgtataagagaaaagtatacgaccatctacggcgatggaaagcagcgagcaagggtactactgcgttaatgattgaaggagcccgccgcgtcggcaaaagcaccgtcgccgaggaattcgcgaagaacgaataccgctcatacatccttatcgactggcagaaggctccgcaggcggtacgagactcgttccgcaacaatctggatcatttggacacgctgttcatggacctttccgtctattacggcgtacgcctgcatgagcgtgacaccctctttattttcgacgaagtacagctcttcccctttgcccgcagcgcggttaaacaactcgttgcggatggtcgatatgacttcatggagactggcgccctgatctccattaagaagaatgtcgaaaacatcttgattccctccgaggaagaatcggtgagcatgtttcccatggattttgaggaatttctatgggccagaggagaagaactactcgccgatgcgatacggcaatcttttgcggacaggcgagcaatgtctccgctgctggacaacaaggcggaacgcctgttccgtgaatacatgctggtgggaggtatgccgcaggccgtagagcgttatctgggaacatccgatatgggcaatgtcgatcgagtgaaacgccaaattttgcacctgtacgctcaggacataaagaaatacggcggagattcgaaaaaacgggtcaaacgtatcttcgatgaaattccaaggcaactttccaagcatgaaaagaagttcacactgtcgtctttaggcgaaaacgcacgcgaacgtgaatatggcgatgctttcttctggttggatgaatcgttcctgatcaaccgctgcatgaatgccacggatccgcatgtgggcctgcgcctacaccaagaggactccacgatgaaatgctatatgggagacaccggcttgttagtaacgcaagtgtttgccgaccgctcatacacgtcgaatgagttgtaccgcgatatcctgttcggcaagctggaagtgaatgaaggcatgctggtggagaatgtcgttgcgcagcagctccgggcctcaggccatcgcctgttcttctattcccgatattcccgtcaggcgaaggaccgcatggaaattgattttctccttatcggggagtattcaaatgccgccatgaaggccagggtctgccccgtggaggtcaaatcgacaaagagatacaaaacctcatcgctcgataagttcaagaataaattcgacagccgggtcggcatgcaatatgtgctgcatcctagaccaatgcgcgttgaaggagaccgcctatatctgccgttgtatatggcgcattgcttgtgatgattctagaacgtatcgcagagaatgattctcaataagaaaagcgtgaggattacgatgcctcaatcgcacatgcagagcgtcatatcagtgagatcccgccgttgcggaccatgtttgattgtgcggaaaagttcggatgcctcacacttttcttgacgggaattatttactgtgaggcattgcgcaggttggcggccatggcgcggtcgcgcaagcctttggtgagcttgagaccgagggttacggcgatcaggactatcgtgcaggcgatccacagcgttcgaccgccgaagttgctgatggtccagccaccaatcagcggcgccagcgcaatcgataccgaccacactacgttgtagacgccctggtacgtgccgcgtgccgacgcgggtgccatggcggcaaccgtagtggtggcgatagggaatgtgcccagctcacccagcgtccacagcactacggcaagcgcgaatccgccccaggaatgggccgcggcctgcaccgcatagccgatgacggttacggcgaggcccatcaccagcacgcgtgaattgcccatgcgcgagaacagtttcatcgcgggaatctgcagcaggcacaacataccgccattgatggtgagcagcaccgaatactcgcccagccctagaccaaggtccgtcatggcaatgggcaggccggaggtgctttggaagtacacaaggaagtagccgaacatcagcagggagaagccgaggaatggcgtatcagtgagcacgcgccgccaattgcgagacatggagcccttggcactggcagccggtgcggcatccgagtgattcggcccctcgacgccggcgaattccgcatgcgtaacactgcgttcgtcttcatggcgcaccgcacttggcaccgatacagtaatccccaaatgccgcacctcgcggaagaacgcaatcagcaatatcgtgacggctatcatcaccgccgcttcaacgtagaacatcagcgaatacgagatcttgaccagctggttggccacaatcggcccaatcgcgtacccaaaattaatcgcccacgattgcagtacgtacgcacgttgctgacgttcggcgggcaccacatccgcgatatacgcggcgatgaccgggctgggcagtgaggcgaacgcaccatagacaaacagggccgcgcctaaagccacggggtcagtgagcacggaaacgaccagcagggcagccgctgcgccgatttcgccgatgataatcatggattggcggccgaatctgtcggacaaggtaccgccgaacaggcagccgatgattgcgccgaagccgtacatggccacgactgtgcccaccacaccctcatcgaggcgcagcgcggaaaccaaatatatcgacaagaatgaggtcacgaagcgacccatccacagaatcagaatcgccaaccataatccccaatacagcagggacagtccgaatatcatgcgctgcttcttcactctcaataccttaccggctaccgacggcggaatagccgcgttttggcgcggggtgctgggacaatagcacctatggctatcaaaaaaggaccgaccaaggggtcgggtggcaagcatcgcaacaaactgaagggttacggccccactcccaaagccgaggaccgcgtctatcacaaggcgtataaggccaagaaagcggccgaacgtcggcagatggccgacccgcgtctggcagcccgccgtcgagtggacaagttcgcttcggcggatacttcggatctggtgtacggccgtaattccgtgctggaagcactgcgcgtaggcgtaccttcttccacgctgtacatcatgtctcgtattgaacatgacgatcgtactcgcgaaatcgtgaaaatcgctggtatgaacggcctgcacatgctggaggccgatcgtctggagatggatcgtatcgcccgctccggcaaccatcagggcgtgattctgaaggtcgatccgttccagtactcctcgctgaacgagctggccgatcgtgctgagaagaaggccaaggcaatggaggccgcgaattcggcggccgcccgtattgctgcgcgaccgctgttcattgcattggacggcgtgaccgatccgcagaacctgggtgccgtgattcgttcggcggccgcattcggtgccaatggtgtgattctgccggaacgccgttccgcttcagtgaacgccgccgcttggaaggtgtctgccggtgcggccgcgcatatgccggtggcgcgcgtggtgaacctgactaaggcacttgagggcttgaaggagcgtggatactacgttgtcggccttgacggtggcggcgataagctcgtcggcgagactggctttgaatccgatccgctcgttgtagtgctcggttcggaaggcagcggtttgggccgactggtgcgcgaaacctgcgacgcgattgccggcatcccgatcagctcgtctgttgagtcgctgaacgcttcagtggcggcgggtatcagcctgtacgcagtgtccaacgcacggcgcaaggctgcggcggagtgattgtcgcttgaggccgtaataggttgtacacacaaagaagcccctctatttgaggggcttctttgtgtgatgggctcacctacagacagtccaccggattgtccgcttaatgactccacactgccgcatccggatcgtcatcggggttgtagccgtcgtcgtccgggtcgctgtaggtggattcgtcgtcaatgacgccggaatcggcctcttcgttaagttcggcgagtgccttggaatcaaggttgtagctcggcagaacgttgtcgatgtagctggtcacggcctcgcccatcggcacgtcgtggccggccttctccgccaggaaccagcgatggtcaagcacctcatggaagaactgagcaggctcgatctgggagcgatattcgcgcggaatcatacgcacggtcggctcgaacacctcgcgcatccaatcggtggccacgatttccagatcctcgccctcacgccacgtggaggcacggtaggcgtcaaggtcgttgagcagacgacgggcctggttctcctgcacgtcaaggccggtgaggcgcagcagcttgcggttggcgtagccggcgtccaccacgcgcgggcggaccagcacacgcttgccgtcctcggcggtcttcatttccagctcgtccacgtcgaagcccagctcgttgagcttgttgacgcgctgctcgatcttccacatttcgtccgggttgaacttgtcggtgtcggtcagagcgctccacagcgagtggtagcggtcgactaggcggttgcccacctcgatctcatccacgtcgccgggcagtagcttgccggacgccaaatccataagttcgccgatgatgttggtgcgggccaagtcgatatcgtattcgcgctggccgtcggtgagctggacttgcaggtcaccggtctcggcgtccaccaggaaggcggagaaagcgtcggcgtcgcgcaggaacaggacgttcgacagggacacatcgccccagtagaagccggccaggtgcaggcgcaccagcagcacggcgagggcgtcgatcagtcgttcggcggtgtccgggcgcaggttgcgggcgaacagcgcacggtacggcagtgagaacttcaagtgccgggtgaccagaatcgcctccagcggctccccttcacgggtgtgacggccggtgaccacggcgatcggggtcacagttggcagttcgagcttctgcagtcgacgcaggatctcgtactctcgctcggccacctggcgcgtgatctccttcatggcgtacacctcgtcgcccacgtgcacgaatcgcacgacgtggcgggagatgcctcgcggcaggttggccagcaggtcctcaggccaggtggccaagggcttgtgccagggcagcgtgaacatctttgggttcgagctggcggcggtgattttcagtgcttgcggttccgctgaatcggcgtgttcgtcttcggctttgacagacgtggccttcagcgcacgcggatccatctggggcaattcgttcaactccatgtgttcgattttacgtgtcgttcgcgatgtgtgctccttggccacgacttcggcgcgttatgtttacgggaaaacaccgtttggtctctccctcagaccgtctagaaggcaaaaagaaaagccccgcagctatgcagggcctttccaacgaggccataagagaggaagagaataacctcgtttaatggttgacgaagcgattagacctcgccaagtatctattagttcagacgcagctcagtcgacggagcgaacaggtgcatcttggccgggtcgatcttgatcttgacggtcgcgccaaccttcggcagcgcacgcggattcacacgaatcgtggtgagcttgttctggtcggacatgacctgggaggcctcagcggcggagccatcggtgacgatgttgccgtagatgtagccatcggagcccagatcctcgacgttcacgaccttcagggagaaggcgttcgggtcatcagccggagccaggccagcgtcctcaggacggaagccgaccacgatctggccgttgtcttcggcggtgagcttgttgacggcctcagccggcaggtccacggtgtcctcaccgatcttcgccttgccgttgaccaccgggtgggtgttcaggttcatcgacggggagccgatgaagccggcgacgaagacgttggccgggcgatcgtacagctcggtcggggcgccgacctgctgcaggataccgagcttgatgacggcgatgcgatcgcccatcgtcagagcctcggtctgatcgtgggtcacgtacagggtggtgacacccagctggcgctgcagagcagcaatctgggtacgggtctggacacggagcttggcgtccaagttggacagcggctcatccatgaggaagaccttcggctcacgaacgattgcacggcccatggccacgcgctgacgctgaccaccggacagagccttcggcttacgatcgaggtactcggtcaggtcgaggatctcagcggccttctcgacgcgcttgcggatctcttccgtcggagtgccggcaatcttcagagcgaagcc

SEQ ID NO: 493 - DNA, 8702 bp, Unknown
  R48_24m  MAG No. k141_37505
gtggtcaaactccaacctatcccaccacagatccccgcatcctgcacaccatccgccgatccccagacggctccacccgcttcgatttctacctcaaccgctcaaaccagcccgtcgccatcaacggtgtggaaggcaagcccatcatcgcccaccgttgcgagacggatgccgtcggatatacgctgaaccgtaacgctattcttatcgctaaaacgtcctgctagaccgcgctagaatggcaatgttgtccggatggaggagcgcggcatgagcgacgagaaaacagccaagcgtcgagtgacgctacgcgatgtcgctcaggccgccggtgtatcgctcaaaactgcgtcgaacgtgatcaatggctccgggcgtatgaccgatgagacccgtgccaaggtcgagtcggtcattaaggacctcgactaccgagtcaacgtggccgcccgcaacctcaaccgcaatcacaccggtttcatcacccttgccgtgccttcgctgattccgccatatctggccgagttggccaaccgcaccatcgaggccgcccgccagcgcaactattccgtatacgtcaccacgtatgcggaaggctccgcgaaaggcgcgcgcgatctgctgaagaagttcaactccacggtgtccgatggcatgatcctttccatgagcgaggtggaaaacatttcgcccgatgatctgaaggttgattttccgctggtcatcgttggcgcgcgtaccacgtggggcattgtggatcacgtgaccccagacgatgtatccgcagccgccatggccgcaggctacctgtatgaccgcggttccaccagacttgcagtgatcggtgcccgtgacgtttacgacgaagatgcattgctgaatgccgtagaaggcaacgcgcagctgcgtctgcgcggcatcatcgaagagacccgtaggcgtgggctctccttggatccgcagctgattggcaacaccgatcaggattggaccatcggagccggtgcccgtgtgacccagcggctcattgattccggcgtgccattcgacggtgtgattgccttgaacgatcagttggccatcggcgcattgaccgctctgcgcaccgctggttatgaggtgcccgtgcaggtgcaggtcatcggcttcgataacaacgaggaagccccctacctgcagattccgctgaccaccatggattcccgccttgactggacggctcccacggcagtgaatcgcatcctcggacgcatcgacggcagcatcaccaagtccgaactgctcaccaccgaatcccaggtcatcgcccgcgcctccacacgctaaacaacattgctgtaatgctggtgttgctgtactgggccgtacgaggcgttgatacaccggttgaccaacacggcataaagtgctaaggcgacgattgcgtggtacacagctgtaccgcgtggcgcgtaaggaaaggaagcgccaagcatcactgggcgttcgttctgagcgttcaccattcaaaggagaaaaagcatgcgccgaaataccgcgcttactcgcattatggcatccggcgtggccgccataatgctctgcgcaggaggcacgttcactgtaaacgccgccgaagaagaaccagttaaagccgacgtctcggtcaaggccatccaaggcttaagcgatgatttcatcggcggtatggacgtctcatccatgctctcgctggaagaaagcggcgtcgcgttcaagaacgccaatggcgaggtcgaggatttgttcacgttgctcaaggaatccggtgtgaactatgtgcgtctgcgtgtgtggaacgatccgttcaccgcagacggccaaggatatggcggcggcaacgtcaacgccgatcgcgcactgaccatggccaagcgagccacggcagcagggctgaaagtgctggtcgacttccattactccgatttctgggccgaccccagcaagcagcaggtgcccaaggcgtggaaatcctttgaaggcgacgcggacaaaaccgccgacaccgtatacgactacaccaagcagactctgaccacgttcaaacaagccggcgtggacgtcggcatggtgcaggtcggcaacgaaaccactgcgaaaatcgccggcatctccggctgggacggcatgtccaaagtattctccgcaggttccaaagccatacgcgaagtgctccccgaagccaaggtcgtcattcatttcaccaacccggagaaagccggcacctacgccacttacgccaaacagttgagcaaccacaatgtggacaaggtctcactcgtcaaaaagaccgaaactccggtgaagccatccacggagaacctggacaaggccgtggccgaagccgggaaaatcaatcgcgatgagtacaccaacgagtcgctcgccaaactcgatcaggcgcttgccgccgctgacgtgctgcttgccggcagcacctacaccgagcaggacgtgaacgatgtgatcaagcttgttgccgatgccattgccggcctcgcccaaaaggaggtctccagcctgaccgtcacgccaagcaaaaccacctatcaggtgggcgatgccatcgatgccgaccatgatctcaaggtcgtgggcaactattccgcaggcatgggcaacgtgacgctttccgctgaccagttcacgctcgattacgatttctccgctcccgctgatgcggcgaaggttaccgtaacgctcaagtcgaatccgaatgtcaccgaaacctatacggttgcggttaccgctcgggccgaagatggttccggcaacggctcggacggtgcgggtaatggcggggctactatcaatcccgatacgggcgagggcgataagaccaacggtgcgaatggcgacaagatcactggtgtgctgagcaataccggtagcgcggtgactgccgtgggtcttgcggttgtcgttctcggcgtggccggcggggtctcgcttgctttgcgtcgtaagcgctcctgatagagactgatgcggcattatgatgcggttgccggcagccggcaaccggctgtcagatgccatctgtcggctgtcgtttatcggttgtcggctgtcagatgcgtctgtctcggcgcagcgatgcgattctgtcccggttcgtgcatcaatcgtttgatgtgggtaccaggacagaaatcactgtcctggtttgcgaaaacgggtgtttttcgcgtaccgggacaattcccgttgccccggtttgcacgtcaatcgttctacgtgagaaccgggacagtatgttgatttcgggattggctgtattccgccgattctgtttgtcggggtatgtggactttggggattgtcttgtcctggttctcgaaaatggcccgaaattgcgtaccgggacaacgatttctgccccggtgcaaacgtcaatcgattgacgcctgtaccggggcaaattcgcgcccgggaacaatagggcgagggccggtcgcaggagtagagcgtgatgttgtcatgattgcgcccggctctcccacacggaaggccgggcgcaatcatgccgtttggttgcagcacccgcacatcgcctgcataaccgtgtacagtggcgtgtagttgcagtacatgaaggagcatcacaagccatgaccaacggacacatcaatcccgccaacgtgccggacatcgccttgaaagacggccattccattccgcaggtcggccttggcgtgctacgtatcgatgacgagggcgtggcccctgtcgtcgaatctgcgctggaagccggataccgccacatcgatggcgccgccggatacaacaacgaggccggcgtgggtcgtgcgctcgccgcttccggatacaacaccggcgccaagcgcgagaccctgtgggtcaccaccaagctgcgcgactccgagcagggctacgactccgcgctcaaggcattcgacaactccctgaaactcctccagctcgattacgtggacatgtacatgatccattggcccacgccgttcgactggcgcagcaccgacacctggaaggcgttcgtcaagctgcgcgacgaaggcatggcacgcacgctcggcgtatgcaacttcatgcccgccgatctgaagcgtctgcacggggagaccggcgcatggccggccgtcaatcagattgagctgcaccccacgtggcagcagcgcgaagtggtggcgttctgcaagaagcacggcatcgccgtggaggcctactcgccgatggcgcgtggcgccgacctcaacgccggcgacggcaccatcgagaagatcgccgccgcccatgaggtcagcccggcccaggtgattctgcgctggcacatcgaaaacggcacgatcatcatccccaagtccgtgcatgccgaccgtcagagggagaatctcgacctgttcggcttcgccctgaccgccgatgaacacgctgccatcgacgccctcgacggccccacccgcgccggccacgaccccctcaccttcacctatgcgtgattgatggcacgtcgtaacgcccacttccgccgtcgtttcaacgcctctggaccgctggagcgcgtgctgattctcatcgttctcgccgtagcaatcggcgtgaccatcggcctgttactgccgcaggtcagctccgacgtggccaaaatcaccggtggctacactgccaccggttcagccgccgacactttgaacgcgctcgccgtagacgacaaccaaagctcctccggctacgaccgcgattccttcggtttccgcaccaccgacgtcgacggcaatggctgcgacgtacgcgacgacgtgctcgcccgcgatctcacggacatcacctacaaatacgccggttcctgtgtggtcgagtccggcacactggccgatccgtacaccgcccagaccatccatttcgtacgtggccgcgccaccagcgccaaagtgcagatcgaccatgtggtggcccttgaaaacgcttggcaatccggtgcgcacgactggtccactgccaaacgccatgaattcggcaatgacccctataacctgctggccgtcgacggtccggccaatcaggagaagggttcggcttccgccgcctactggctacccaccaacgccgactaccgttgcgactacgtggcccgccagattggcgtcaaagacaagtaccagctcaccgtcacctcccaagaaaaggacgccatgctcgccgtcctccatacctgcccgggccaggccgtgcccgcagacgaataggggctaccgctcaggattgttgagcataggtgcctgcccctcgtcataagcgcgcaggagccgtcggagcaaaaatgtggtgaagtatggtgcggtgaacacgtgttcgctgctaccgatattgccggcggatagtttcacgccgaactgaatttccggataagaatccgaagcgattagcgtccgcatggatttggcggtgccttttttcgatttcacctccaccggcaccagccattcgcgcgtgcggacgaagaaatcctgttccagtgtggaatcctcttttttgtagtagtacaggtcatagccggatttccgtagcgcttcagagacgatgctctcgtacatagcacccttatagacaccaagattacgattggcccgcagatcatcactggcctcgtcgtcaagcatcgctacgaacagaccggtatcgccgaaatatatcttgaacttgttttcgtcataattgcctttcaacggcagttcaggataggacatacatcggcagatattcaccattcccgaggtctcaagccattccacgcatcctcgatagtctttgaaacgcgctccgctggcaaccttgctgatttggaacttcttgttttccttggcgagttgcacgggaatatggttgaacacgttgagaattcgtgtctgatcgagtccttgcgtgtatttgcggatatcctcctggtagtccaaaataagctggcgctgcaattgcagtgttccctcgaacgtgccagtgcgtatatgggaggcgacaaccgcaggcatgccgccaagcacgcagtaatccataaatgccgtggagaagacgttcatttccacttcagagaatggcgtagcatcacacaggtgggtgaacatgctttcgatgacggcctcatcgtatccgcgagcccacagaaattcttcgaagtccaacgatcgcatttcgtagtcggtcttatatcccacgctattgctttcgatttgcttatagctgatgcccaacattgaaccgctgcaaatcacatcatatttgccgtcgattttaaagaacttcagtgcagtggcgatatcaggatgggcctggatttcgtcgaaaaagatgagcgtatcgcccggaatgaactttttggctgggtcgatcagggaaatattgcggacgatggtattcgcgccataaccgtccgcagtgattgcacgatatttcggttcctcaacgaagttgatttccactaccgaacggtagttgtgtgcggcaaagtaatcgatagtctctgtcttgcctacttgacgagggcccttgatgattagcggggagcgattcgggtcggatttccatgcattgagataggcatcggctttgcgtttgagatacatgaggagcccctttccgaattactgctatatcaatgattttacactttcatgagcgagttttcggcggtttttcacatttcatgagcgagatggcgggaaatgccagctgccagtccgccggtcatccatcaatcgtccgcagattgtccgtctgttgactcgggaaacatgcctgcgctataactgtgcgcggtatgaagggaacaggtacaaacgatatggcagtaacacacaccgaagcagatgccactgcggcaaccgctatgacgaacgctgtggcagacatcgaacaggaaacaccggaaatcgggaaggaacgccagcttgccggagtcggaaccggggccggagcagggacgaataacaataagaagccgcatgaccatgcgctggccagcatccttggccccgcgttcgtggcggccgtggcctacgtcgatcctggtaatgtggcggccaacatcacctccggcgcacgatacggctacctgttggtgtgggtgctggtgctcgccaacgccatgagcgtgctcatccagtatcagtccgccaaactcggcatcgtgaccaacaaatccctgccggaactgctgggcgagcgtatgagcgatgccggccgcttcatgttcttcatgcaggccgaggtcatcgccatcgccaccgatctggccgaggtgatcggcggcgccatcgccctgaacctgctgttcggatttccactgttcatcggcggtttggcgattggcgtaatctccacggtgatgctgtggttccaaggcggcaagacacagaccacattcgagcgcatcatcatcgtgatgctgctgattatcacattcggcttcatcgcgggtctgttcgtagccccgccgaaccccggcgaagtggtcaaaggcatgattccacgcttccaaggtgccgactcggtgttgatggccgcctcgattctgggcgccaccgtgatgccgcacgccatctacctgcactccacgctggtgaacgaccattacgcaggcggcgaaaagccgtcgatcaaaacgcagctgagaggctcgaaaatcgatgtggcctgggcgctgttgctggccggcaccgtgaatctggcgatgctggtgctcgccgccaactcgctgcatggcatgtctggcacggactccatcgacggcgcacagcgggcgatcacgcaggtgctcggcccggtgatcggcacgatcttttccatcggcctgctggcttcgtcgctgagctccacatcggtcggcacgtacgccggctcggaaatcatgcacggtctgctgcacgtcaacgccccgatgtgggcctgccgcgtggtcacgctggtgccggcactgattgtgctgtggttcgccaaggacccgactcaggcgctggtcatcggccaggtggtgctttccatcggcatcccgttcgccgtgattccgctgatgcgatacacgcataacaaggaactcatgggcaagtgggctgatggaaccgtcaagcacgtgatcttcatgatcgtcgtggcgctgattgtggcgttgaacgtgctgctgattgtcctgacgctaatgggcagggcgtaatagactccagctgaaatcctgcgatagcacaacagaagccccggtgttggaaaccggggcttcttattatgttgagaatggttggatctgccgtcagttcgcagccatacgccgcgcacgccgttcgcgcagcgaacgcagggaaataatgtctcgcgtacgaccggcaccgtcgcccttgacgccgaagaacaccataagcaccatcgcgaagcacagcagcgcggagaatcgcagcgcccactggatgccgaagatggaagccgcaacggctgagactcccgcctgatgcctccatgcggcgaacgtttccataagaatcaccaacacaggtgcacccacggcacctgcgatttgccgcgcggtgttcgtgaccgacgatccggcagacacctcatccggcccgttcaggcagttcagcgaccatgtggtaatcggcataagcaggaatcccatgccgatctggcgcgtgaactggcagatcgacacccaccaa

SEQ ID NO: 494 - DNA, 10789 bp, Unknown
  R48_24m  MAG No. k141_39085
cggcatgggcatcctgcccgaccatgagcctgtgctcacggtgatcaagcagggtacgctcaccgtggttgagcccgatggcgatcgccacatgttcgaggtgaccgacggattcatctccttcgactcgaacaaactcaccgtggcggtcgagcgcggccacgacgtccagtactccggcaccgccgagtgatctgaaccaactcctcaaggggctctctggttttccagagagccccttttgctatgtatgccatgtgttgcgctacagtggtggcctatgcgagttattgttgccgactgttcggccgagtattcgggccgcctcaacgcctcactgcccctggccaagcgtgtattgctgatcaaggctgattccagcctgttgattttctccgaattgggctcctacaagccgctgaactggatgaccgcgccctgcacgattcgtgagatcgacccagccgccaaatccgcgcaacattcccgggaaagtgtcgctggtggggctgtggatggtgattccgcgacgcattccccggaaagtgtcgccgctggtgagccggaaaaggtgctacgtgtcagcgccgacaagggctctgacattcttgaagtgacgctgcaacacatctattccgaccaaacctatgatctgggcgaagatccgggtctcatcaaggatggcgtggaagaccatctgcaacgctatctggccgagcagatcgagcgtatcggcaagggagccaagctggtgcgtcgcgaataccctaccgccattggtccggtggatatcatggccgtgaatgccgagggcgagcatgtggctgtggaaatcaaacgtcacggcggcattgatggcgtcgagcagctgactcgctactgcgaactgctcaatcgcgatccgctgctggccccggtgcatggcatcttcgccgcacaaaccatcacgccgcaagcccaggtcttggccaaggaccgcggcttcacctgcctcatcctcgattacgacgatatgaaaggcaccgaggacgacagtctcaggctgttctgattgttcttggcttccctcttgaaggggagttttcgaacgtacatagagagactgaggggaggcctcacggtatattccgtgaggcctcccctcagtcagtttcgctgccagctcccctcttggggagagccatcgagattgtttagtacgcggcgagaatatcgattacgaagaccaacgtggagttggcgggaatcgaaccttgctccttatctccataggcctgatccggcggaatcaccagcagaacctgagagccgacggtctggccgaccagacccttctgccagccctcgataacctgatgctggccgctggaatcgctgaacagatcggcgtcgattgtggaatcgcgatcccaggacgaatcgaactgcttgccatccgtaagccaaccggtgtacttgaccaccacggtgttcttgtcggtcagcttggcgccgttacccttgatcagcgtctgcgagatcagcgaatcaaccgaaccctgaccgttcatgtcaatggacggcttgccattcttggctcgcgtcaccttcggcagattggccggcacatccttgacttcctcgccagtggccttcttcaggtccttggacttggatacaaacgtcatcgccaaaatgtaagagtatccggacgaatcctgagcgttgacgccaaagccgatcgtggtgttgatcttggcacccttgatctggttgtagtaggtcgaggagagggtcttggaatccaccttcagcgagcaatccggcgtgttcttggtccaggtgtccatgagctcggtgccgtctttaacgttgagcgcgatgccttgggcgcagacgcggtcgccctcctcgattacgtcgccatcgcccttttgcagcaccacataggagccgtcggacacggtcatcggcgtattaaaggagatggtcggcttctcgccgagcttgcccttggcggtcacgccggcaatttgccccttcttgtcagaagagtcggaagaggatttcgagtccgagctcgaactggagcaggcagccagcgatacgcacatcgccagcgagcaggcaagagcaacggccttgccgagaggggataacatagatttaacagacttacgcatgacacaccaccctactggtgaaccttgattttctgcgctcctaggtaataaacaggtgaagattgtagaatggttaagttatgagtgctgaagaacagactacaagaccggataagggcgccaagcgtccatcccgtcatgccaagatcatgcgtggagtggtgacgcctatcttcggtctattggccgtggcggctgtggtgttggggtacatgaatgccacgatatggaagccctccactgaaatcaccgcttccgcaaccatgagcggctcccggtatgccgtcactgatccgaatgtgctgaccttgttggatcagaacgccacgataaccgtggactcgggatcctctcaggacgaggcgtgcgtggcgttgggtccgtccaaggatgttgccggatgggtcgcgtccgagaagtcctatacccgtatcaccggattggcgtcatggagcgagctgagcacccagaagggaagcagcacgagtcagggagcgcctgccagtgccgatgacgcggtggcgttcaaggattccgatatgtggactgccgtgaaatgcggcaccgggtccgtttcgctggagagcaagaagaccggcgcctcgacggtggccattgtggatttgggtgaaaatgccaccaacgccaaggtgcagctgcactgggtgcgctccgaagtgccggactttgcgatgccgttctatctgtccggtggattgctggccgtgctggccgtattgtgcgcctccgtgttcgccatgccgccgcataagcgccgcaagcgcatggtggaaggcacggcaagcgccgtaattgaggaagaggcacccgccagcatcgcagtgtccgggaagccggatggtgcaagtcgacgtaatcgtcgccgccacgccacaaatcggcgttcgggccgtgcgtcctcgcaatctgaagccaccgaaacaccggttatcatcgacccaagttcacgtaacctggtcgccgaccagcagactggtgccgagagcggcgctgagaccggcttcagcgccggcgataacgaatcgacttcggtaatcacccctgacgaactgcaggcctacttctcccgcttggcccaagaggtcaataccggagacgactcggccgatgacggacaggaggaaagctgatgaacaagcgatggaacaaactgtgtgtggccgccctcgcctgcgtggcgttggtcgtgccgttgaccgcctgtgaaggccggctgccgacgccggctgctgatacctccaccaaggttgcgccggatttgaccgaggcacaggagaagaagattcgcctgaagattctcaagacgatcgatgaagccgatcaggccaagaatcccgatggatatgcggccgttatgggcgggccccagctggacattcgcatcagccagaccacgatcaaccagcgcggcggcggtatgtccaaatacgcgaccattcccaaggacatcgcccagacggtgattcccatggacgacggatggcctcgctcggtgttcaccatcacgaccaccaccgaagatcagcagtccaagcgtttgctggtcttcgatcaggaatccgcccggcagaattacaagctgatggccatggctcgactgtttgagggggccaagctgccgaagttcgagattccgactattggctcgcagatgggcactgcaaaggatgagaagctggtggccactcccgccgatgccttgacccaatacgccgatgtgctgcagaacggctccaagagccaatacgcttccaagttcgcagacgatctgctgcgccaggaactggccaataccacggccaaggtgcaggaaggtatgcaacgcaacaacggtacgcaggagcagaaattcaccgttgtgcctgaacagatgtgggtgatgcgtgctgcagacggtgccggtgatttggtggttggccgtattaacggcgaatggactcgcaaggcgggggatggccgcgaatcgcagccggcttccgacgacgagaaggcgctgttcaatagcgacaagtacaccagcaccatgaaggtcacgtatgtgaacgtggtggccttgtacattccgttggcaagctccggtgagcaaatcaccgccgtgggtgccgaccgtcagccggtaaaggtcgaagcgctgtagttgttgccgccgcccaccgcgcggttaacgccccaccacgatatgattcatccaccacgatgtcggtaagttttacctttcgcacaatggtgccgttttgagtcacatcgtggtgggcgttttgctacgtggtgggaatttcaccgcgtagtggaagaatccctacgtggtgggaatcggcattacaatcaatgtcagcaaatgtgattgttgttgtacgcgaatcgcgtggaatcgggaggcattatggcagagcagcagttcaatccgggagtctcattggcgggcgccgtcgatttggaggcgctgaagcatcaggtcaaggccgagcccggccaggcgggtggcgctcctgccgctggtgggtacgtgatcgacaccaccgaaaacaccttccaggcaatggtgcagacttctgcgaccttcccgatcctgctgctcctgtggataccgaccgatgaccgcctgttcccgatggcccgtgcgttgggcgacgcggtgaacgccctgaacggccagattcagctctcccgtatcgatatctcgtccaatccttcgattgcccaagcgttgcaggtgcagggcgcgcccgcactgttcgcgttgattgccggccgtccgatgccactgttgcagggccttccgggtgacgacgagctcaagcaacttaccgacgaggtgattccgaagatcattcaggccgccgcgcagtctggtgtgaacggtaccgcgccgtactcgggtgatcctgattccgatgccgccaagagcgctggtgccaccggtgccggcgcgggtgctgagcaggtgccgccggagcatgccgaagcccatcgtttggccgaggagggcgattacgccggtgccgccgccgaatacgagcgcgtgctcgaatccgacccgtccgatgcactggccgcccgcgaacgtgcgaaggcgctgttgctggcccgctccgggtccgctgatgtacgtgacgtgcgtgccgctgccgccgcagcgccggacgatgtggaagcgcagttggctgtggctgatatcgacatgatcggtggccagattcaagacgctttcgaccgtttgctggactttttggccgccgggcacaaggccgatatcgagccggttcgcaagcgtctgctcgaatacttcgccatccccgaacccaccgacccgcgtctggctcgcgcccgccgtcgcctagccaccctcatgtactgattggttttggctcccctctttgaggggagctgtcaggcgtagatgactgagggaagcgcgcgaacgtacttgattgcttcccctaaaccatccgattcttcccgaaatattgctggaaccttggcccctccagcgccagttcctcctcgaaatcatccgcccacttgcagaacggacggttggcgagaccatcgttattgaatcgcgcctgatcggtgatttcggtgatgcagaatttcggaatcgtcagattggtaaccggcccggatcgttcggcctcggctacgatcagcggcgcgttcggcccgccgaacacgtccacgctccagccgtcttccgcaatccacacggaataccggttcttgatgattaccgagccgccgcgcttgatgagttcggcggcgatgcgcgtgtcgatctcgcgctcgacctcgtagcgcgtgccacccacggacggacctttgacggtgacatacgcttccgagaaccggtcgcggtactcgtccagcacggccaccggatttacgtcgggcgtcatgtcgacgtgaaccttgtgcgagaccagccgcacgcgcaaggcgtaattgtcggcatgcacgtagtagctctgaataatgagggtcggggcgtcgccgtcgtcgtattccgccggcagctcgcggcagaagaagcggcgttcgtattcgaagtcatctgtaggttccgacataaccccattgtagagccgatgatggcgattttctcgttattttggcgacgtatgtgcctcatgcagcgtgatgtggtgtacagtaaagaagttgctcgggtttgtagctcagtggatagagcgtctgtctccggaacagaaggtcgtgggttcgatccccatcaagcccaccagcatggctttcggctagccgccggaagccttttgcatattcggcgcgtgatattaagcgcgtgcaaagctggtgctggtgctggtgctagtgctggtgctggtgctggtgtcggggtcggtgatgccggctcgcttgggtcgtggaaaaaccgcccggtttggcgagaacggtagtcgaatcgtctggaatcgtctggaatagcaaggaatagtctgttgatggccgtatgccgggcatcatgcgcgctaaacgcgacttcgctcagtagactgctacgtaatcggcattgccaatcgttgctgatcgtgcgattggtcgtagccggtggtgatgtgtaccggcgccggccgcagcaggtgggcgcccccaagatgagaaggagcacaatatgagcgaaaagatggaagccgtagccacttccgaggcgccggccgcgctgggcgcatacagccaggcggtgaaggccaatggcttcgtgttcgtatccggccagctgggcattgatccggccaccggcgaactggcgggcgagaccgctggagagcaggctgcacaggcgctgaagaatattaagcacattctcgacactgccggtaccggcattgagcatgtgtgccgcgccaccatctacctgaagaacgtcgaggacttcaaggaagtggacgcacgttacgctgaggcgttcatcggctccgtcaagcccgcccgcgtggcctttggcaacaacatgattcccaagggcgcgctcgtggagatcgacgccatcgcggtggagtgattcgaacgtttccccggcggcccgtctgcgcgcatggtgtgtgcagacgggccgccgcgtattgtgcgacgcattccggggaatgtcgcgctaggcggggtgcgaggtgtggttccgcggcacattcccgggaatgttgcgctggaatcgttgggcggtggtccgtgccacaatagagaccatggcatccaaaggaaaaccgtcgccgcgttcggccgtaagcccgctgagtgatgagcaggtcaagcgtctggccgcccgccacacgcttgtggactcgacacagtattacccgaccggccctcgcacgcccaatcagccggaaatcgacgcccagaatcccaaggccaccaaacgactgctgggaggggtgtccattgtgttccgcgccagctgcaagaccaaggcctggggcctggaacaggtgccggaaaccggaccgttcatcaccgccgccagtcatatcaccatgttcgatgtgttcgtgccgatgatgagcctgttccacatgggccgccgcccccggtacatggccaaggccgagatggcgaagtggccattgatcggcaagtggttccggttggtcggcatgcagccggtgcagcgtcattcgggcaaggccaagcagatcgaagagacctcgattgatattctgacgtccggccgcccgctgacggtctggccggaaggcaccgtgacccgcgacccgaaaaagtgggtgatgagcattaaggagggcgtgggatacatcgcccttgaatcctcgcgcagactggggcatcaggtgccgctgtacccggcggtgacgtggggtgccgcctccatcaaccactggtggccatggccgcgcaaaaacgtggtgatgtgctatgaccatgcgctcgattactccgatctgcttgccgacatggactcatggggtgaagaaccgcctgccgaggccgtgaacgagctgatgtggcgcgtgctcaaacgcatgaacacagtactggaggaaattcgtggcgagcagttccccgctgaaggctactgggactaccgcagcatgagtcgcaagccttggccggaagccggcggcccgttcccggctgagaagtagccgcaccggttcccgtacggggagcctaggcgagtagcatggcacaagattgtgccgatgaagttgcgcgacaagcgaaggtaggaatctgatatgggtaaaaatataacggttctcggcgcaggagcatggggtactgctttcggccaagtgctggcggacgccggcaacacggtgaccatgtgggccaaggagcagcggattgtcgagggcattcgcgatcaccaccacaacgccgtgcgcctgccgtccgtcgaaaagttgccggacaacatgaccgccaccggggatcgcgccgaagccgtcaagaacgcggacatcgtggttgtggccatcgccgcgcagttcgcgcgagtggcactcgtcgaattcaagggactgattcccgatcacgccatcgtcgtcagcctgatgaagggcatcgagcgtggcaccaacaagcgtatggacgaagtcgtccgcgaatcccttgacctgccggccgaccggttcgccgccatttccggaccgaacctgtccaaggaaatcgccgatcgtcatcctgccgccaccgtggtggcttgtacgaacctcgataatgccacgaaggtggccgaggcatgtaccacctcctatttcaagccgttcgtgaccaccgacgtcatcggcctggaaatgtgcggcagcctgaagaacgtgaccgcgctggccgtgggcatggcccgtggtgccggctacggtgagaacaccgcagccatgatcgaaactcgtggactggccgaactgaccgcgctgggcgtagccgctggcgccgatcccaagaccttcttcggcttggccggtgtgggtgatctcatcgccacctgtggctctccgctgtctcgtaactatacgttcggcgcgaatctcggcaagggattgacggtcgaggaggccaccaaggtcagcaacggggtggccgaaggcgtgcccaccacggatgcggtggtggctcttggcgagcagcttgatgtgccgaccccgttggcgtatcagatgagccgcgtgctgaacgaaggcatttcctgctcggagatgcttgccggactgttcgggcacgaggttaccggcgaataacgagagaagcgacgtatacgtggcgtatacgttgtacgtgcaaagtcgtgtggcgtatacgtcgttgacgtgcgcgagtagactggtgtgcgtctcttgtgcgcggcggtccgagcgcggttcggtccggttggcggtgcaaagcataggcttgaaaacggttgtagtttcaataaaaggatggttatggccaagaagcgtgttgtggtgctctatggtgggcgtgcagacgagcattcgatttcctgcatctccactgccggtgtgctgggggccatggacactgaacggttcgagccgattccggtcggcatcaccaaggacggcaagtggatcatcaacggcgaagatcctcgtggctggaatctggatggcggcgagctgccgaccgtaaagatcaccccggaatcgcgcccggtgatgcttgacccctctcgcggccaggacggtttcttcatcggcgagcccagccgcatcaattccgccgattccggcttcggcaccagcttcgtcagcatgtccgacccggaaatgcaccatgcgctgacctcccttggccatgtggacgcggtactgccggtgctgcacggcccctatggcgaggacggcacggttcaaggcctgctggaaatgatgggtgtgccgtacgtggggtgcggagtgtttgcttccgccgcctgcatggataagcattacaccaaggtggtgctgggtgccgccggcattcccaccgcgccgggtgtgacggtcgatgcgcgcaacttcaccgccgccgatgtgcttgccaagatcgaggacgccggtcttacctatccgctgttcatcaagccttcgcgcgcaggctccagcttcggtgtgaccaaggtcgagaaagccgatgaccgagagacccagcaggatcgtctggccgccgccatcgccaccgccggcgagcacgattggaaggtgctcgtcgaacaggggattgatggtcgcgaaatcgaatgtgccgtgctgtgcccgaaggccggtgacgagcccgaggccagctggcccggcgaaatcgtgctcgatcatcagaacgacgaccagttctacgatttcgactccaagtacatggatgcctccgccagccacgtggaagtgccggccaatctgccggtcagcgtgcttgaggacgtgcgtgacgtggcccggcgtgcgttcaaggccgtggatggtgccggcttgagccgtgtggacaccttcgtgacgcctgatggcacggtgatggtcaacgaaatcaacaccatgcccggcttcacgccgatttctatgtatcccaaggcttgggatgccaccggagtgagctacaccgaactcatcacgcgattgattgagggcgtgctgaggtaagtgtggtgcggaatcggc

SEQ ID NO: 495 - DNA, 10246 bp, Unknown
  R48_24m  MAG No. k141_39234
caaaggccctcaagagagctcgcccaccatatgcgccacaggccgcatacaccacatagctggtcacagccattcaagagaaagacagaggttcatcgtgcagttgcgttccgattcccgttcccgtctcggccgattggtgaaagccgtcgccgttaccgccgcgctggcgctgagccttgccggctgttcctcaggttccgacaacgcctcaacggatggccaaaatgggtatggcaccgcgagcgtgcagctctcctggctcaagaacatgcagttcgcgggtatgtacatggccgattcgaacggctattacaaggatgccggtttcgacaaggtcgatctgatttcaggtggttcctccgcgaccagcgccgaagcggccgtcgtcagcggtaaggctctggtcggcgtcagttctccgctgatcaccgctccggccatcaacaacgaagacgcctcgctgaaggtcatcgccgcgctctatcaggtcaacccgttcgccatcgtgtcggccgaatccaagccaatcaagtcggccgacgatctcatcggcaagaagatcggcgtgagcgactcgaacacactggtttggaacgcattcctcaaggccaacaacatcaatcccagcaaagtcgaaaccgtgccgttctccgacacgagcatgctgaccaccggtcaggtggacgggtacatcggttacacgaccaccggtgcggccgcactcaatgcatccggattcaaggcgaccgaactgctgatggccgatgccggtctgcccatggtcggcgaaacactcatcaccacgcaggacaacatcgacaatcgtcgcgatgcgctcaaggcgttcctcaaggccaccatcaagggctggaaggacgcattgtccgaccagagcaaggccgtcgacctgacagtgaacgattacggcaagagccaggaatacgatccggaccagatggcgctgacgctcaagcgcgagcaggcaataatcgaaacggacgagaccaaggccaatggcctgatgaccatcagcgacgacctgcaggaaggcaccgtcaagacgctcgcctacgcggacatcaagaccgacaagggcgcgctgttcgacacgtcgctaatcaacgaagtctacaaggaaaacgcggatctcaaatgagcgttgaagatgtgaacgagctcgatggctccggcatcgccatcgagcatctgaacaaggaattccgcgtcggaaccggcaggaccttccaggcgatctcggatatcaatctgaagattcccgcaggagcttttgtctcactgatcggcccctcgggttgcggcaagtcgaccgtgctgcgtattctcgccgggctcgagacgcccacctccggaacggtctcggtcaacggcgccaccgtcacgcccggttcccccgcggccggtctgggcatcgcattccaggattcggcgttgctgccatggcgttccgtgcgccgcaatatcggactgccgctggaaatccagaagcgcaaggacgacaaggtggtcgacgatctcatcgagctcgtcgggctcaggggattcgaaaagtcccgtcccggccagttgtcgggaggcatgaagcagcgcgcttccatagcccgcgcgctgacggtcaagccgaagttcctgttgctggacgagccgttcggcgccttggatgatatgacacgccagcgtctgaacttcgaactgcagcgcatctggatgcagcgttcggccaccacgctgatggtgacgcacggcatttcggaggcggtgctgctatcggattacgtggcagtcatgtcaacgcatccgggccgtatcgtcaaactggtacgcatcgggctcgaacgcccgcgcacggcggagacgatgcgctccgcggaattccatgaagcggtggactacctgagttcgttgctgttcgatcagcagcagacggcggacggccacgccgacgacggggagcgctgatcacgcatgctttcctcgattcgcatgacgctgcgcaaaccgtgggtcggcggcaccgtgggcatcgtccttctgctggccgtatggtgggtctccaccacgagccatgagaactctgccttcccaaatcccgtcaaggtcgcgcgttccgtagtcgatgacggttggggtttctacagcgcgaacatcggcagcacgcttggccgtgccggatggggatacctgatcggcaacctggtcgccttggccttggcctccatcgtgctggtgttcccccgcttggaggaaatggtctcgcagatgggcgtgatcacgaactgcctgccgatcactgcggtcggcccgttggtcatgatcatcttcggcagtcgcgtctcggccattgtgctgtctgcgatgctggtgttctttaccacactggtcggggctctggtcggcctgaaatccgcatcgcgcaccatgcttgacgccatatccgcctatggcggcagttcatggacccaggtctggaaagtacggctgattgccgcgctgccgtcggtgttctccgcgctgcaggtggccatccccggcgccgtactcggcgccatcgtcggcgagtatctcggcggcatcgacacgggcatcggcgtggcgctcaacgccgcgcaacgtcaggtccagccggagcgcgtatgggcgctgagcatcatcaccggactgatctcgttgttcggctacggtctggtcggtttgatcggccgctgcctgacgccttgggcgaaggatggtcatcgatgagcaccagcatcccccgctttattttgcgccgcatggtgatgaccatgctggccatcatcgtaacttgcgtactctggacgctcattcttgagatcttcaaggtgaacaccatgatcggcaagcggccatgggacgtatatcggttcctgtttgttggggacggggccgcgcagaatcggcagacactcggcgcagacctgctggtcaccgtacgcgatgccggcatcggatacgtagccggattgctgaccgcattcatccttgcgctgctgttctgcttctccccgattctggagaacatcatcatgccgaccgccatggtcttgcgctcgatcccgctggtcgtaatgaccccgctgatcacgctgatcatgggcatcgggcagaaaagcgtgacgacgctggttatcatcgtcgtgttcctgcccgcgctggccaacatcctatatggtctgcgcaacgtgtcgggcgagcatcgagacgtgatccgcgcgttcggaggcaatgcgctgacccttctgctcaaggtatcactaccgggatcgatcccctcactgttcgcatcggcccgggtctcgatcccctcagcggtggtcggcgccatgatcgccgaatggctctcgaccggcgaaggcctgggaggttcgatctccaaagcagtggccgcattctcctacagccgcatgtgggcatccgcggtcacgatcgcgctggtgaccatggtcgcatattcggtcatgagcatcatcgacgatctggtcgcacgcctctacgaacaggactgagtacgctcccggtccggcggattcaagtcagcaccacggtcgccggtccataacgatgcagcgaggtggcggcccacagatcgaaccgccacctcgcttataatcaaccaatccggatgattgccgccgcatgggacaggcgacatcatgcgctcccccgagcgccacatcgatggaggatgcaatggccgataacggcaccttagtgaacataccgctgtgggatgggcaacgctaccaagacgactgcgacgtggtttgggatagcggaatcattcgtgggatccgcccgcatgccgatggtctctcatccgccggtaccgacaccgatcgaacgatcagagcagacgccccgggcatggacggactgtgcgtgattcccggcctgatcgacacccatctgcacctgtggtatccgacaggcaaccgcaggatcgcggacacctcggcatggcctctgtacacgcctccggaggaacgctcgctgcatgtgctgggcaatgcgctggcgtgcatgcgcaacggcgtgacgacgatgcgcgacatgtcgtcccatagcacggaaatggccgtggcccgcgctttggacgaacaggtggttcccggcccccgactgctggtcaacggcgaggtcggcatgagcgcaggccacggcgacctgttcacgccacctcgggcacgtcagcgcaaccccgtggccgattcgcccgacgaatgccgcaagcttgtgcgttcgtgggcccgtgagggtacgaccggcatcaaactgtatctcagcggcggcgtgctctccatgggagacaaggtgggctggcgcaaccagaccatcgctgagatacgcgccaccatcgacgaagcgcacgcactgggattccaagtggcggcgcacacgcacaccgtcgaaggtatccagatcgcgctggacgaacatgtcgattccatcgaacacgccaccgccatgaccgacgagcagatggacgccatcgccgaacggcatatccccgtcgctccgaccttgctgatcaacgatcgcatcgcacatggcgacgtaccggtctcgcctgaagcccgtgacaaggcacgccgtgtcgtcgagcatcgtgacgacatgttccgcaaagcggcggacaggggtgtgcgctttgtactgggtaccgacgcgtgcagctcgctggtcgcctacggcgatcagatggaggaagtacgcgacatggttcgagttttcggatggaacgccgagcgcgcgttgcacgcagccaccgccgacgccgccgacgcgatgcgaatcggcgacaccatcggccggctgcaggccggctacggcgccgatctgctggtcatgcgcggacgcccatgggaacgtatcgaggacctccggctcgacaacatcgtcgctgtgatcagccgcggtgcgctggtcaggggcacgcttccccgcacggcggtctgacggagcccggctccggcatccgagtatcgtcccaatatggtttggggccgcagcccgataggaactgcggccccaaaccatgcgcatcacacgctcacacggcgatgcgcatcacgagaatagttcccgtatctgcgccgccgtaccgtacgacgcctgcgcgccatatccggttgccgcatacgcggagacgaaggaggcgagtcgcgcggcgtcgtgcagcgggaaaccggatgcaaggcaggccagcaccgtgcccatgaacgaatccccgcaccccgtggtgtcgacggcattgacccggaccggatcgatgcgtgtcaccggggactcgctgcaggtcgcgtcaagcaccatcgaaccgtctccgccaagcgtgacgatcgactgctcgaaaccgaactcgcgcatgcgctccagcgcggcgttccagtcgaatccgagccagtcatcatcatccggctcgtcgattcccagcatctgcgccatctcatgctcgttgacgagcagaacatcggacacctccaccagcgaatccgtcagggtcggcgtgaacggtgagttgttgagcagcaccctcaccccggcatcgtggcacatccgtgcggcggcggtcaccgtttcgattgggctttccaggcacaggccaagcacgctcgacgctgtcagcgatccgcgcatcgattcgatgtagtcgacgctcacctgcgcattcgaaccgggcgaatacacgatcgtgttctcgccggcggcatccacggtaatcaccgtggtgccgctggccccgagcacgcgacgcacattcgacgtgtccacgccggcttcgccgagtcgcccgaggaggaaatcggcgttgacgtccgaaccgaccgccccgaacatccgcactgtggcaccgatgcgcgccgcggcggccgcctgattgccggatttgccgccgggcagcacctgcagggggccgccggtgacggtctcgcccggcccgggaagccactcggtggtcaccgtgtagtcggcgttcatcgagccgaccaccgacaccgtgccatggatgtggctcagcgccgcaagagtcgtgaagtcagtcattattatcctttttctgaaaacgctggcaccccggccgtaccagcgcgagtacaatccgcgcgggcacgagtgatggtcaacattgcaatctatcaatcaaggtttgcgtaaacctgcgcggatacctcgaatcggccaggaccatcaactccctcgttgcccagtcccccccacgaaaccgtccaatacattgtagccaatccagcccatgtagtactgggtcgacagcttggcgtccgaaccgtccgtgtacgagctcgacgacgtgtaggtcgaatcgaaatagatggtgtcggaatcggcgccggcggccttggcgaactcctccgacatagcgtcgatactctgcgaatcctcgaccatgtccatcaccatgatctcgaggcgcatctgcggcgtaggattagcatatgcacgacgatcgctacgatcagcgcgacgatgccgaccgccagcaggctccacccgaggaagtgctcacggaagaacgcccagcgctcgcgcccgcgcaaccggcggaaggtctcgatcttcgactcctcggcattgctcggcgccgccgccagatcgctgaccatccgcagttgctcctcggtcaacggccgtcccttggtacgatcgtcatctcgtgccattaccagcacctttcatccgtattgcgggcattcaccccattcacgttatcccccgcaccttaccgtacggtgatattggcggatcgtccgcactcggcggacgtgcccgatggacggagcccgatcccaaagggtggtcatagcccgaagaccgagccatgaccaccccagccggctgctgcaggcagtccgttccggctactccagctccacggcacccgtgtagagctgcggagccgtcacatgggaagtccggcggactttccataggcgacgccgaggcacgacagtgccgaggagacacagacagcctgccgcgggcagtccgtaccgactactccagctccaccgcgccggtgtagagctgatagtactcgcccttttgcgcgatcagctcgtcatgcgagccacgctcgatgatgttgccgtggtcgagcaccatgatcacgtcggagttgcgtacggtggacagacgatgggcgatgacgaagaccgtacggcccttcatcaggttatccatgccggcctgcacgacttcctcggtacgggtatcgatggaagacgtggcctcatcgagaatcagcgcgggcggatcggccaccgcggcgcgggcgatggaaatcagctggcgctgaccttgggacaggccggatccatcaccctcaagcaccgtgttgtatccctcgggcagcatacggatgaagctgtccgcattgaccagacgcgcggcctcaatgcattcctcatcagtggcgttcagacggccataacgaatgttgtccatcacggtaccggtgaacaggttcacgtcctgcaacacaatgcccaaagacctgcgcaaatcaggcttctgtatgccggccacggagatgccatcatacagaatctgaccttgctggatatcgtagaaccggttgatgaggttggtcacggtggtcttgccggcaccggtggcgccgacgagcgcgatcttctggccgggcttggcgaaccaggtgatgtcgtgcagcaccggcttgtccgggttgtagccgaaggtcacgttggtgaagcgcacgtcgccgcgcagcagcgtataacgcccatcaggcgaggtgatcgcctgctccttggccttcatcgccacctcgcaggcggaaccgcacagcttttcggcggccttcagagacctcgtaccatcgtcgccgatctcacgcttccacgcccagtggccggtctcatggtcgacttcggtcatggtgcggccgtccggcccaagttccacgttcacgagcgtcacggtgcccttgtcttcctcgatgggttcgtccatcaacttgaagatgcgggaggcgccggcgagcgccatcatcaccatggtcagctgctgggagacctggccgatcgggttgatgaacgagcgggacaaggtcagcagggagacgagcgtgccgagggtgagcggcttgacaccggtcagaccgatgtcattgacgccggccagcgaaacggcggcaccgacgatggcgagcaggatgtagagcagatagcccatattgccgacgaccggcatggtcacattgccccaagtgttcgcctcggcggacgcctcaaagagttcctcgttcttctcatcgaaggtcttctgagtggcatcctcatggttgaagaccttgatgaccttctgaccattgacggactcctccacgaaggcgttcacgtcgccgatccactgctgctgcttgacgaagtagcggccggaacggctcacgatcttgcgcacgatgaaatacagcagaacggtgaacacaatcacgaacgcagtgaacgggattgacagccacagcatggacagcaatgccgcaatcgcggagataatcgaggagaacatctgcgggaacgactgcgagatggcctggcgcagcgtatcggtgtcgttggtgtagtggctcatgatgtcgccgtgctcgtggctgtcgaagtagcggatcggcagcttctgttggtgggcgaacatatcgtcacgaatcttcttgagcgtgccctgttcaacggtgatgatcagccactgccaagcccaggatgccacgataccggccacatacaggcagcccatcagactgatggcgcgcagcaacggagcccagtcggggttcgattcccccaccatcggcaggatgtaggtgtcaatcagcgattggaggaacagcgcggatccggcctgcgcggcggcaccgatcaggatgcacaccacgatggcgataacgcgcaatttgtattggaagatgtagctgaagatgcgcttgatggttccggggtcggctttgcccatgtcaggctcgcgattcttgaaactctggtcgttgctcatcgtgcttctccttccttggtatcggctgcattggtatcagctgcgctggtatcggccgtgggcatggtcactgtcaccgtcacggtttcggacggctcagcggtagatgactcagcagcctgtccggcagcggccagttctccggtcttagcctggttcttggtctgggattcgtaaatggaacggtattcgtcgcaagtggtgagcagttcctcgtgcgtgccggaggccatgatacggccggaatccatgacaagaatcatgtcggattcctgcacggaggccacgcgctgggcaatgatgattttcgtggtgtccgggatctcgttgtggaatgcggcgcggatcagcttgtccgtcttggtatcgacggcgctggtcgaatcgtcgagaatcagaatcttcggcttcttcagcagcgcacgggcgatgcacaggcgctggcgctgtccaccggacacattggtgccgccctgctcgatgtacgtgtcgtacttatcggggaattcctgaacgaatccatcggcctgcgcgagctgcgcggcatggcgaatctcctcatcggtggcgttcgggttgccccacctgaggttttcggcaatagtgccggagaacagcacgttcttctgcaacaccatggccacctgatcgcgcagcgcctcaatgtcatagtcgcgcacgtccacgccgccgaccttgagcgagccagagctcacgtcgtacagtcgcggcaccagctgtaccagagacgactttgccgaaccagtaccgccgacgatgccgatggtcatgccagaacgaatcttcaggttgatgtcgtcaagcacgggcttttcggaactgtcggagtagcggaaggtgacgtggtcgaattcgatggagccgtcggccatgtcagtcaccgggtgagccgggttctgcaccgtgctttcctcctgcagcacctggcagatacgctcggcagaagcctgagaaataatcaccatgacgaaaatcatggacagcatcatcatggccataagaatctgcatagcataagtgaccagagaagtcagctcgccggtggacagcgccagcgcctgtgcatcgcccgtgcgctgctgaagaagccgaagattctgattctcgacgattcgaccagcgccgtcgataccaagacggacaagctgatccgcgc

SEQ ID NO: 496 - DNA, 21981 bp, Unknown
  R48_24m  MAG No. k141_39998
gtccaagctcatcgacaacctcgatgatctcgacgatgtgcagaacatctactccaactggaccgcttccgacgaggtgatggcccagctcgacgaggagtaatcctcgtgattatccttggcgtcgaccccgggctcacacgttgcggggtcggcgtgatcgaagccggcgagcaccgccggctttcgtttattcacgtggacgtggtgcggtcctcaccggatatcacccaggatctgcgtctactggccatctacaacggcctgtccgagaaaatggatcgcttcgcacccgatgccgtatccatcgaacgagtgttcgcacaatccaaccgcaacaccgtactcggtaccgcacaggccgccggcctcgccatgctcgccgccgcgcaacgcaatattcccgtggcgttgcatacgcctaccgaagccaagctggctatcaccggtaacgggcaggcgcagaagattcaggtggagcgtatggtgacacgtattttgaacctcaccaaaatgccgactcccgccgatgccgccgatgccttggctttggccatttgccatgcgctgcgcccggcaggcgcattgcagggcggcgaacgcgaacaacatctgaccgccgcgcaacgccagtgggctgaggccgcacagaaatccacgcgccgccgcatcaaccacgaccgaggcatgtagtatactttcgaacagttgttcgagtcttgaatcctggagccctgaaggagtacctgtatgatcggcatgctgaccgggcgggttgaatcggtcgaaaccgataccgcattgattgatgttgggggagtgggctacgaagtgcgcatgtccgccaccgacctgagccgtctgcacgccgggcaagacacccgcgtcttcacctatatgaacctctctcaggatgccattaccctgcatggattcctggatcgggacgccaagaaaacctttctgcaactcatcaaggtctccggcattggacctaaagtggcccaatcgttactctccacactgacgccgagtcagctggcccacgccatcgccgacaacgacgccaccgcgctggccaaggctccggggctgggcaagaagggcgcacagaaaatcatcctcgagcttaagggctctattgatttgagtcagatcgagggtgcttccgctcaggcggcaatatccaagtctccggtggataccggtacggaacaggttgtcgaaggactgatttcacttggctggcgtcagcaggacgcccagcaggccgttgccgaggcttgcgccgaaaacgatattcccacgccgcttgccaccgacgatgtgccgcgtgtgctacgtctggctttggcgctgatggataggggccgctgatgagcgagacaacggattacggtacctcaaacaccggtgccaacgaagagtcgttgcgcatggtctcctcccagccgatcggcaacgagccggtcagcgacgaggagctgcgcccccatgttctcgaaggctttatcggacagccacggctcaaggcccagctgcaactgttcctggacgcggcccgcaaacgcgatgtgccaccggaccatattctgcttgccggccctcctggcttgggcaaaaccacgttggccatgatcgttgccaatgagcttgaagtgccgattcgcgtgacttccggccctgcggttcaacatgccggtgatcttgcttcgattctgagctccctcgacgtcggcgaagtgctgttcatcgacgagatccatcgtctgccgcgcgccgccgaagagctgctgtatatcgcgatggaggacttccgcgtcgatgtgatggtcggcaaaggcccgggcgcaagctccatcccgctgaccctgccgcgattcaccgtcatcggtgccaccacgcgcgaaggtatgctgccaagcccgttgcgcgcacgctttggcttcaccgcacatctcgacttctatccgcatgaggagttggaaaagctcatcgaacgttcgtccaacgtactgggcgtaaaccttgatgcgggttccgctcatgagcttgcgttgcgttcgcgcggcacgccgcgtatcgccaaccgattgctacgccgtgtacgcgactgggccatcgtccacgacctgatcgtggtacggccggacgacgtcaaggaggcgctggccctgtaccagatcgactccgaaggcctcgaccggctggacatcgccgtgctcaatgccatcgtgcgcaacttcaacggtggacccgtgggcctgaacaatctggcggccatggtgggcgaggaatcggaaaccgtggaaaccgtgtgcgagccgtatcttgtgcgcgaaggttttatgattcgcacgcccaaaggccgcgtggctaccgagaaggcatggcagcatttgggaattacgcccaaagatgatgtcagcaagctcttctagactttctcctgtttgcacacttggcggcgtttcgtcaatgtcgctcgtttgaaggagttgtttcgtggaacaacagtacattatgctcatcgtgatcgtcgtcgtgttcggcggcatgatgtggtggcagtccaagaaggccaagcagcaacagcaggagaagcaggacttccgtcgcaacctgcagcccggcaccgaggtcatcaccatcggccaggtgatcggcaaggtcgtcgaagtcgacgagcagtatgaggagatcgtcatcgactccgaaggctccaagctgcgtttcggcttcaacgccatcgcccgtgagtacacccgcccggcctatgtgtccgatgatgaggtcgacgagaacggcaacccgctgcccgacgaagacaccgaggctccggctaacgatgaggctggtcaggttccgatcgaggcgtccgtcgtgtccgaggaagacaccgctgacgagaccggtgacgacaacgaaaccaagacgaagtaagctgttcgattcggtagcaccatccgagtatcgcatcgcaaaggcataaaaggggcgagcactatggcacagtcggacatcaccatcgacgcattgagcaaggtagggcaacaggacgccgaatatctggtgtccttggtgcgttccataccggggtttcccaaggaaggcattatcttccgtgatttcatgccagtgctcgccgaccccaagggcttgaagattctgctcaaggcgcttgaaacggctctgccggtgtccccgagcgaattcgactccattgccggtctcgaatcgcgcgggttcctgttcggcccggccatggccgcccatctgggcaagggtttcatcgccgtgcgcaaggccggtaaattgccgcccgaaaccatcggtgaatcctatgacctcgaatacggcacggccagcgtcgaaatcgaaaccgacgccgtacaggcgggggagcgagtgctcattgtcgatgatctcatcgccacaggcggcaccgccaaagccggcgccgaccttatcgaaaaggcgggcggcactgtggtgggcttcagttttgtgatgcggctcgatggtctcgacggtctggataagctcggcggcaagcccagcagctcgctgatcgcgatgccggcctgagattccgtctcacccaacgtacagttagttttcaaggtccggcatgtactgtgtacagttatatgccggaccaattacatagtcagggaaggatcgatggatctttacgaataccaggcgcgtcagctgctcgaggaacaggacattcccaccccggacgccatctttgcccagaactcccatgaagtcgccgaagcggcggacaaaatcggctatccctgcgtaatcaaggcgcaggtcaagatcggtcatcgtggtcaggccggcggcgtcaagatcgcccataaccgcgacgaggcgattcttgaatccgagtccatcctgccgatgaccatccacgggcacaaggtttccggcgtgcttgtggccgaagccaagaacatcctgcacgaatattacgtgtccatctccgtggaccgcacctcgcgcgacttcgacgtgctggccaccgccaacggcggcaccgaagtcgaggaaatcgccaaggaacatccggaggccgtcaagcgcctgcacatcgatgcgctcggcgacttcgacctggccgctgccaccgaaatggcacagagcatcggcttctaccacgcggacgtcgatcaggccgcacagattctgctcaagatgtggcgctgcttcaaagacaacgatgccacgctcgtggaaatcaatccgctcgccaagatcggcgacccggatgacgaatccaccaagcagctgagcgccttggacgccaagatctccttggatgacaacgcctccttccgccatgatggctgggcgcgtttcgtggatctcatcgttcccgaccccttcgaacagcgcgcccgcgaacacggcctgcactacgtgcacctgcacggcgaggtcggtgtgatcggcaacggcgcaggactcgtcatgagttccctggatgccgtctccggcgctggcgaggaacagggcaccaacatcaagcccgccaacttcctggacatcggcggcggcgcctccgcagccgtcatggccgaaagcctggagatcgtactgtccgaccctcaggtcgaatccgtgttcatcaatgtctatggcggcatcacctcctgcgtggaagtcgccaacggcatcctcgaagcggtcgccaagctcggcggttccaagccgatcgtcgtgcgtttcgatggcaacgccgccgccgagggtctgcatatcctcgcttccgccaacaatccgaatatccatgtgtccgaaaccatggaaggcgcggcagccaaggccgcgcagctcgccggtgaggcgacccagtccaaggaggttcgctgatgctgttcatcgaagacggcgctcccgttatcgtccagggcatgaccggccatcagggcatgacccacacggctcgcatgctcaaggccggcaccaatatcgtcggcggcgtgaacccgcgcaaggccggcacatccgtcaccttccccggtgccaagaacggtgccgacgtggacatccccgtgttcgccacctgcggtgaagcacgtgaagccaccggcgccaaggccagcgtggtgttcgtgccgccgaagttcgccaagtccgccgtggtcgaagccgtcgaagccggcatcgaactcatcgtggtcatcactgaaggcattccggtggccgattccgcatacttcgtcgaactggcgctcaagaagggcgtgcgcatcatcggaccgaactgccccggtttcatcacgctcggcaaccctggcgtcaacttgggcatcatccccgacggcatcgtcggccgcggcccgctcggactggtctccaaatccggcaccctcacctaccagctcatgggcgaactgtccgatatcggcttcaccgcatgtctcggcgccggcggcgatccgatcgtcggcacgacgctgctggaagccctgcaggcattcgaagccgaccccgacaccaaggctgtcatgatgatcggcgagatcggcggcttcgccgaacaggacgccgccgcatgggccaaggagcacatgaccaagccggttgtcgcctacatcgccggtttcaccgcccccgaaggcaagcagatgggccacgccggcgccatcgtctccggaggcaagggcaccgcccaggacaagaagaacgcgctcgaagcggcgggtatccccgtgggcaagaccccgggccaggccgctgaaatcatgcgcgacatactcgccaaggccaacatcgactgatcggttccaaccaatcgtgatgaaagccgtgattcgccaatgggtgcggggagccatagtcgccctcgcatccatggccatctatgccgttgcattaggttgctatacagcgctgatgttattggttgtctccatggaagagggtggcgacaatctcaccgtcggcacaacctcgctgacacaggccgttgtgcttctgagtgagggatcgggctctagaaccgattcgttcaccctcaccatcacgccattgatgttgaccatactgctgatatggctgatcaatgcactcaccatgcgaatcaaagcatacgggccgcatgcgtatgttgccggattgattgtttggctcgggttgaacgaggcattccggcaatccgtacacctaggtcttgtcgatgaccagtggctggtgttgctgaaagcagccatcgtattctcgatcggtttcctatgcgcagccgtaccggaatcagccaagatgcgagcattcagggactggactcgcaagcaggtgccggcggacatacgccactgcctgaaaatcggcgtcgtcttggccgtcgcgatactgggcatatacctggcaattggattgattaccgtcatcgtatggtcggtacgcaaccatgccgctgtcgtatcgttgttcgaattgtccgggatggaaaccggttcacgaattctcaccaccgtcgccatgctgatctggctacccaacgtcatgctctgggctgtttcctggctcttcggcggcggattcgccatcggtgatttggccagtttcacgttatggctcggccaatccaaagagcttcctgcaataccggcattcggtattctgcccgaaccggtcagcagcgaactatggcgtaccgttgccttgaacgcgcctctcgccatcgctgcgctcgtgggcctgctggctgtattcctaccgcaaggattcgcctgcagaccgttgaatatacggaatgcgtccacccgcggcccagtactggtttcgctgatctactccgccgggtcattctgcctgagcgcgatgctgatctcactggcatccacattgctgttcgctctgtccaatggatcgcttggcgatcatcgtctcgctcacattggcgtcgacgtcatggcttccaccagagtcgtcggtcattcgaccgcattgggatttaccgcggcatggctgctcgcgctgattggcacagtgctcgttttttcgataggctggttggttgggaggatcaatgattcccgcaccaccgccgcgaccccgaagaccgtcatcgtccgtcaggcgcggtccctggcgtcacaaccacaagaatccaaggaggaacaggatgacaaacacgaaccgaccgatccgtcgggcactggtctcggtctttcataaggaaggcatcgaagtactcgcggaagcgttcgtgaaggccggcaccgaagtcgtttccaccggttcgaccgccaggaagctcgccgagctgggcgtcaaggtaaccgaggtgtccgatgtcaccggattccccgaatgcctcgacggccgcgtcaagacgctgcatccgtacattcacgccggcattctggctgatatgaccaaccccgagcatgccaagcagctcgaggagttcggcatcaagccgttcgacttggtggtcgtcaacctgtacccgttcgccgacaccgtgcgctccggcgccaacgaggccgataccatcgagaagatcgacatcggcggcccctccatggtgcgtggcgcggccaagaaccacgccaccgtggccatcgtcaccgatccggccgattacgccttggtcgccgagcgtgtggccgacggcaccggcttctccctcgacgagcgcaagtggcttgccgccaaggcattcgcccacaccgccgcctatgacgccaccatcaacgaatggaccgccaagcactggccgaagccggcctctctggacgccgtcgaggtggacaaggacgatcagggcactgaagtcgattccgccaagttcccggcccagttcacccgcacctgggatcgtgcgcacaccctgcgctacggtgagaactcccaccagcaggccgccctctacattgacccgctcaaccagaccggtttcgcccacgccgagcagctcggcggcaagccgatgagctacaacaactacgtggacgcggacgccgcctggcgcaccgtatgggatatggctcccgccattgccgtggccgtagtcaagcacaacaatccgtgcggtctggccatcggcgcgaccgcggccgaggcccacaagaaggctcacgcctgcgacccgatgagcgcctacggcggtgtgatcgcctgcaactccaaggtcactcttgagatggccgaaagcgtgcgcccgattttcaccgaagtcatcgtcgcccccgactatgagccggccgcgctcgaactgctgcagaccaagaagaagaacctgcgcatcctcaaggtggccgagccgccgaagggccacgaggccatccgccagatcgatggcggcctgcttgtgcaggacaccgatctgatcaacgccgtcggcgacgatccggacgcctggaagctcgtggccggcgatgccgccgacgccgacacgctgaaggacctcgtgttcgcatggcgtgcaatccgctgcgtgaagtccaacgccatcctgctggcccacgaccaggccacggtcggcatcggcatgggccaagtcaaccgcgtggactcctgccatctggccgtcgagcgcgccaacacgctggccgatggtgccgatcgcgccaccggtgcggtcgcggcatccgatgcgttcttcccgttcgccgatggtgcccaggtgcttatcgacgcgggcgtcaaggccatcgtgcagcccggcggatccatccgcgatgaggaggtcatcgaagcggccaagaaggccggcgtgaccatgtacctcaccggcacccgccacttcttccactgatcgggactctctgaggggagcagctcagccaaaacgcacaaaggtgggattccgcctgacccgtcaacgggtccaagcggaatcccacctttgctattcgcctgctattgtggtcacgtaaccgttcgacagaaggaatcgcaacatgcacaaccatccctatgtatccgaagcgcatgagggcaagccatggtttgaatggtgcgtactcggcgtcatcgccgtcatcacactgctggttgctttcggatatacgatggccgccacggtcatacttgccgtgacggccatcatcaccgggcttgttcgcctgattcttcaggacaaaagcccatggaaagtgcgctcagtggcgttcgactccttcatcggcatcgccttgggaatcggcctgctgattacctacttcagcttctttggactcttcggcaacatctttttccgctgaatcgccatcagacgaggcggcctgatcgaagaattcgccatcgtcgagcgtgtccgcgttcgcatcggcatccgtctgtggaagatcggcggcagccggcactttgggagtggtcatcatctgcgcgatgatcatgaccaacgccaccacagcggcggccaagaccgggctaatccagaacacccacagctgttgcagcggattttgcgtaagaccctcattcatcgcggccagtgcgataccggtggaacgggcgggattgagaccggcaccggtaaccgggtagctgatggcggcggccagaccataggcaagacccatggcaatgacatgacggtccgaggactcgccgtgatcacccagagaagacatggcggtggcaacgacaatcagagaggcaacgacctcgacgacaatcgccagcgtaatcgagaacgtgatgccatactgggtcagcagcgagtaagacacggagccgttctcgaaaccgttaacggccggagtcagccacactttggcagctacctgctcggatgtgggcagcagcttgaccacggcgaagccggcggcgatggcaccgatgacctgagcgatcacatagaggatgccatccaggattttcgtcttggaaaccagcacggaggctacggtgatggccggattcagctggccaccggacacgcgggagaagatggcggtgactgcggcatatgccaagccggtagccaacgcgaagaacacgatattgatgccatacacggccgaaccccatgtggagaaggcgtaaatggcaaagcacagcaggaagctgccggccaattcggcgcacacgcgcagggccagcggctgttgcttggtttcttccatgattgttcattccttttcatctgttggaagacgggcgaacccgcacaaacggttgccagtctagcagcagtcctacgttgcggtatgatatataggttggaattggctgggattccagtccgccaactctgaagtatgtatacaaatcgacagtctctgcgatgacagagtctgtccggccacgttgggagaacgatgccaaacgcatattcccgcgctgcgaaagcgcaagacgattccaattccattcgactccagaagctgcttgcccaagcgggattcggttcccgccgcaagtgcgaggacatgatcaccgaaggccgtgtcgaggtcgacggtgaactggtcaccgagctcggaactcgcgtcgacccccataagcagcaggtgcgcgtagacggttcgcgcgtacgcgtcaatccgaaccacgtcactctggcactgaacaagccccgcaaggtgctctccgccatggacgacccgaagggccgctacacgttgcgcgacatcgtgggcgacaagtacgagcgcatcttccacatgggccgtctcgactacgattccgagggtcttatcctcatgacgaacgacggcgaactctcgcagcacgtcatgcaccccaagtacgaggtcgaaaagacctacgtcgccacactggaaggcaagatctccggcaccgtatgccgtcgactcgtgaccaccggcgtacagctcgacgacggctggatcaagctcgaccactgcgcgatcatcgactcctcacgcgaccacacgatggtcaaggtcgtgctgcactccggcaagaaccgcatcgtgcgccgtatcttcggctcaatcggcttcccggtcaagcgcttggtgcgcacccagatcggcccgatcaaactcggtgatttgaagcccggttcctaccgcgtgctgtcccagacggaagtccgttcgctgtccaaggaggttggcctgtgattcgcgttgctatcgacggccccgccggcgtgggcaagtcgtccacgtccaaggcgctggccaagtatttcggatacgcctaccttgacacgggcgcgatgtatcgtgcctgcgcttggtggtgcctgaagcagggcatcgatctggacgccgaaaccgtggatgagcgtgtcatcaccgaagcggtgggcgagttcttcaccggcgaccatttcgatatctccgtggacccggacaacccctgcgtattcgccgacgacgaggacatctccgaggccattcgttcctccgaagtctccagccatgtctccaaggtgtcgaacgtcatcccggtgcgcaacgtgctcatcgccgcccagcgcgcctacatcgcccgcgaggcgtcggccgactccttctccggggggttgggcatcgtggccgagggccgcgatatcaccaccgtggtgtccccggacgccgaggtgcgcgtgctgctgaccgcccgtgaggaggtccgtcaggcccgtcgcaccggccaggctgtcaagggcgtgggcgctgaggatgtggccgcgcgcgacaaggccgattccaaggtcaccagcttcctgaccgccgccgatggcgttaccaccatcgacaattccgatctggacttcgcccacacgctcgatctgctcatcggtgtggtcgaggacgccatcgagaaccaagaatacgagcagtatgccgccaatctcgaaggctatgagctggacgaaggcgatgaggatctgatttccggccgtggtttcacggaaggcgcgcgcaaggccggtcccaagccggtgggcgtgctggctgttgtaggccgtccgaacgtgggcaaatcatccctggtcaaccgtatcctcggccgccgtgccgccgttgtggaagacacgccgggcgttacacgagaccgtgtgagctatgacgcggaatgggccggcaccgacttcaagctggtggacacaggaggctgggaagccgacgtggaaggcattgaatccgccatcgcctcacaggcacagattgccgtgaccttggccgatgccgtggtattcgtggtcgatgggcaagtgggcatgaccaccaccgatgagcgcatcgtcaagatgctgcgtgccgccggcaagcctgtcgtgctggccgtcaacaagatcgacgaccaggccagcgaataccttgccgccgaattctggaaactcggcctcggcgaaccatactcgatttccgccatgcacggcaggggagtgggcgacctgctggacgtcgcgctcgacaagctcaagcaggccgagaagacttccggctacctcacgccttccggcctgcgccgcgtggctctggtgggccgcccgaacgtgggcaagtcgtctctgctcaatcagctggcgcgcgaagaacgtgccgtcgtcaacgatttggccggcaccacgcgcgaccccgtcgacgaaatcgtcaacatcgatggcgaggactggctgttcatcgacaccgccggcatcaagcgacgccagcacaagctcacaggcgcggaatattattcctctctgcgcacgcaggccgccatcgagcgctgtgaattggcgctgattctgtttgatgcctcgcagccggtatccgatcaggatttgaaggtcatgtccaccgccgtggatgcgggccgtgcaatcgtgctcgtattcaacaagtgggatgcgatggacgagttcgacaagcagcgtctcgaacgcctgtggaacaccgaattcgaccgtgtgatgtgggccgagcgtgtgaacctgtccgccaagaccggctggcacaccaaccgtctgacgcgagccatggataaggccttggaatcctgggatcagcgtattcctacaggcaagctcaacgccttcctcggcaagatccaggccgcccacccgcacccgttgcgtggtggcaagcagccgcgaatcctcttcgccacgcaggcgtccacgcgcccgccgcgtttcgtgatcttcgccaccggcttcctcgagcacggctaccgccgctacatcgaacgctccctgcgcgaggaattcggcttcgaaggcacgccgattcagatctccgtgaacatccgtgagaagaagaagcggaagtgacacgcgcgtaatttgccagatttcatatatctggtagattatctactcggtgcttttgcaccatcgggccgtagcgcagtttggtagcgcacttgactgggggtcaaggggtcgcgggttcaaatcccgccggcccgaccgattagccccggaattccgccacttctgagtggttgctttccggggcttttccgttttcagacaacatgagacaacatgacgacggacttacctttgtaagccattcgtaatggattaaacacggacttcatcttggcgtgttattggaattatcaccgacaattcaccgcctccgcccccccgtcgtatgtgtttgccccaaacaggggctagactggttcctattgatttgatgaaagggacccgaattgaccgaaataaacgataaggcccaactggatatcgccgccgctgacgacaccgacgccgtcacctcggatatccccgaagaaaccgtaaacacccccgaagtggatgagactttcgagctttcggccgccaagatgcgcgagcacggcatgagcgaaaccgccatcaaccagttccgccatttgtatgacgtatggcgccatgaagaagcctccagctggattcgtgaggacgacatcgagccgcttggccacgtgcccagcttccacgacgtctatgagaccatcaaccacgacaaggccgtggacgccttcgccaagaccgcattcctcaagctcaatggcggtctgggcacctccatgggattggacaaggccaagtcgctgttgccggtgcgtaggcacaaggccaagcagatgcgcttcatcgacatcatcatcggtcaggtgcttaccgctcgcacccgcctgaacgtcgaactgccgctgacgttcatgaattctttccgcacttcggcggacacgatgaaggcgctcaagcatcatcgcaagttcagccagcatgacgtgccgatggaaatcatccagcatcaggaacccaaactcgtggccgccaccggcgaaccggtgagctaccccatgaacccggagctggaatggtgcccgcccggccacggcgacctgttctccaccatctgggagtccggcctgcttgacgtattggaggagcgcggcttcaagtacctgttcatctccaattccgacaatctcggtgcacgcccctcgcgtacgttggcccagcacttcgaaaacacaggtgccccgttcatggccgaagtggctatccgcaccaaggccgatcgcaagggaggccatatcgtgcgagacaaggccactggtcgcctgatactgcgtgaaatgagccaggtccatccggatgataaggaagcggcccaagacatcgccaagcatccttacttcaacaccaactcgatctggattcgcatcgacgctttgaaagacaagctcgccgaatgcgatggtgtgttgccgttgccggtgattcgtaacaaaaagaccgtgaatcccacggacccgaactccgaacaggtgattcagctggaaaccgccatgggtgccgcaatcggtctgttcaacggttctatctgcgtccaagtggatcgtatgcgcttccttccggtgaaaaccaccaatgatttgttcattatgcgttccgatcgcttccacctgacggacacgtatgagatggaagacggcaattacatcttcccgaacgtcgaacttgatccgcgatactacaagaacatccgcgatttcgacgaacggttcccctacgccgtgccatctttggccgcagccaactcggtttccattcagggcgactggacattcggacgtgacgtcatgatgttcgccgacgccaaacttgaagataagggtgagccgagctacgtgccgaacggcgaatacgttggcccgcaaggcatcgaaccggacgattgggtgtgatttacaacacggtcgaacgataaaaaagatattatttttgtgaaatggcgctcaactgtggaaaaagcctctaagatagagtgagtgtggggaaactcatacgcacttataacgaaacaataactatacgtgaggactaatggcagagggcacaagcggacgtcggcgtttttccgacaaatggggcaagcacgagctggacgtactggctgtgttgtcatccgcgttcccgcaatggctcacatcccgccaaattgcgcagcgcgtcaaggcttacgccgactcgtatggagagctggcagatcaggccgccaaggccgcgttcgccaagcagttccagcgtgatcgcgccaagctcgctgcgatgggcattgccatcgaatcacggcagcctgagtactcgtccaagtcggaaggccaggacttcgcgtcctatcgtctgcagttgggcgacgaaccgcgtatccgcctgatgttcgagccggaagatatgccggtgcttgccgccgccaactatctggctcgttcgatgtcgatttcttccgagccggatcagtcccagctcacccagcatgtgtcgcgcactacgccgcgtgtgccgcagaccccgattcccgggcttggcttggattcgattgcgcctggcttggggacgcagcccattccggattcactggtcaaggttattgattcgcgtcgtttcgccgccaccgttgacgtggatggcgaacacctgaacgtggcgtacaccgattccgacgatttggccatgtttgtgcttgagcatccgggggccacgattgtcagcccgcaagaggctgtggacgcttatcatcgccgtttgcacgccgccagccggttcactctggccgacgaatccgccagtcctgtgagcgcttcggtggtttccccgtcgattagtcgcgatgtgcgagagccgggtgatcccgagtctatcaaggctcagaacaagaagaacggctccgctttccaaacgggcagtgaggttgatcgtcgcctgcgtctgatgctgttcctctccgctcatctgggtgaggaattctcgatgagcgagctgggcgaacgctttatcggcaagccaaagaacgatgatgaactcaagaaattcgtcaacatcatccataaggacatcaacaccctgaccaccgtttccgacgatggtgagatggccggcagccagttcttcgatattgactggccgctgctggatgccgagggtattgtttccgccaccaattcgctgggccttgaacgtcttgccggcatttcgccgcaatacctcagcatgctcaccgcctcggtcagctacctggcgcattcgccgttgctgccggacaagcagcgtgggcaggccgaatccctgtatgagcgtttgcgccgtcatgtcagtcccggtcagaccccgtggctgagcctgaccggctatgagctggagccccgaagcttctccatcgtcaagcgtgcgatcaacaccgattcgctgttggacatggagtacaccgacggtacaggtcgtacccgccgcaagctggtggcccccgccaagatcttcattgacgaaggcgtgtattatgccgccgtctacacggacgttggttccgccgcccctaaggacaagaaggcctacgtctccaaagacaagaccatcgacaaggcgaacggcaagccgcgcatctggcaggtgctgcgcttggcccgtatcgaaaaggcggaactggtcaagcccaccaagcagatcaacatcccgaacatgccggtgagcgaactgcgcaagtggagtttcgacaacggtaccgacgcggtgttcatcaccgatcagcgcgatctggcattcatcaagacattgccgggcgctaccgtcgaacaatgcggtgccggtgaaaaggtgcatctgaccgtttcctccgattcctggttcgtggccttctgcatcgcccacgcgcgtcatatcacggcggtcgccccggaaacgttgcgcaccatgatcgtggcacgcgccgaacgcgaactgagcatcagcgagaacaagtaaggagcctttcatgccttggtggatatggctgattctggccctgttcatgctggccatgattgttgccggactcatctatgcagcccttcatggactccgtgccttgaaagacatgtccgacatcggcggccaactcggtgaacgcgtggccgcgatgggggagcccggcacctctgccgacaccagcgagccgcctctgttcactcagccgctcagcgtggcacagaatcgttatgccgaggcccatgcgaacgtgattcgcagcaaggccgccaagcgcgaacgccacacccaggcatgggcccgctggaagcgattcaacaactaacggaaagcagcaatggcacgtcaccaacaccataagggcaatgccgattcccagacgctgagcccttcgcagcggtacgcatcattccaaaaggtccaacgccatcgggcgtccgcagcagcgcgattcgccgaatccctgcctttcgaactggacgacttccagaccgaagccaatgacgcgctcgaagccggcagcaacgtactggtcgcggccccaaccggtgccggcaaaaccgtagtggcggattttgccatttacctcgcccaggaacgcaacgtcaaagccttctacaccacaccgatcaaggcgttgagcaatcagaaataccatgatctggtcgacgtgtacggcccggacaaggtaggcctgctcaccggcgacacctcgatcaattccgaggcggacatcgtggtcatgaccaccgaagtgctgcgcaacatgctctacgagcgttccaccacgctgaacgcactgcgctacgtgattctcgacgaagtgcactatctggccgaccgattccgcgggcccgtgtgggaggaagtcatcatccacctgcccaagacggtcaagatcgtcggcctgtccgccaccgtgtccaacgtggaggatttctccaactggattgcctcggtgcgaggcgacacaaaactggtgatcagcgaacaccgccccgtgcctttggaacagcacgtcatcgtgcaggcggacgaacacaccgagcccgaggtgctggacctctatcgccgcgacggcaacggcgagcagaccaccaaactcaacgccgaactcatcaaccggctcgaccagttggaccgcaaggccgcacgccggcgcggcgaggaacgccccgataagcgcaagggcttcggcagaggccgcggcggcaaaggcgccaaagaccgtgctccgaaagcggaacgccacaccccgcgccgctgggccgtggtggacgagcttaacttcctgggaatgttgcccggcatctacttcatcttctcgcgcaacggctgtgaccaggccgtggaacagtgtatcaacgctggactggagctcaccaccgatgaggaagtgaccaggattcgccgcatcgtggatgagatggtggaggggcaactcactcaggaagacctgaaagccctgcagttctccaagttccgctttgcattggaagaaggcttcgcttcgcatcatgccggcatgattgccctgttccgtcagatagtcgaacgattgttcgaagaaggtctggtcaaaatggtgttcgccacggaaacactggcattgggcatcaatatgccggcccgctgcgtggtggtagagaaactcgaaaagttcgacggtaccggtcatgtgggcctgacgcccggcgaattcacgcagctcaccggtcgtgccggtcggcgcggcatcgacaccatcggccacgccatcgtggtcgaccatcacggttttgtgcccgccacggccgcctcgctgtcatccaagcgtgtctacccgctgcactcgagcttccgacccacgttcaacatggccgtgaacctgctcaactccagcgactacgagaccgcgcgcgtcaccctggaccagtcgtttgcccagtgggaggccaacgaatcggcctggcagctggaatcgcagattaacacactgaagaacgcgctggccggatacgaacaggcgttcgcatgcgaacacggcgacttcaaacagttcatgaccctgcgtatggagctgagcgacatcgaaaaggaaggccgccgcaaactgaagcacgaagtgttcctgaccgatcaggagcgttcacgcgctttccagaacctcgaccagcgcattcgcgatttgcgcaaggcggaacacgagcatccatgccgcaactgcccggacctccagcaacacctcaaatggggccaccgctgggcccgcgagactcgagaactgcagcgcgtcaccgatcgctacgactcccgcaccgggtccgtggcacgccagttcgattgcatctgcgatattctcaccgggcttggttacctcgaacgtcatgtcaatgcggccggccacattgacatgacgttgactgacaaaggtctgctgctgcgccgcatctacagtgaacatgacctggaactgtgcgaggcgctgctcgccggcacgttcgacaagctcgacgccaacggactggccgctgtgctctcttcactggtatacgaggccagacgcgggggagacggcgaaccgaggcactacccgggcggcatctccgggcccattgccatcgcttcgtccaagctcaagggcatttgtgaagacatcgatatcctgtgcgaggatcacggtctggacgagatgcagcggccggatttcggcattctcgacatcatgtatgaatgggcggatggcggttcgctgggatcgtgcctgtacggcaccgacatgaccggcggcgacttcgtgcgcactgccaaacgactggctgacgtgctgcagcagattgctgtcgcccagccgctgccgttcgacgggggagagcggctggcaggcctcgcccacgaagcggccgaccgggtcaatcgtggcgtggtggcctactccggcgtggactgacggggctgtttgacgggagtttgtcagccgacgtcggaagcttggaatagcggccaagtccgaactgttgcgtaaattagtagggttaaagatctttcaaggaggatgccgatatggcagaacgtagcctcaggggcatgagcatcggagcgaaatcgctggagtccgacgacaacgtcgatttcgccgcgcgaaacgatgtggcgtatgtatgcccgaagggccaccgcaccatcctgccgtttgccgagggtgccgaaatcccggacgagtgggagtgccgttgtggttccgtggcccaccgtgagggcgacgccgaccgtgagggcgacgaaatcagcaaacccacccgcacccactgggacatgctgctggaacgccgtagcgaagaggaactggccaccctgctcgaaaagcgcctgcaaatgcaccgtgacggttggattcccgactacgagtgatctcctactgaacaacacgtgaacttgatgcccagtcatcccgactgggcataatcattgttggaacaagtcgcattgtttgacgaccattcaaagcagtcgacatgaacaagggggagtggaatctcaatggcacagcatccgatgaaagtggtcctgttggatctcgacggcacgcttaccaagtccgacggcggcattatcggctccgtcatcaagaccttcgaagagatcggtcgaccggttccggacgccgccgaactgcgacgcttcatcggaccggcgattattgaatctctgcgtcgcaatcatgtgcctgcggaagatctggatcgggccgtggacatctaccgcagctactacggagaccgtgccgtgttcgacgatccgaacgagcccggcaacaaggtgcccggacgactggtgaacgtcgtattcccaggcatccgtgaacagctgctcaaactgcatgccgacggttactacctggcactggccagctgcaagcccgaataccagtgcatgcctatctgcgaccatttccacctgaccgaactgttggacggcatctatggtgcttccaaagacaattcccgtctggacaaagatcaggtgattcggtactgcttcgacaaaatcggttttgatgctgcagcgggggacagggccgtgatgatcggcgaccgctacaccgacattgacggcgcccacgcctgcaatttggacgctatcggctgccgctggggctacgctccgaccggtgagatggaggaacacggtgcctacgaaattattgagcaacctgagcagctcgaagacgccgtaaaccgttatttccaaacgcactgaaacacaacggcgaggacttcttcatgatgggatgcgatggagcctgcgccgcgggcttcgacctggttttcatcggtttgccattgctgtcgctgtatgagattcccatgctgatatggttcatttggcgagcattccactggaaacgagatgacaaggattggctgaaaggcacggcgattcttgcaattgcggtggtagctccggtgctcctttggctgtcggccttttggctgtcggcctggtatgcgtggactagttgatacaggcgactgaatcctcgtcaaggataactaatctgacataacgtacattatcggctaactattcgggaatcttagaaatggcttaatttcaacggtcttcatttcgcacaggtaactgtggatgcctctgggtggcccgttgtggctacgcatttggctacgcatttcacacgacgggagaccaacgatggcaatgggtggcggcggctcgacatacagaagcgccgatggaatctggcacgccgcgatagacatagagcccgacagggccaccgggcgcaggcggcggctcacggcccaaggcaagaccaa

SEQ ID NO: 497 - DNA, 5822 bp, Unknown
  R48_24m  MAG No. k141_40217
gagcttgttggactgccagccggtagccagcgggccggtctcagcttcgccgtcgccgacgatggccgggacgaacaggctcgggttgtccatgatggcaccgtaagcgtgggacagagcgtaacccagctcaccaccctcgtggatggagcccggggtctccggagcgaagtgggacggaataccgcccgggtaagagaactgacggaagaacttctgcagaccagcttcgtccttggtgatcttcgggaaggtctcggtgtaggtgccgtccaggtaggactgggaggtaccggccgggccaccgtggcccgggcccatgatgatcacggtgttctggccgtggtcagcaatgaaacggttgatgtggccgatgaggaagttcaggccaggggtagtgccccagtggcccaccagacggtgcttcacatcttcgcgggtgaagggctccttcatcagcgggttggaacgcagataaatctggccgatggaaaggtagttggcaacgcgccagtacttgtcaacgccttcgagggcttcctcggaaaccggagcgttgagcttcttccaaggggtgccaataacaggactcgtcatgtgtactcctgtactcctgcacgtgatcgtgcgattgattatttctgttcggtcacggttcctgacccttgcggtgccaaggttttccgttcccaatcaatcgtcatggtacgaggacaacgcgacttttgaacgatttcttgcgggtgtgttcgaaattgttgcggaaatttcagtatttgtgcggttcacctgaccgtttgtcaacattagttttttcaacatactttttcagaacggcggaagcatgcggaaatctagcatctggctagaacagcgcacgttcgatttcccatgttcgaaatcggcgtgttgtccgactacaggcatgtagtttgttcgatttgcgcacatagtccctgcgtgtcggccttgtcgccttgaccagtgataatcaggggtgttcagcccacgtaaaattccaatgaacgttaggggaatatcaatggcaaacggtcctgtgcttgtcgtcgacttcggcgcccagtacgcccagctcatcgcccgccgcgtgcgcgaggcaggcgtgtactccgagctggtccctcattccatgccggtcgacgagatcctggccaaggatccgaaggcgatcatcctgtccggcggcccggcctccgtgttcgagcccggcgcgccgaccatagataccaaggtgttcgaatccggtgttccggtgcttggtatctgctacggcttccaggtcatggcctatgagctcggcggcaaggtggataaggccgctctcggcgaatacggcaagacctcagccaccatcgacgacgccgacggcatcctcgccgactcccccgccgagcagaccacgtggatgagccacggtgtggcggtcgaacaggccccggccggcttcgaagtgctggcccacaccgaaggcgcgcccgtggccgccatggcggacgaatcccgcaagctctacggtgtgcagtggcacccggaagtcaagcactccccgcttggccagaagcttatcgaaaacttcctgcaccgttgcgccgcgctgcccaacgactgggacgcctcctcgattatcgaggatcaagtcaagaagatccgcgagaaggtcggcgacgccgaggtgatctgcggcctgtccggcggcgtggactccgccgtggccgccgctctggtgcacaaggccatcggtgaccagctcacctgcgtgttcgtggaccacggcctgctgcgcaagggcgaggtcgagcaggtcaagcacgacttcgttgccgccaccggcatcaagctcatcaccgtggacgcggccgacgacttccttgaggccctgaagggagtctccgagccggagcgcaagcgcaagatcatcggtgagaagttcatccgcacgttcgagaaggcccagcgccaagtgcttgaagaggccggcgcgcgcggcaaggaagtcaagttcctcgtgcagggcaccctctaccccgacgtcgtcgaatccggcggcggcgacggtgccgccaacatcaagtcccaccacaacgtcggcggcctgcccaaggacatcaagttccagctcatcgaaccgctgcgcaccctgttcaaggatgaggtgcgcgccatcggcaccgagctcggtctgcccgacgaaatcgtctggcgtcagcctttcccgggcccgggtctgggcatccgcatcatcggcgagatcaccaaggagcgcctcgacctgctgcgcgaggccgacgccatcgcccgcgaggagctctccaaggccggtctcgaccgtgacatctggcagtgcccggtcgtgctgctcgccgacgttcactcggtgggcgtccaaggcgacgagcgcacctacggctcccccatcgtgctgcgtccggtgagctcggaggacgccatgaccgccgactggtctcgcgtgccctacgatgtgctcgccacgatctccacgcgcatcaccaacgagtgccgacagatcaaccgcgtcgttctcgattgcacgagcaagcctccggccacaattgaatgggagtaattgctctctgtgacgaatgggattctccatcggggaatcccttttttgttgccgacgatgcccggtataatttttccgcttacgacgtcgtccggaaagggatgccgacctctttgcgccagagattcgacaacgaaaaatacatcgaactgcaagccgccaacatctcaacagcgtgaaccgacgcttgcactcggatgaaacgctgattgcattgtcaatcaccagcgccaccagtcctgtggccgctcgcgtcatcgacgggctcaaacagttgcagggctgcgacgcctttttctccgttatcatctcatccacggacgaggcgttgtatcgcaaactcggcatcaacgtgtgctgcgaaccgaagtacgaacgggtgagtctgtatcaccggtaaacgccaccgataagcgcggtatgccgcgaatcgtcaagccggtaatcatgcagcatgcggcctgacgattcgctgctgtcgcattgtctctcccctcgaccatgctgggcttgttttccgtttgttggagagaacgggggatgccatcagcactacggtgagagaaggattatccgtgaatcggttcgtgggtctagacggtattaaaggactggcgctgatagccattgtgctgtaccactgcatgcagcaactgctgccaggcggattctacggagtcgacgtgttcttcaccgtctctggattcctgattgccgtcagtttgattcgttctctggcgaaaaccggatcgctgaatctcgtgcgatatatccccaagcgtgcagtacgtctctatccggcgctgtttctgctgattccggtcaccgtctccgtcggctggctgctcgatcacgatatgctggtttccatccgcgaccaagtcatcaccgtgctgctgggctgctacaactggtacgccattgccggaggccaaagctatttcgaccaaatgaacccgcaggtgtttcgccatctgtggttcattggcgtgctcatgcagttctacgtcatcgtgccgttcatcgtctggctgatgtggaagctccgccagacgaaactgccctcactcatcccactgggactcgcggcgttcagcagtatcgccatgtgggcgatgtatgtgcccaagggcgaccccacccgcgtctacttcggcaccgatacccacagcatgggcctgatgctgggtgtggctctcgcctggtgggtcaccgctcctcagttgggccacgctcgtcagggagctgtgccgatgccccgcaccattagatcgagcgcttcggccgccacgtaccgggctccgttacctcagattcctgtaaagcatcgcatctggaatgcgacggcaccggtattggcattcctcagcctgattgccttggtcaccatgacggttatcggcaaacaggatgcattcgccttccgcggcggcatcatattgtccagcctgttgtccgtgctgctgattgccggtaccatctccgacgattcctggatgcaaagcctcatggtgttcaagccattggccgccctcggcaagtattcgtacggcatttacctgtggcactggccgttgtggattctttccagcgcccttgccccgaagatcttcaaggcagcagggccttggcctctcatcatgaccgcgttgctcaccgccattgcggtgatgatttcctggctgatggtggagaaaccggcggcaatgcactcggtgatatccgtcgtggtgccccttcgcacgaacaagaagaatcatgcggcccgggttattgccgttgacgttatcctggcgctgtcgttggtcggctgcgcgcagggcattactcatgcacctgcgaaaaccgccatgcagatccagctggagcaacaggccgcacaactggaacgcatacagaaaaccgaacacgtgctgctgcgccatgccgtgccggcaccgcccaagcccaagcatgagatgcccaccggcgatcagattaccgccataggcgattcggtgatgctggcctcatcacagggcctttcggaagtcttccccggcattcagaccgacgcgagcgtttcccgctccatcatggtcgcccccgaactcatcggcaatgatctgtccgccggcagtctgcggcaatgggtgctgatcggccttggcaccaattcggcaatcacccctgatcagctggaccagattcgtaatatgatcggccccgaccgcgtgctggtactggtcaatgcccacggagaccgtacgtggattccacctaccaaccaggtgcttgccgactatgcggccgcacatccggacaatgtggtgctggtggattggaatgccacagccaacgcgaacgcgcaggtgctcggctccgacggcatccacccaagcatggatagcgatatctatgcaaaggcggtcaaacaggccatcgaacaatggatcgcaagcggcaggtgaacggcaggcaacgctgagttgtccaaccggtcgtgaagaacggctatgctgaagactgcatcaacgagaccacacgttgggagacatggtgagcgcaatccttgaaggaaagcccgataagaatcttattctcgttacgggaaggattcatccgaaattggctgaggatgtcgccgagcagctcggcatcgacgtccttgaaaccaccgcatacgatttcgccaacggcgagatgtacgtgcgctacaccgaatcggtgcgtggcgccgatgtgttcgtgctgcaaagccactacaaacccatcaacaaggcgatcatggagcagctcatcatgatcgacgcattgaagcgcgcctcggcccgttccattacggcggtctgcccgttgctcggctactcccgtcaggacaagaagcaccgcggccgcgagcccatctcctgccgtctggtgttcgacctgctgaagaccgccggtgccgaccgcatcatgtcggtcgatctgcatgccgcgcagtcccaaggcttcttcgacggcccggtcgatcatctggtggccatgccggtgctggtcgactacatccgtgatcgtttccaaggccatctcgacaacgtcgccgtcgtctcccccgacgccggccgcattcgcgtggccgagcagtgggcgcagcgtctcggcggcggtccgctcgctttcgtgcacaagactcgcgacatcacccgcccgaaccaggcggtcgccaaccgtgtggtcggcgacgtcgccggca

SEQ ID NO: 498 - DNA, 4096 bp, Unknown
  R48_24m  MAG No. k141_40537
gacccctcgatgattcgcgtcggcgacacctactacatcgcaaattccacatttgactggtggccgggagtccgtttgcatgaatcccgcgacatggttcactggaatctgctgcccgggcccttaaaccgcgtttcccagttggacatgaagggcaacccgtctggcggcggcatctgggcgcctgacctgtcctacgcggacggcaaattctggcttatctacaccgacgtgaaaatcgtcaatggcgcgttcaaggattgcgcgaactatctggtcactgccgaggacatccgcggcccgtggagcgagccaatccgtgtcaatggcgtgggcttcgacgccagcctgttccatgataccgatggacgcaagtatctggtgcagcaaacctgggacttccgtgaatatcatcatccgttcgacggcatcaccttgactgaattcgatgtcaaaaccatgcaattgaagccggaaacagcccgcaccatctggcgcggcaccgatgtgaaattggtcgaaggaccgcacctctacgccatcaatggctggtactacctgttttgtgcggaaggcggcacccaatacgagcatcaggagtccgtggcccgctcgcgaaccttggatgagctttcgttcgaaagcatgccgagcaatccgttcatctccaacttcgatacccccggcacctacctgcaaaagcaggggcatggagcactcgtggatacgcccggcggcgaatggtattacgcttcgctgtgcggcaggccctggcggcacgagaacgagccggctcatggcgtgcgcggttggtgcacgctcggccgagagacttcgatccagaaggtcgagtgggatggcgatggctggccgtacgtggtcggcggccatgggggagagcgttacgtcgaagccccggccgacgccatcgcaaccgaggcccctacggatcacagccagcatgacgagttcgaatcgagcgaactcgacctcaactggaacaccctgcgtgtgccattcaccgagaccatgggccgcgtgggcggcggctcgctgaccttgcgtggtcaagggtcgctggcaaacctgtttgaactgtcgctggtaggacgccgttggcaggcgttcgatttcaacgccgaaaccaaggtgacattcgatccaagcaactacatgcagatggccggcctgaccaacttctacaaccacctgtgctggtcatgggcattcatcacctgggacgagaagcgaggacagcgcgtaatcgaagtcgcccagaacgatttcgatacgtacacgtcgttcctcaaagacacagccatcgccattcctgatgacatcgaatccgtatggttgcgaaccaaagtgcgtacgcgtacctacacctacgagtattcgttcgatggcaagacatggcatgagattccggtgacgctggacgccgccgtgctctccgatgatcgtgtggcccaacgttatggcggattctttaccggcgcgttcgtcgggttgggggccgtggacctttccggatacggcaaagaagccattttcagccatttcgattacatggaaatatgatgacgccaggcggctttcctgataatcagggaaagtcgcctgactattcggtactggggaatgaaaggcgacacttgtggcaagcgacaatgaacattgcggcgaccgtggccgcgaatgtaccataaccgtctccaacccggtgttgcgtggcatgtacccggacccgtcctggatatgggatacgacgcgcgaggaaatcgtgctggtcaactcctcgtttgaattggtgccggggttgcccattcatacgacccgtgatcttgtgacgtggacgcgcacggcgaatgcggtggatgaggcgatgtctcatcggctgctcattgatggcgtcgaggattccggcggcctgtacgcgccgaccattcgccgtatcggcgggcgatatgtgatcgtatgcaccgtggcccgcgtggatgaggtgaaggcgctcgctgcgggatgctcgcagaaggatattgataactgccgtgacgcccaaggcaatttcgtcatcgaggccgatgagttgaccggaccatggcgcggcccgtactgggtggccggggccgaaggcattgatccggacatctttgaagacggcgatggcacagtgtggtggacgcaaacgcgcccggcattacacccgcagtgggatggtcaaaccgagatctggacgcagcccatcgccccaggcgcgtggacgttgcaagaccataaaaccgtgatttggcgcggctatggcatggatgcggtatgggctgaagggccgcatttgtaccgggtgggcgattacctctacctgatgaccgccgagggcggcaccagcttcgagcacagtgagatgataatgcgcacgcacgcaccgcgcggattcgcggcggcgctcgccggttttgagaagaaccttgctgcgcaagatatctggattgagccggcgcgtgacggtgaacgaagcgtggtgggccgcgatgaccggctgtttgaggcttgcaaacgcaatccgatcctcacacaccgtcatttgggagcgggggagccagtccaatgcgttgggcacgccgatctgctgctgcatccgaccgtcggctggctgctcgcgtgtcttggcgtacgcgagactccgggcgaggaacccggagaaacgttcagctactgtggccgggaaacgttcgtggcaccggtcgtatggcagcacaatccggtctcgtggaagctggacggtggggagccgaataagcgtatcgatatcgacgatcccggttggccggtcgtggctccggggcttggccggcttcccgagaagttggtcgtggacgttgacgaggatggattgccatgtgcagtgaggggtgtggattctgcggggtgtgattgcgctgctggtaataatgccgcatgccctgctgagctcatccagctcgacgatacccgcctagtcggcgttcgaggccgtgacgattaccggttcctgcgtgtcgacgggcaggaatatgccgcgttcacccggcccgaatacacgatgatgatacatcaggattccacccatgctgtcatggtcatggcggaagcggaatccggccaattgacggccgaaatcaccgataggggagataagcggtgcattgcgcttggagcgcttggagccaacgaatggttcggattgcgcttgcatggcaatcgtttggaattccttgccgggcagcctgcatctgacagcattgatgagggaacaatgcctgatattgcactaattgcgcacgcggacgttacttatgctcgtatcatggcagattgtgatgcgcgattcctcagtaccgaatgggccggcggattcgtgggttgtctgatcggcgtaaaacggcggtaatggtctcagcccgctctacaatattgtgcaatcatattgtttaatcgttaaacaaatgcaagggggcaatcgatggcgcacgatctcgaacaactcaagcaagatcacccggatgtggcgaaactgttcgccgatgactggttgcagtaccgtaagtcggagattttgccggaacttacgcgcgaggcgcagtccacgtgcgaccgcatcaatcgcatctactctgaagacaccgccgaagctgagcgactgttccgcaaactcgtgcccgaggccggcgagggcgtggacttccgcccgccaatccggcttgattacgggctaggcctgaaaatcggagaccgtacgttcatcaacatggacctgctgattgtgggcggcggcccgatctccatcggttccgattgcctgattggcccgcgcgtgagcatctatacgccaaaccacgccatcgcccgcaagcctcgactggaaggctggcagcacaacgccgacgtgaccatcggcaacaatgtgtggctgggcggcaatgtggtgatctgccccggcgtcaccatcggagacaactcgattatcggtgcgggcgcagtcgtcacccacgatattcccgccgagtccatcgccgtgggcaatccctgccatgtgattgccgaagtcccggatgac

SEQ ID NO: 499 - DNA, 8286 bp, Unknown
  R48_24m  MAG No. k141_42620
gcgcgatcccgatggcgccatgatcgaatataaaactgaggatggcacctggcagccgtacagcgcccaggtcttccgcgacatggtcatcgatctggccaaaggcctgattggtctgggcgtcaacaagggcgactccgtggccatcgtgtctcgcacgcgttgggagtggaccgctctggatatggcgatcatgtccatcggcgcactcaccgtgccggtatatgagaccaactccgccagccaggtcagctggattttcaacgattccaaggtcacgctcgccatcgccgaggatgacggtcagcgcgacaagattgaatccgtgcgcagcgaggtgcccaccctgcgcaacgtgttcgtcatcgaagcaggcggcctgaacgccatcaagacctatggcgaaagcgtcaccgatgccgaattctgggaatacaagagcgcctcccacggcgacgaccgcgccaccatcgtttacacgtccggctccaccggcaccccgaaaggcgtggagctcacccaccgcaacttcgcgttcctggtgcgctccggcctgcagtacatgcctcgtgccggcgcatggcccaaccgccgtctgctgctgttcctgcccctgagccatgtgttcgcccgattcctggaattcttcagttttggcggcaccatttctctggccctgagctccaatatgaagaccatggtcaaggacttcgagacctttggtcccacgctgctgcttgccgtgccgcgtgtgtacgaaaaggtctacaacgccgcctcccagcgtgccggcagcggttttgcgggcaagatgttcatgcgtgccgccgaaaacgcgcgcgaatggtccaaggccgagcagaagggcgagaagctgccgcttcccggtcgtattgctcacgctttctacgagcaggtggtgtacaagaagattcgtaccatctttggcccgaacgccgactttgccgtcaccggtggagccccgatggattccgagctctcccacttcttcaacggcatcggcatgccggtgctggaaggctacggcatgacggaaacctgtggtccggtgtgcgtgagcttgccggaagacaatcgcatcggcaccatcggcatgccgatgtgcggcatcaccgccggcatcgccgaggatggcgagctggtgatcaagggaccgctggtgtgcaaggggtaccacaacaaccctgaggtcaccacccagcagatcaccgatggctggctgcacaccggtgatttgggcgatatctccgaagacggattcatttccatcactggccgtaagaaggacctcatcatcaccgccggcggcaagaacgtgtcgccgggtctgcttgaggcttccgtgatgacctcgcccgtggtcaaccagtgcttggttattggcgataagaagccgttcgtggccgctctggtcacgctggatctggcggatgccaacaactggttggaatcccaaggcgccaaaccggaacccgatctggcctcgctggccaagaacgccatcgttcatgccgaggtagagcgtgcggtgaacgccgccaacgagggcgtttcccgcgccgagtcgattcgtaagttcgagattctgccagacgaattcaccgaggccaacggcatgctgaccccgagcctgaagacccgtcgcgcgcaaatcgttgagcactatcgcgagctcattgacgacgtgatctacgtgccgttgaagaagtagctatcaactccctctgatccaaaaaataagctctctctgacgagggagctgtcagccgcaggctgactgggagagaccgcggctagcccgcgaaacaacaaggccgggtgcgacttgcacccggcctcagcttattcagtccaaaatcgccgaaacataatcggcggcggcctgatccagctccgcatcgctgatggtggcggtgccctgcaccaggaatggttcggcatagttcatgcctaccttgtaggccacgactgcgaatgggcttagcagctcctccatggtgtggttgtactcgccatccttgcggtacttggaggcgtcggaaccagtggtgaccaccagcttgagctccttgcccttgagtgcgtggcctccaccgtaggcccagcctgcggtgatgacctcgtcttcccattccttgagtagcgcgggggaggagtaccagtagaacgggaactgaaggattacgcggtcggcggcctccagtagctcgtgctccgtgtcggcgttgacggagaagttcgggtattcggcgtattcgtcgcgcacgatgatgtcgtcctcgccttgtgcggcgagttcggcaagcagacgggcgttcactcgcgagccgtccttcaggtgcggatggaatacaagaatcagcgttgacatgggatttcccttctataactgctaccaatgtggcctaatcaccactatcgtatgccgggaagcggaactcagtccagtccggattcaggtgcgagccgcgggatgccgcggatgagtaattgacgcgggaaaggatgctgactgatgatttggcgctgaagcttcagtgggccgcatatacgagtcctaaagcggataggatgggatatgacgcggatatcgtcggtggactgaataacgggaggcgcacatgaccatgaaccgcatgctgatgtgccgtacccatccggtaatggagttcgagtatttcgaacgcggcggatacgccctgagggcaggggagatctacgacgagtcccgaatcccgatcggcatgtatgtggacggcaaacctgagcccaccggtgagtcgattaccgggtggtggcgttctcgcggcattcccatgacccgtgacggtatgcgttccgtatttgccggttcgggtatcgcttcgacgaacgatctgctggaccgttccttgggactcagcctgtcggaccagtattgggtgcggcctctcgaccggcccgatctgacgtgggaaaaactgaactttttccacaacgattttgacgaacgacttgggcaggccttattcttcggtaattcgtcgcgcatcggcaacgtgaacaccccggatgtcaccagtgccggtgacctgccgaaacgttggattatcggtcccgatggcgtccgcagcctgatcaagggagggcgcaccggtcaggagccggacaacgagcgcatcgcctggcatacggcacgactgttcggcatcgaccatgtcgaataccgcatcggccgcgccaagggcatccgggtctccgtctgcgatgaaatgctcgaagacacgcaagagctgattcccgcagggcaggttatgcgcatcttccgacgcggcgacaacaccgaacgcaagatgatatggctggacgcatgtcagcaactcggcgtaagtcatgatacggcaaatgcggcgaccaacgattttctgttccttgattttcttctgcgcaacaccgaccggcattacaacaacttcggtctcatccgtgacgtcgaatcattcgagattcgcccggccccgatttttgacagcggcgccagcctgtggaacggcatggaccccgaagccatcaccaacgaagactacccggcgaagccgttctgggtcgacgactacggcgatgcggacaacgcctactggcagttgggacttatcgacgattgggaccgttatgatttggggatgctcgacgaggtgcctgaactgatacgggcacagctcgccaccaaccgccggctgtccgctgatgtgattgacgccatctgctccgccatgcaggagcgcatcggcatcatccgcaagcttgcacgatgatgccgcgccgggaggcaactcagtcgaggttggactgcgtgcctgcggtggcttcgttggcggcttgctcggcttgtgcctggtcgagcttggctcgtacgtcgttgagcaggccctgggcgcgcttggccaaggcctcgccgatttcccattgacgcatcgactggtcaagattgaggccgccggtttccagtgcctggacagcctgaatcagcttgtcgcgcgcctcctcatatggcatctgggcgatgagctcgcgttccttgtccgtcagggacgaggcgggggtgttcttgtcggtgggtgtggtgttctcggtcattttgttctccttatatatacggtatatatgcgtgaatgcatatggtgcattacgcggttgcggttgcggatgtggcggtggcggtaatgacgccctttttcagggtgacggtgatgtcatccccggtactgacccgcgaagcgtcatccagcacatggccatcggcggactgcaccaccgcatagcctcggttcagcgtggattgggggctgagtgcggtcagtgaggcatgggcgcgttcgacggtgagctgggcatcatccacgatacgccgcaggccgatgtcaagccgctgcagggaatcgtcgatcagccgctgatgcggttcgagcatggtatgcggttgggtcaggctcgggcggttcgcatatccctcgataagtcgaatctcgttctccacgcgcgaacggacccgcagtcgcatacggtcgatggcaccttcgatgagctgcgactgctcacgcacatccggcaccacgcgcttggccgcatcggtgggggtggaggctctaagatcggcgaccagatccagcaacgtccagtcatcctcatgcccgatggaggagattaatggtgtggtgcaggcatacgccgcacgaaccacacgctcatccgagaaaccgatgagatcctcaaacgagccgccgccacgggccacgatgatcacatccacgctcgggtcggcatcgagttgtgcaatggcctgaaccacttcggccgggcattgctcgccctgaacatgcacatggaccaccttgaaggttacggaaggccaacgaaggttcacattggtgatcacatcgccttccgcacgtgcctgaggtgcgcaaatcaggccaatagtcttcggaaactccgggagaggcagtttgtgatcggcatcgaacaggccctcgcccttaagctgcttgcgcaattcgtcgatcatggccttgaggctgccaccggctccgaccttgagaatcgtgtccccgcgcaacgacagcgaagtgcgcttcatccacaggttcggtttgccatgaatcaccacgcggtcgccctgaacgaactggctggccgcggccgcgaacctgccgaagccattgacttccatggcgatatcctcgaagtcgtcgcgcagcgtgatgtaggccgagccggcgcgacgggtattgatctgcgtgatctggccggtgacccacgcggacggccatcgttccacggcaccgtagaacttctggctcagcacacttaccggccacggattttgcgcgctggtttcagcggcgcgtgcaggcagctgatcgatagggcgaggctcattcggcagattgatggtgccctgatcaggcgcgaaagtgccttgacccggctcaaagccagccgaggccagtgaagcggcggtcggtggacggccggtagatgggtagcccattgcagtagtcatgcactccactataagtgcgttggttgatgacggtaaatatttaccgtcgcctgaaaacggtgtgatgatgaatgcgagaaccgtacgaagcgatgtatcagccgatgatggagatggtctggtgcatcagaagaaaggagtcattatggcgaagaaacgggtgctatgaagaggagtgagatatgcgttgcgctgacgattgagagtcgttagtgagctcgctgtgcgacacgcgagcagaaaacagttacgctaatcacacacttgtggttttggcggaaaatagccgaaaaccctataaatagttcgacacaccactgttgagcactagatatagtggtggggatgccgtattcttctagaggttcaaaaaacgacatcaatgtaatttcgtgtggcccacgtcgagtgcggccaaaatgcggaactcaggagagtgttcgccttataggaaaggggtgcccgatgggcgcacaggtgttggaggaaatcgtcaccgataacgagaccaaggtggccgccaaggcctccaccgtgctcgttgagaagcgtgatggtcgtgtggtcgacttcgaccccattaacatcatctctgcggtcaagtctgctttcggtgacctgaacaaggaagtcggccccgaagaagatgccatgatccgtggtttcgccaaccaagtcgaaggcgaaatcaaggggcgttacgccggccccgccaagatcgaggacatccagaacctcgtggagcacgccctcattgacgcccacctgtacgatgtggctcgcgcctacaccaactaccgtctcgacaaggacattcagcgtgccaaggccactgatgtcaacgaggccgtttcccgcttcatcaaccacgacccgaccctgattcacgagaacgcgaacaaggattccaacgtctactccacccagcgtgatctgctggccggtgccgtgtccaaggccgccgcgttcaacatgctgccgccggcggtgtccaacgcccacatgaagggcgacattcacttccacgatgccgactactcgccgttcactgcccagtccaactgctccttgccgaacttctgggacatgttggccaatggcttcactcttggcaacgctccgatggcttccccgaagtccatcgccattgcggccacccagattacccagatcatgaaggacgtggcctccagccagtatggtggccagaccgccaaccgtgccgacgagcatcttgcccagtatgccaagaaggattacgagaagttcctcgaggaagctcgtgagaccatccccgacggcatgccggttgaattcgcccgtcgtcaggtcgagagcgccaagaggaacgagcccgccaagctgcatttcggttcccgcgaaccgctgccgatggacaccccgttccacaccgacgttgacgaacttgagcaggagcgtgaaatcctcgccaagattcgtacccgcaaggccatctatgatgccatgcagaccatggaataccagatcaactccaaccgtgtgtccaacggccagaccccgttcgtgactgtcggctttggtctcggcaccgactggttctcccgcgaggtgcagcgcgcgatcctgctgaaccgtattcgtggcctcggcaaggaacaccacaccgccatcttcccgaagctcgtctttactgtgcagcacggcgtgaacgccgacccgggtgacccgaactacgatttgaagcagctcgccctcgagtccgccaccaagcgcatgtacccggatgtggtgttctacgagaacatcgtcaagatcacaggctccttcaaggctccgatgggttgccgctccttcctgcagggttggatcaacccggagaccggcaaggatgaagaagacggccgtatgaacctcggcgtggtcaccgtcaacgtgccgcgtatcgccatcgaatcccacggcgacaaggcccgcttctggaagctgttcgaggagcgtatggaagtcgcccatcaggccctccagttccgcatcatgcgctgcaaggaagccaccccggtcaacgccccgaccctgttccgcttcggtgcgtttggtcgtcttggtgccaacgacaacgtggaccagctgttcaagaacgagcgtgccaccgtgtcgctcggctacatcggccttgccgagaccaccgcggtcttctacggcaagaactggattcgcgaccacggctgggatccggaaggcaaggagttcgcgctgtccatcgtcaagcgcatgaacgagctgtgcaagcagtggagcaaagcggagggctaccactattccgtgtactccactccggctgaatccctgactgaccgcttcaaccgcatggaccgtgaaaagttcggccgtatcgaaggcgtgactgaccacgacttctacaccaactccttccactacccggtgtggttgcagcccaccccgatggagaagctcagctacgagaaggacttcccgtactacgcttccggcggcttcatcaactactgcgagtacccgtgcctgcaggacaacccgaaggcgctcgaagccgtgtgggattacgcttacaacatcggcatcggctacctgggcaccaacaccccgatcgaccactgcttcgtgtgcggcttccagggcgacttcgagccgaccgaggaaggcttcaagtgcccggagtgcggcaactccgacccggaccactgcaacgtgaccaagcgcac

SEQ ID NO: 500 - DNA, 3290 bp, Unknown
  R48_24m  MAG No. k141_42967
atcgggctgatgcgaggcttcatcgcggcattatcgtattcccgaacgatgaggaagtctatttccatggttttcgtggcatccgccctatccgagcgcgagaagaaatacagtttgcgcccattcgcccggaattgctgagccaccgcattctccaccagcatcccttcgttgagcgagagtttatcgaacagaatatcccggtacacatcatccggcgttgtctctcgatcggcaaacgcctgcgacaccagcaaaccggtatccgccatatagcatttgaatgaatcgttatcttcgtacaatcccagccccaccaaagggtcagtcgaattacggcacaggttcaccaagcgggcgtcttccaaccagaagaacgccgaatcgtattcacgagatcgagcccccttatcgaccgatgccagagtgaatcgtttctcatgcttggacagctgccctggaatctgagcgaaaatgccccgcacgcggccggcatcgccattggcgaacttgccgatatcatcactgtacagctgcaggatgccacgcttgatcgaatccacctcgccaaaatcgcgctgctcgacataatcggcaaccgcctgcggcataccgcccaccagcagatattcgcgccacagcctcatcgctcgtttgtgcagcgcatcgggcaacgggaccagacgctcgaacgatttgcgaatcgtttcagcaagcagctcctcccccatggcccagcagaactcctcaaaatcgagtggccccatgtccattttccgttcctcggaggggatgacgatattcgccacattcctcttgatggagatcagcgaaccagtttccacatagtcataccggccatccgcaaccagatatttgatgagctccctcgccgccggataccgctgcacctcgtcgaaaataatcaacgattcacgctcgtacagtcgcttgcggtaatacgcagacaacagcatgaaaaatgtgtcaaagtcatcacgctggttttcgaagatgtcgcgaacgtcgcgcggcaaacgcgcgaaatcgatgagaatatatgacttgtactgaatgcggccgaattcctcgacaatggtgcttttgcccacacggcgagcgccttcgatgagaagagcctcacgcccacccgctttttgtttccatgcgatcagcttatccagcatcttgcgcttcaacatgagcaatcacctcattacacgaaaacaacagtatgggcatatgctattctacacgaaaacagaggtatagaggtagccgattctacacgaaaacaacggtataaggacgcaagccgaaccggctcacccccccaatctctcccccatcacaccggcggcctgttcgattgtgcggttttgtgcgaatggctcacacggttcttagtgagaaccgttctctgcgcacctgaccctagaaccggatcagcgccttgatgaccttgcgctggtccatcgcctcgtaggcgtcctggatatggtcgaggtcgtactcggcggtgaacacgcgaccggggttgatttcgcccttgagcaccgcatccagcagaccgtcatcgaggtcatagtggcgcacgggagccgggccgcccttgatgccgatgttgccgtagaacgtgccttcggcgctgatctccacgtcgtgcggcaggcccacacgaccaatcacgccaccgcggcgaatcaggccaatcgccgtgtcgaaggactgtttggagcccacgcattcgagaactgcgtccgcaccatagccaccggtcatctccagcaccttgtcaatagcctcttggccacgctcgggcacgatatcagtcgcaccgaattcgcgggcgagcgccgcgcgatcctcgtgacggctcatggcaataacgcgcgtggcaccgcgcatcttggcggcaatcacaccgcacaggccaactgcgccatcgcccatgaccacggcggtgtcaccgggcttgacctcggcagaaaccgccgcgtgataaccggtggacatcacatcggaaacggtcagcaacgaagcgagcgtcgcgtcatcgtagtcttccggtgaaccgggcaccttgaccacggtgccgtccgcctcgggcacacgcaggtattcggcctgacaagcggagaagtagccgccgtgcgggcacacggattcgaagccggccttgcacaccgggcacttgccgcagctgtacgggaatggcacgaccacgaaatcacctggcttaacggattcgaccgccgcgccaacctcttcgaccacaccgatggactcgtgacccacctggctgtgcgcggcctgtccgctcagcccacgaaagaaccacaaatcagagccgcacacgcacgtgcgcaccacgcggatcacgatgtcatcatcctgttcaagcgtcgccttcggcacttcttccacggccatcttgccaggctccacgaaaatcgcagctttcatggtttcagacatacgttcataactccttgttttccggcatcgagcgcttaaggcccgttatcctcgtgttctattaaacaataatcgccttgcattaaccaatagccataaaccatgtttcgccatacccatgaggtatggcaacaaccgagcaattcactgcgataggccaatatccgagatacgctcactgttcgattcgtcgccatgagtaatctggagaaccggcgatgggacccgcctgaacttgtttcgaaccgcacactgctgatagttcctacacacgatttgacattgcatgaaatcgttgtgtcttcagcaggattcagcggtttcaggaaaggctattatgggctcgcaatccccatccgcagatgcccggccgggcacgcgcacggccactcctccggcgcacaaactccccgatatccatcttgatattgtgttggtcgtcttctgcggcggtgccatcggcaccgcgattcgctatgcgttcgcgcagattcccgcagccggcagcttccataccggcacgtttgtggccaacatgctggcctgcttctgctatgcgggtctgaccgcctatttggccggctcttcccggttcgacacgcgtgccaaggagctcaccagccgtgggctcggcatgggcgtatgcggcggtttgtctacgatgtcgacgttggcattggaaggcttcaccgcgattcgcgacggtcaggtggcagccggcattgcctatctactggtgacattcgcgctgggtctggtttgtgcgtctgccggcgtgtgggcaggaacgcatctggccggctcctcgaacg

SEQ ID NO: 501 - DNA, 20655 bp, Unknown
  R48_24m  MAG No. k141_43231
ctgggaaacgcggtttaagggcccgggcagcagattccagtgaaccatgtcgcgggattcatgcaaacggactcccggccaccagtcaaatgtggaatttgcgatgtagtaggtgtcgccgacgcgaatcatcgaggggtccgcatcgaacccggggagtacgggattggagatcttcatggtcttctcctcattgaaaagaaaggggccgtggaaaggaggaaaggaagaggttgaaaggaatcggcccaaagagccatgtacctttccacggcacggttatggttgctgcgactagcccttgacagcaccggtcaggccgccaacgatcttcttctggaaaatggtgaagcagatcagcgcggggatcatcgacagcgaggtgaaggccagtacctgagcggtatcgactgaatgctgggagctgaacatctgcacgccgagcggcaaggtgtacttgctggaatcgttgagcaggaacagcggcagcatgtaggcgttccagctgctcacgaagctcaggatgccgacggtggccacgccgggccagctcaacggcagcaccatacggccgaagaagccgatgcgagaacagccgtccagctctgccgcttcttccagttccttaggaatggacttgaggaatggcaccaggatgatgatggcctgtggcaggccgaatgctatctggggcaggataatgcccagatgcgagttgatcaggtgcagattgcgcagcagcagatacaacggggtgatggccacggtgatggggaacatcatgccggcggcaaacagcgagtacagcagtttgttgaatttgaactcgtatcgggcaatgacgaagctcaccatcaaggccagcaccacaacgcccaccattgtgccaatggagacgatcagggagttgacgagttccgaccagaagatgttcgaagtgaacaccgtcttgtaattctcaaagttccatggatcgggccagccggccgggtccctcgtaatctgcgaattggtgcggaagccgccgataatgatgtacagcaccgggccaacgcacagcgccacaagcagcagtgagaagaagtagacgaccgggttgccccacggggtctttgcggattttctcagtgtatacggatcataggtcttgttcttgcccttgcctacggacggggagactgcggtcgtcattgtgaaaccacctcatttgcaactgctgcggcattgccattgaccttggcaagcttggccgcttccttcgccgcacgcttggcacgacgcttggcatccctctcgtcagtgagcgcaccttcgagatctcggttaagcacgaaccgctggtaggtcaaggcaatgaccagcgagatgatgaaaatcaccacggccacggcggaaccgtaaccatagttgttggcgagtcgaccttcgcgcaccatgtaggttgccatggtggacgttcctgcggtagacgacacgtactgaccccagatgatgtagaccaagtcgaacagctggagagaaccgataatcgacatgaatgcccagatacgaatggtggggccgagcagtggcagggtgatgctccactgctgacgccagaatccagcaccatccactttcgcggcttcatagaggtcttcgggaatcgactgcatgccggcaatcatcaggatgacggcgaagccgatgtacttccacgaaatgatgaacatcaatgtccagatggcgattttcggatcggagatccagtccgccccgccaagtcctattttcttgagtagcgcattcaatgcgcctgtggtctggaggatgaggccccagccggtgccaacgatgacttcggaaacgacgtacggcacgaaaatcagggtacgaatcagtgcgcggcccttgaatctctggttgagcagcagggcgaagaggatggccagcggcccctggatgacgagcgaagcgacgaccacgaatagcgtgtgccccaatgcctgctggaagttcgggtcggtcagaatgatcttgtagttttcaaaaccgatgaactggccgttgacggtgggcttgccatagcccttccacttgaagaatccgtagtagccggccatgaacaccggcaggatgacgaatccgaggaacatgatcagggcaggaagcgaaaggatggtgatttcgatacgtttgcgagccttgtcgcttaagcccgacgtgcggcgctgtaccctcgcgcctgctgaaactgacattgttgaggccttcctaagaaaacaaattgggccgcggttgttgctgtgcaagcattcgcgcagcccgggaattacggtcgggtcagagcgaatcagcccttggccgcagcggtttcaacacccttgacgatgtcttgggcggaaccttgaccggccatcatgttgaccacgccttcgttgagtgcgttgccgatgttctgaccgaacacggtgtcgagccacatggacacggaggatgcgtcgttgtagacggtcagcacctgcttcagagcctcgttggtcaccacatcctgggcttccttgttggccgggatggtggagaacgcctcagcgtacttctcctgccattccttctcggagacgaagttgaggaagtccacagcctcttcaggcgcccactcgcccacggccatgccatcggaaccacccatgatggcagttggatcgccttcgccaccgtccatggtcgggaatgcgaagtagccgaggtcggccatgtccttcttgtccggagtcaggtccttgatcacgccgggctcccagccgcccatgagttccatagctgccatgtggttggcgagcaggccggcggaggagcttgcgccctgctgggccggagtggtcaggaagccatcgttgaaggcatcgaggtcgagcagcgcctgcacatcatcaccggtacgggtccagcacttatcgctgaagtccttatcggactgggccttgtcgaaggtgtcagcagagcattcgcgcagtgcgaaccagtaccaccagtgggcggccggccaggcgtccttaccgcctacggcaatcggcgtgatgccggcgtccttcagcttctgcaccacggtcttgaactcatcccaggtcttcggagtttcagtaataccggccttctcgaacagatccttggaataccagatgccgccgggaagcactgactgctgcacgctgtagatcttgccatcgatggtgccggtggcttcagcagtggccatctggttcttgacggtgtcggagatcttgtcggtcaggtccatggcttgcccagcttcgaccacatcacgtagcttctggccaccacgcgccataaagatatcgggggcggaattcgggtcctgcagagcggtctgcagcttgccgtccatatcctcgttctgaatggcttcgatcttgatggtaacgttcgggttttccttctcgaacgccttggcggcggattcccagtatgccttgccgtcgccagtggtggagttgtgccacatggtgatttccaccttgccatcggcgttcgtgtcgctgccgctcccgcaagcggccatgctgacacaggttaccgccgccagaagtgcggcggccacggacttgaacttcattgtcgtctccttattgttcttgaccagcatgaaaccgatccgcgatttacgaaagtttcgaaaggtatatcagccagttacatatctaacagctggtaattaatgatgttttcagtgaagcttcgccgtttcacctaccccatcagccttcttcaactttaccgaaaactcgctttatattttcgatacctttatcataaagagccttagtttgacggtcaaacgaaatttatatcggcttttttactatcaaaatcgttgaaattccaacctttttttatctatacataccattctttatcgtcaaattgactttacgaaagtttcgaatatactgataccaacattctctgatgaaggcggtcaatgatggcgtcggcagaacagcgcaaaagcaacggcgagaacaaggtcaaacttgcagacatcgccaaacagactggctactcactggccaccgtgtccaaagccctgaacggcaaggcggatatttcggaggcggcccggcaggccattgacaaagccctgaaagacaacggctacattcgccgcgtctccccctcccgtaaacaacgcaccatcgaggtggtatttcgggattttgagaccatttgggcgctggaggtgctcaggggcatcatcacggaggccaagccgcacaacatcaatgtcatggttgcggaaagtggcgaccggcagcaccccgactcttcctgggttgaaggcatcatcgaccgccagcccattggcgctattctggtgttctccaacttgacggacaaggaacgcagcatgttccaatcacacggcattcctttcgtcgtcttcgacccttccggcaatccggcattagatgatctctccgtacaggcggacaactggatgggcggcgtcatcgccacccgtcatctgctggaactcggccacaagcgcatcggcatcatcaccggaccggatgaaatgctctgctcacgtgcccggcttgacggctattcggcggccctcgccgaacgcaatatccccacctctcccgaactcatcaccgaaggcgatttcaccacgccaggcggttacgaaggagccatggcgttacttgaagacgaacaaagtcgcccgaccgccatctttgcaggcaatgacctacaggccatgggcgtttacgaggcggcccgtcaactgaaaatccgtatccccgaagatctgtccgttatcggattcgacgatatacagaccgccgcgtacatgggcccggcgttgaccacggtccgccagccgttgcaagacatggccgccactgcagcccgcatggtcatcgataccaatgaaggacgcaagattcagaagcgcgtggttctttctacgtctttggtggtgcgggacagcacgcggcggctcaaatcacgggattagtccaaccgtcagaacgacaccggttccttgcatgcctcgagaatcgctcgggcatcgtcacggtgaatctgcacgaatgagccgccggcctcaccggcatgatcggcgtacttgtcgagagaggcgggatcgtcgggcacgccggcctcagaaagagtcagcggcgcacctacgcggcgcaggaaatcgacatagcgatcaatgccttcctcggccaccgtgcgatcggttttgccggtgggcgtcacaccccacacgtcgaccgcccagcgggcaaagcgagccgtcacctcatcgttgaccaaatacacgtatgccatccaatgcgggtggaccacggccagaccagcgccgtgagcgatatcggtgtatgcggacagcgcgtgttcgatgccgtgcgtcacccaatcctcttccttgccgcgcgagataatgcggttcagagccaacgtggaatcccacattgcattggagcgagcctcataatctttcggatcggccaagcacgctcgccacgaacgcagaatatgacgttggatgccctcggcgatttcgtcggaaaggttgtcatccaccggataggagaaatactgctcacacgtgtggcagaacatgtcctcgaagccatacaccgtctgttcggcgggcaatgtcatcaggtagcttggatccagcacggagaacctgggcatcagcgggaacgacgtatagccgagcttgcggttgcgttcccaattggtgagcacggccgcatctcccatttccgagcccgttgccgcggtggtgagcaccacgccaaccggaatcagcccttcaggtgccggtttgccggtttcgatgtagtcatcccacaaatcctcatcgtcaccgatgccggaacccaacgaaatgaatttcgcgcagtcgattaccgagccaccgccgacggccagaatcaggccgacgccatgctccttgaccagtcgtacgccttccagcgctttgtccaatcgcgggttcggcgtaacgccgggcagctcgatgattttgcgcccgattcctgccagtgcagccgttacatcgtcataggcaccgttgcgtttaatcgatccgccgccatacaccaccagaacggcgccctcgacacgctccacctcctgtgcgatatggcacgcctgccctttgccgaagtagatcttcaccgggttatggaaaatgaaatctcgcatgcgtaactcctttgttgtgctgatgtttccctgagaacagcttatcttcttctgccgccgatatgttcaccgtcgacgcgccccagcccgccacaaccagaaaaccgcccttggcgacgttgcctcaggcggttttccgatggaaggagagaaaggagaaagaaggaatggaaaggtgccgtgcggacgtaacataacgccgcgcatggcaaaactaccggatcaacccatcgggcgcactggcatcataattgatgtgtacacgcccgatggagcgaattcagtcggtcagaccgatggtcactcgacctcagccagagcatcaacaatgtagttgttgatggtggccttgacggactcgaggtgatcggacttggtggcggcgatgagctcggactgcggcttgtcgaggctgtaggcttcgaggtcggccaaggtgacgttgccctcgtcgatgtccttgccgatgccagagtcgtaggagctgtagcgctcggccataaggtcctggatgaagccgtcctggttcatcttgtcggcaaccagcagaccagcggcgtaggtgtccatgccggcgatgtgggagcggaacaaatcctcctcgtagaaggaggtacggcgcggcttggcgtcgaagttcagaccaccgtgaggtccgatggagccggcctgcaggacttcccacatgacggcgacggtctcgtacagatcggtcgggaactcgtccatatcccagccgatgagcttgtcgccctggttggcgtcgagggaaccgaggaagccggactcgcgggccacgcggatctcgtgctggtaggtgtggccggccaggttggcgtggttgccttccaagttcagcttgaagacgtcggtcaggtcgtggttgcgcaggaactcgatggcggtggcggcatcgaagtcgtactggtgcagcgtcggctccttcggcttcggctcgatcaggaactgggcctcaaagccgatttccttggcgtagtcggcgcacatgtggaagaacttggcgatgtggtcggtctcgcgcttcatctcggtgttccacaggttctcgtagccttcgcggccaccccagaacacgtagttctcggcgcccaggcgcttgccgatctccaggctcttcttgagctggccgccggcgtaggcgtagatgtcggcgaacggggaggtggcggcgccggacacgaagcgcgggttggtgaacagggaggaggtgttccacagcagcttgacaccggtggacttcatattctcgtcgatcttgtcaacgaccttgtcgaggttggcgttggtctcgcgcagggtgtcgccttcgggggcgatgtcacgatcgtggaagcagaagtactcgacgcccagcttctggaacagctcgaaagcgtagtcgaccttggccagagcctggtccatcggatcggtgtacttgtagtacgggcggtgcgcggtgccggtgccgaacggatcaaccagttcctggttgaaggtgtgccaccaagcaacgccgaagcgcagccaatccttcatcttcttgccggcaacgaccttgtcggcatcgtagtaatggaaggcgaagtcttccttcggtcctttggcgcggccgacgtactcgatcttgtcaacatcccacagacccatttgggcgctcctttgcagtaggcgatattacggattgcaggaccaataataaaacgaacgaactaagtttgtcaaatgattgaattaatacgccgcgtctcagcgtgttgctagtcattgcaatggttttcgaatgcagtcaaggcacagatagtatgggcaagccaagaaagacaactcagccaagaaaacgagacttgataattgacgtcacgcaattcctcgccggccaccgctgaggccggctccaccaccccgccaactccaacagcaccacccccgccaacaccaccgccatggtcatcaccctgatgatcggctcgtttgtggccatcctcaaccaaacgctgatgatctccgccctgcccacgttgatgcacgagttcgacgtgcccagcagcaccgtgcaatggctgaccaccggattcatgcttaccaacggcatcatgatcccgatcaccgcgttcctcatcgagaccttcaccacccgccagctgttcctgtacgcaatgggcatatttgcagaatgatcttggcgttaatgcactggtgtccggtctggtgatgatgccgagcggcatcgccatgggcatcctgaacccggtggcaagcaagatgtatgaccgtatcggtggccggccgctcgccttactgggcttcgcgatcatgacgtctgcggctgtgctgctggtcaccatcatgaacacgcacaccgcggcggccatgcgcaccggagtgccggaagcggcggcatcggccattggcgtgcgggcttcgttccgcacggtcgccattgtgtgcgcggtctgtttggttgcgtcactcttcattcgtgatcgcggccgccgacttggacagcagcgttaggcgaatccttcaccgattgccggccttcttgatcagcacgtccaaagtaccggcttggcgcgcggcttccacatcttcccagtcgagaccggtgtctttggccctcccgtagaaaaaccgcaccagaccggcaaagtccggtttatatccggtttcccggaatgaacgggccagcgaatcaccgatttgcgggtcatcaggccttcgtgcctcatagatcgggatggaacaggatcgccacacgcctctcacatgtgcgatgcgattgacgatcatgccgccgtgcgcaccatcgtattgcgaggcggcatgtacgtccgccacctcgtagacaccaccatgaatgatgtcctcaactgtcagacgacctttgaccgcgctggcatcgcgaatccagaacatcgaagcgaaattggtgtcatcaagttcgcgaaaatcacgtatctcgcgtgtgccgatacgttcgtccttgtcatacatgaattcggccaaggctaggaatggcgagatacctgcgcccggaccgtgctgcaattcgatacgtaaatcttcggattcattgccggtcagtccaataccgctgacggcgcagtcataggcaaaccaatcccagaaccaccattcgatcctttgcagcacctgcttcggatactttttgcatgggttcagattcacttcgcgataatatatgcgtctcgcttcggcatagacggcgagattgcagcgtttgaacatctcggctacgtctttggtgtccagcattgctggcaaaccggcattttcggcagtagtagtggttgcggtgctcatggtgtttccccttcatgtgatgtggacggcgggctacgttgcccgccgtgaggcacactgtatgacgttcgtgcggtggcccgcaagcccgcatggcgagatggtggataagtggaaaacccaatgattccaaggggtatggaatgtgcataacagtggctaccgtcggtggataaccgcactttcttgcaggttatccactgatcgcgcagctgttatccaccgtctctgggttatccacatcgtctctggcgtgtcgtccactgtcagcagtcgatttctgcttcgtttggcgtgtataagtgcacggtgaagtgtataactccgcgcattaggcatatttgctactgagaaaggtcccgaaatcgccttcgaacgcatagctacactcagcagatgtattcagcatggcaatagacccacttaggcaccggcgaatgattttccctcgcttatagagtcggcaaaggcccaacacctgtcccaacgccgacgctactgcactggcagcgtcggcagaggaccacaacttggcacagcaacgacgctaaaaccgcccagcatcgttacacgtccaagttttggccgctaacgacgcttaatgaacgcttagcgtcggcagcaggtcacgcactggttctccaccgacggtaacgctccttagcgaagccagcccgccactctttggcacatcaccgacgctgagagaacctccagcgaagccaaccagccaaccgctggcaacatgacaccacccacacccctcagcgaagccaaccggccagcgcatggcaccccaacaccgctgagaacacccaccccaccagtgcacataaaaaaaaactggtcatagcggttgcgatgtaattgcatcgtaatcgcgatgaccagcctcggggggggggtgggctgcaacgagcaccgaatgaatcagatgatgatgccgttgcagtgatcgacttcgtgttggatgatctgcgcggtccagccggtgaaggtggcgtggcgggcgcggaaccgacggtcctcgtagttgacctcgatacggcggcagcgcagtgtgcggcgttcaccggtcagcgacaaacagccttcctgggtgtcgaaggcaccatccgaagcggtgatcacggggttgagcatcaccgtgatacggccaccgagatcttcgtccacgaagacgatgatgcgtttgcctacgccaatcatgttggcggccatgcccacgcaccgtgaacggttggcctccaacgtatccacgaggtcctgaatagttgcctcgtcgccgggcccagccgcttcagacggtgtgcgcaaaaacgaccgcgaagtcataatagggcgttgcatgttggaatcacgcttcttcgtgccagtggatgttggtgataagcggcagggagatgccggtaccgagcgacatgaccagtcgggcggcgagcagcatcgggaagttgaccgcgagcgcgcccagtaatgtgccggcggtgaaaatcacgatggccatgatgaacagtgttttggtggcgaatttgcgcaccatgaacggcgagctcggaatcgacaccgacagcaagagcagataaccggtgacaagccactgcaccaccgaggcgccgatggagaactcctccatcggcgtggagtaggcgatgttcagtgacgtttccgataggatgccgaggaaggtcaggatcgcgagcgagacgaccgcgatgacgagtttgttggagaccggttgcttgccgccgttaggcagctgtgttgcggaatgagtcacgatcttgttctctcctccattcattcagatattctgactacgacgttggaagtcttcctgcatgagtcgcagagcctcggtcaaggtgcgtaccgtggtttcgcactggtccgaggtcaatccgcccagcagttggctcaaatgcgcgtgatattcctccacatagatgcggcggatatccaagccgcgttcggtgagcgtgagcgtcaccgcacgccgatcggcggcatcggcgtgtttgacgacgagtccgaggtcggccatttcgccgacgagcttggtgatgctcggcgtagtgacgccgaggaatgcgctgacgtcgcccacgcgcgcggtgccggtatcttgcccattcggttcgttgatatgccagacggcgtcgatcacgtggacatagcgcggtttcatacctttcggcaatgccggcatcagttcggtgatggtcttggccttccagcagacatccaggaggctccgcacctcattcaccggaagcaagccggtcttggtatcggttcgggaatcgcacatcgctggcccaacctccaattagttaccaatagtcattaccataagtaactacatgcaggctctagacaaacccaacgacctgcgcgcccgtgtcgagttccgtttcggcataaaaaagccaggggatccctggcttgcaatgcacatatcgctgcaggtttgccgggacctatatgttcccggcaacaacagccgtatatacgttaccgatcagtgctgccctcatcatccttggcacccgccgtggcggcctcagtctccttggcgttccacccggtgacggcattccaaccactccatccgatgaccactagcaagcacagcgagaagacaatagtggcccaattgaacagcgagccatcgttattggcctcgaccagtgactgccagagccagataacgcaggccaagcaggtcaatgcatacatacgggaggtggagcgcgcggtgagtttcatggcggaaaaagtcctttgattacaagaatgacggcagataacagtgtgggatccgcaccagcggcaccggcacgaatcccacatcgaggaggagaaaggggaaggtcagctcttcttgcgcttggatatgatgtccacggcgacggccagcaggagcacgaggcccttgatggtcttcaccacggcggtgtcaacacccataatcgacagaccctggttgataacacccatcacgaatgcaccaatcacagcgcccgggatggtaccaataccaccggtgacggccgtgccaccgatgaagcaggcagcgatggcgtccatctcgaactccataccggcctgagcagttgcggaagccagacgggaaagcatgcagacagcggccactgcggacaggaagcccatgtggacgaacagcaggaagtccacgcggcgggtgttgataccggagaggatggcggccttgcggttgccaccaacggcgtacacgtggcgaccgaacacggtcttggtcaggatgaagttgtagatgaagaccagcacaccgacgatcaccagcatgatcggggtaccaccctgatcagcgttaccggaggaagccagcaggtaggtgacgaaggcgatgacgaccgcgacaagcacaatcttgaggacggtcaggctcatcggctcgggcaccaggccgaccttggccacacgggcgcgcttgcgcagctggctccaggcaaagccgacaatgcacaggatgccgagcacaatggtcagaccgtcgaacggaccccaccagccaaggatgttgggcaggtagttacgggcaatgccacggaattcgagggaggtaatcggcacggattcgccgacgatcacggtggcgagaccacggaagatcaacatgccggccagagtggtaatgaagcccgggatgccgatgacggcgacccagaagccctgccagacgccgacgatcaggccgacgaccagagcgatgacgatggcgagcatccagttgactccggcgcgttccatcagcagtgcacacacaccaccgatgaaggctaccaaggaaccaaccgaaaggtcgatgtgggtggcgatgatgaccatcaccataccaatggccaggatgatcacgtaggcgttctgctggatcagggacacgaaggagttcggcttcagcagcacacctccggtcaggatctcgaaggccacgacgatgatcagcagtgcgccgacaataccgtattgacgggcattgttggcgaccgtggccagcaggccggtcttttcttctttctttgcaggtgttgcagttgcggcgctcatcaggctgccacctccctttccttggtcatacccttcatcaggtattcctgggtaaatccattcttctcgacattgtcggtgacgacaccgtaggacaccgtgtaaatgcggtcgcagataccgatgagctcaggcagctcggaggaaatcacgatgacggccttgcctgcatcggcaagcttatcgatgatttcgtagatctcatacttggcgccgacgtcgatgcctcgggtcggctcatcgaggatgaggatgtccggctgcgagataacccacttggcgagcagcactttctgctggttaccaccggagagggtggagacattcacatcgatgtcatgacacttgatgttgaagtccttgcggtactgttcgacttccttgcgctcaaggttgtcgtccacaaccccgcccttgctgatcttggtcagggaggccagggatgcgttctctcggatgttctgcagcaggttcagaccgttgcccttacgatcctcggtggcgtaggcgagacctgcgtcaatcgcggactgcacgttgggcatcttgacttccttgcccttgacgaacaccttgccggagatgttggaaccgtaagagtggccgaagatggacatggccatttcggtacgacccgcacccatcagacccgccagaccgacgatctcgccggcgtgcacgttgatgttcgcatggtctacgatcacgcgctccgcgtcgagcggatgatgcacggtccaatcctcgacgcgcaggtattcctcgcccggggtattggaggggtggttcgggtacaggttgtgcagcggacgacccaccatcttgcggatgagttcttcctggtcgagcggcgtctccggcgtcacgtacatcacaccgacggtcgaaccgtctcgaatgatggtgacattgtcggcaatggcggcgacctcgttgagtttatgagtgatgatgatgctggtcacgccctgctcgtcacgtagctgacgaaccaggtcaagcaggtgggcggaatcctcatcgttcagtgcagcggtcggctcatcgaggatgagcagcttcacgtccttggacaatgccttggcgatttcgacgagctgctgcttgccgacgccgatgtccataaccctggtatccgggtcttcgggaagtcccacacgatcgagcagcttcttcgcctcggcgcgggtcttgtcccagtcgatcacgccacccttggcctgctcgttgccgatgaagatgttctccgcaatggacaggaacgggctcaacgccagttcctgatgaatgattacgatgccgtcggcctcggaatcattaatagtatggtatttgcattccttgccatcaaaggtgattttgccggaatagctaccgtatgggtacacacccgaaagcacgttcatcagggtcgatttgcctgcaccgttctcgccgcagatggcgtggatctcgccgcgatcgacggaaagattcacatcggtgagggctttgaccggaccgaacgtcttcgtgatgttttccatcgtcaagatggtgtcatttgatgacatgtcatcactcctcgtcacagttctgtgttcatggacatgcggcgcatatcggctatgcgccgcatgtcattgtgtttgtttacggattgcctgatgaggactacttagtcagctcgtcgaatcgatcctgggtgatgtagttggccgtgaccagatcctggaggttgtccttggtgatgttctgggggtcaagcagcttggacggaacgtcgatgttgttgttgttgaacttgccgttcagaccggagacttccttgccctcggcgatctcgacgaccatgtcgtacacggcgtcagccagcttgttcacgtccttgaacacggtctcgccctgcttatccttggcgatgttggcaactgcgatctccatggcgtcctgaccggtgatgtacggccaggagtcggtgcccggcttcatgtcgggacgcttggattcgatggcgttgatcacaccctgggcgatgccgtcgtacggagtgaggaccgcgtcgagcttctcgccgtgggcgtaggtggagtcaaggatggattccatgtccttctgcgcctgctcggtcttccagctcatcacggagatcttctgccaatcctcaacggtgaagtccttggtcacgccaccctgaccgtgctgggacggggagacgagcacgcccttctcgaagtacggctgcagcagatcccaagcgcccttgaagaagtacttggcgttgttgtcatccggggaaccggtgaacagctcgatattgaacgggccggtggcgccatccttaagcttgagctggtcaatgagccacgtggcctcgagcacgccgacctgctccagctggaaggtggcgtagtagtcgacggcgtcggtgttcatgatcagtcgatcgtaggcgatgaccttggcgcctgcatcgcgggccttctcaacggcggggcccactgcggtgccgtccttggaagcgaccacgacgatcttggcgtcgttgttgaccatgttctcgatgtcagcgttctgctgggccggcttatcgtcggcgaaggacaggatgaccttgtatccggccttctccagcttggccttcaggttgttgccgtccttgttccaacgctcttcggacttggtcggcatcgaaatgccgatagtggcgcccttttcgatcttggcatcaccgccagttgcctggccgctacggctgccaccgcaggccgcgaggcccgcgcacatggcaacgcctgccaccacggcgacgatcttcttagtgaacttcatttgttctccttcatcttcgaggggatggcgaaccctccttggtcgcccgaacctgagaataacctcaggttcatctcatagaataccgtattgagttaagttgtcaaactcaagaaagcgaatttcccgtcgtttatgttcaaccaatgaacgcaatggcgatttttcgcgcatcacaaggcgacacgccgaaaaatccacgctctgcgcctcgctgtgcctcatgctggtaacgactacactgaactcttatggcaacaaggcttttcggttcgcagacctcgcttcgcgaggcaaaccgcgccaacttgctggccagcatccacaagttcggcgccatgacacaggtcgaactggcagaggtgacaggactgtccactgcgaccgtgtccacgctcgtccatcagcttgtcgacgaagaccagctggagaccaaaaacaccgttcgcaacggtcgcagagccactctggtgacccttgcacggcatcagggcctcggcgtcgggctttggatcgcgcgacgtcatcttacgctttctatcgttgacttctcgaagtcaatcatcgctgagcacacgctccccctgccgttgggccacaaggcggacacaacgctggaacgcgccatgctgctcatcaatgagaccctgagcagcatcgacgccgaagccagcgagctggtcggcatcggcgtggctgtggccgcaccggtggccaccagcgaccacaccatagcgattcccggcattctgcccggatgggacggcgtcgatatcacggccccgttgcgcacggcgttcaacgttcccgtatacgtcgataatgacgcgaatttcgcggcatacggcgaatcccgtatgggcgtggcggcaggcaaacgcaatttcgtatatatctcagccaacgacggggttggcgcaggcatcgtcatcaacggcgaaatcatgcatggcgtgaccggcctggccggtgaaatcggccatatccaggtcgacccgctgggtgccatctgttcgtgcggtaaccgcggctgccttgacaccgtcgtggcggaaaacaggctggtgcagttgctcagcgtcacacacggcaatatgacgctggatgatctggtgtcctttgccaacgaaggcgaccccggttgccgtcgcatcatcgccgacacggccgtgcgtatcggtcaggtggcggctgatctgtgcatcagcgtggatccggaggtcattgtgctcggcggcaagctggccatgaccggcgacgtattcatccaaccgttcaatgaagcgttgcagcgcatgctgttccctgatgccgtggcacccatcgatgtactcgtgtcatcccacccgaacgacaactgcgcgctaggcggcgcattatgcgccatcgagttctcggttcgcaatgacgtcagccagtgaccggtaccaggagaagagtgagaagaaggaacacaccatgaggaattcgagcacacctcctctgctgcggctggaggacatctgtgtgaagttcggcttcgtcgaggcgttgaaatcggtgaatctgtccatccaacgccaggaggtcgtcgccatcgtgggcgataacggcgcaggaaagtccactctgatcaaggtcatcgcgggatttctgcagccgggattcggccatatctatctcaacggcgaacaggtgaccattccctcgatcagggaggcggaccgcatgggcatcgcatcggtgttccaggggcaggagttctgcgacaacctggacgtggcctcgaacctgttcctcggcaaggagatcaatcagattggcatacgcgatgacgattcgatgaactcgcgtgcccgttccgtgctgaagaccctgagctcggcgattcgggtcggctcccctatcgcatccttatccgtcggccagcgccagaccgtggccatagcacgcacgctgctcaatgacccgcagcttattctgctggacgaaccgaccaccgcactgtcggtgatgcagtcggcggaagtgctcgcatatatcaagagactgcgctccgaaggccggtccgtggtgatggtctgccacgatctgccggatgtgttcgcggtatccgaccgcattgtcgtgatacgtcaggggcacgtcaccggcgtgcatcgaaccgtcgaaacgtcctatgaggagattatcgccgaaatcgccggcgtgaccaccgaacacgagtacgaggaaatcgctgagaacccggaattcgattccatggtcaggcagcggaaactcatcgaccgcactatcagcgcggcagtgagccatggcaccggccatgactcaccattagactaacgtcccgttgccggagcgacatcgtcagcgcagagccaggttggccgcgccgatcagaccggcatcctggcccgcagtggccgcgacgatcttggcatggccgcggtaggcgctgccttccaggaaacgctggtagttgtagcgggccggctccagcaggatgtcgcccacggccaccacgccgccgccgatcacgaacaggtccgggtcaagcacggcggaaacggcggccatggtgcggcccagccattcgccgatcttgccgaacgcatacaggccaagtacgtcaccttcctgagccgcttgggacaccatcggcccctccagtttggtgatgtcgccgccgcacagttccagaagacgcttggcgtcctgaggacgacggcgcacggcggacttggcgaagttctccagcgaggttcccgaagtgtaacgttcggcgcagccgcgcaggccgcagccgcagtggtcgccgtccgggaccatcggcaggtggccgagctcggcggccatgccgaaggagccgcggtagagctggccgttgatcacgatggcaccgccgaggccggtgcccacggtcagcgcgaccatgttggagctaccctggccggcgccgtgcacgaattcgccccatccggcgcagttggcgtcgttttcgacgatgaccggcacggcatggtcgatcagcgcgccgacgtgctcggacagatcgtagttgatccatgccggaatgttggcggagaaggtgagcgtcttgcgatccgcgctcacattgccggcggcggagatgccgacggcctcgatatcggtgtgcccggcggccacagcctcgcggtacacctcggcgatgtgctggttgatggcgtcggcgtccatcggcgtggggacgcgccagcgctggatgatgctgtcattttcatcgcagacggcggcggcgatcttggttcctccgatatcaatggcgagcgtggtcatggcttactccttgaagactttcgtaacatgcgagatagcgaaaatagtagcgagccgccatgacctcccaccgcggtttttccgtggttcgtcatgcgtcgcgaacattccgccgatgcgcttcctcatgcatttcacccgttgcaaacgggcgcctcccttaacgccggcatcggtgcggacggcgtgtcgaatcggatgcaatcactttcaccgtccttgcggatggcatcgaagaacggcaggaaacaaaaaaactcccgacatgcatcgggagtttggtggcgaccccggccggacttgaaccggtgacctccgccgtgacagggcggcgctctaaccaactgagctacggggccgtgcgtgcctcgctgaggcacaagaggatatgttacagcatcatcggattacgacacgccgtctgatacatcgttccttccaccggcgaaccgaccgcaggtgtggtggacggtatgcggaccatatcgttcgaccgcgcacgaccgcactccccataagacagtagccgtcatgcgtcaacgcacgttgtgcgacaacgcggcacgacgcacggccaccgaggccagcaaaccgatgaacagcatgatgccggcgaccagaagcgtccactggccgccttcgacgaaccctgaagtcatcgcatcggcaatcttcggcgcctcgtcgccgaattgggccgccggcccatcaccgctgcggaacacgccgatcactccacccgccgaaccactgaccgcctgggccagaccgtcgccgaccttggcgggcagcccgagggattcgagccgcgccggcaatgttccgttgacggccatggccaacgacgcgccggagatggccgaaccgacggcggtgccgagctgtcgaacc

SEQ ID NO: 502 - DNA, 7947 bp, Unknown
  R48_24m  MAG No. k141_43289
cggcacgggcgagctgcacacgctggcgttcaccggttgaaagcgtggcaccggcgcggtcaagcgccagatagccgaggcccagatccaacagtcggcgggccacgtccaggaatgattcgcagatgttggtggccatcgtccgcatgtcggcaggcagggattccggcactccgcgcacccaatccaccgccgcatccaaggtcatcgcgctggcttcggcaaggttcagcccgcgcacgtgcggagcccgggcgacggcgctcagtcgggtacctccgcagtcggcgcatggtccctccttgagaaatcgagccacgcgcttcaggcctttctcgtccttggctttggcgagcgcgttctccaccgtgtatacggcgttgaagtaggtgaagtcgagttcggcgaaatcgtcgcctttcttcggcttgtaaagaatatgctttttgacggccggcccgttgaatacgatgtcacgctcttcgggcgtgagctcgctgaacggcacattggtgcgcacgcccatcgcgccgcacacctgcttcatgaggtcccacatgagcgaaccccatggcagcaccgcaccgtcgtcgatacttttcgactcatccggcaccagggccgcacggttcacttcgcgcacaatgccggttccggagcaggtcgggcaggcgccggccgagttgaaagcgagcgattcggctccgggcgcgtggaattccttgccacagccagcacaggtgatgggcagtccggccgccacgttcagcgtcggctcgttgcgcgccccgcaatgcgggcacacgtgcgaggcgacgcgggagaacaggagccgcagactgttgagcagttcggtcatcgtgccgaacgtcgagcggatgccaggcacggtgggccgctggtgcagggccagcgcggccggcacatgcagcacttcgtccacttgggcgcggctggcctgggtcaggcgacggcgcgtgtacgtggacagcgcttccaggtaacgccgcgaaccttccgcatacagcacgccaagcgccagcgagctctttcccgaaccggagacgccggccacgcccaccagttcgcccagcggaatgtcgatgtcaatgttcttcaggttatgcacgcgcgccccgcgcacttcgatcgtctgcggccgctgatcgttgctcatgctcggcactgctccgccgccgcgctatctgacctctgttcgagtgtcacgccgtcacctctttctcgacttcgcccttggctgccgccgcctgagcttcatggtctccagtatcatcacggccaacgacggcggccgaacgccggacgagaatctttcgtcttgggcaccgtccgccacctgcaattcgaactagctgaaccagcgtgacgatattgtcggctatcgatctgccgtgatcgtaatggacatcgtcgtccggaagcacgtcaccggttccgagaggagtcggcggcgcgctttcataagggcacacaatcccaagatcacacccacagatcaataccgatcaatactcgtacgtgatcgcggggtcgccgatggtcggcgtctgatccagtttgaggttggccgagccggccgcggtggtcacgtcgtattcgatggtcaccgtgtcctgaggcgccagggagatgtcgtccatgtaggtcatatggtccttggcctgcacctgtgcgaaggaactgccgttcgacgccgacacgttgctgacctcgcctccggccggcgtgtagatgaccacgcggttcaccgccacgcctcccttggcgttcgccgtgatgtattccggcagggatccggcctcgcccggctgcagggtgttggtgaacgaatacgtaacgtggtaggtgttgtcgccggtcctcttcaccgtcgacttgcgctggatgtaccagtccatcttcgaggcctgcatctcgttgaagtagacgccggtcaccgggttcttcgcgtcgttggtgatctcgccggtgacgccggcgctgcgcagcaccgcctgatcctcctcgtggaacgaccagaagtacaggtgccgctgctcggccatccggagcatcgtcttggcgacggtcatgagcttctgcgtgttcatgtcgctgaacaggtgggcgaccgcctgggtggcggtctcgctgaagtactggtcctgagcggagggcgtcagttccttgtaggcgccgttgagcaggaattcggcggtgttcgacccgttgagcacgcgtccgtcagacagggtcacgtcgccggtggcgccgatcatcgcctgcagcgcgacggggtcgagcgacatcacgccgtcggacgatccgccaaacggagccgcctgccagaacttctgggccatggacgcgacgcgcgggaagtccggcgtggacgaaagattatggatgacttgaccgaagtacagtccgctgtacagcgtgccgtcaccgtcctggttgacgtcatccaacgcggcgttggaggggaactcggcatccgcgtggaactcccccaccgcgatcttgccgttgtccgcgctgaaggaaccggccgaaccgatcaggccgccggttccgcggatctcggaattcgtctgggccagcagcacgtagttgcgggcgccgttcgcaccgaggaagttcggcagcatgttgagcatgccgctcaggttttcggtcacctgcgccagggcggccatctgcgtcttgccgttctgcagcgcgttgttcaccacgccgagtttggcgtcgggaagatcctggatcgtcctggcctgcgattgcacggactggtcgaccgtggcaagctgctgcgccgcggcgatgatcggctccatgttgagctgcccatcgccactggagaggctggcaccggtcagtgtggtgacgaccttgcccagctggggcagcgtggtctgcgcgaagtcatcgatggtaccgatggcggtgcgcgccgtcttcacgtcaccgccgaccacgggcatcttctccgccagcgtccacagaccgccgctgacatcctgcttggcggcggccgcctccttctggatgtagctcacgtcggacagcgccttgaccatgtcgtcggtggaaccgtccttgatgaccttggccgcgttgacgacattgttgaggtgcgctttggcgctcatcgccgacttgtacagtttgaatccgctgaagccggccgccgcggcgcacatgaccagcaacagcagcacgacgagcagcgcgttgcgaacgcgatgggttgtcctggggaccgtgcgtgcgtgtgatggcatgggctacttccttacgttatgacatgtatcgatactggctggctgcccggttacgctttcgctggacgggtagcccggcggacggcacgtagcagtgcacgacgtgcacatcgcgtatgacgccgggggtcgtcagcgcggctgactggggtggccgcggaccggtatctggacttgcagctgccctccggcgatgcgtgtcacctgcagcggggaacgtccgctgcagttacggctattaccggccagccgacagcaatcgctggtttagttgttggtcttttccggctggtcacccgttcccatgagctggcatgcacctttcagcgagtatctctcctaccgcatgccagtctacccatgcctgcgggataacccaaaaagccttgcaagaataccgaatttctttacctttggccctgatcgttcgacggctcgcaagacggcgtaacctcatccaaccggccgatccccggaggcggaaccagcggaatcctcgtgaccgggaatgcgatcgttcccgcttgcgcgatggcggatgcgcgcaacgccagccacaggtacgagaccgactacttccgtacaggatccgttgtggtcgcattccatcgttcagcgcaacgggccataacgccctaaacgatgccagccatgtacaacggcacatctcggatcggccccacatcccgataccggtcagcagagaaacgataagcaagcggataaccgtgcctcttctgcatgattacaagcgatttggcctgtcgatgagtcccctccttcacttccacgggcaccgctttgccattcctctcgaacagaaaatccaactcaccactggagttctcggccgaccagcaatagggtgaatggccgttcatcatggtcaattgctggcatacaaattgttcggcgatcgaacctttgaactctcgaaaacagtgcgtcaccttccagcaacacacgaacattcagaccgctcaacgctcctagcagccccacatcgaggctgtacagtttaaacgcagagccgtctgcatatgccgccaatggttcaagaggcgcactcacccgattcacgcgcaacgccaacgacgcatcgacaagccactgtatggcactctcaaaatccttgccacgtccaccagctcgcaccacgccgtatacgaacttcttgttctctttcgccaactgggaaggaattgaatcccatacctgattgagacgaagcgtggtgacggcgggactatcacgcatatcaacatgtttggagaaatcgtcacgataatcggagaccagactattctgcaatttacgaaccgccgtgaagtcaggattcggcagagtactggcgaacgcttcaacgatctccggcatgcctcctgtatacatgaaataccgcagccaagtcatgaccctgtcatgcattacgttaattagcggaaaatccttgggctcaagcatttcggccaaggcatactgtttgcacgcatacaggaattcaacaaaagacataggatacagcttgagtctactgaccttgccaaccgggaatgaaaacccaggatgcatggcgatgcccagcgccgatccagtggccaagacgtcatactccggggcgacttcattgaacatcttcagcgaagtcatcgccctcggcacctcctgtacctcatcgaaaatgacgagcgtatcctcgggagtgatcctagttccggactcgatcgacagtgcgggaatcagccgttccacattcagatccgcatcaaacaacatacgcatgttggcattgtcgaaaaatgtgacacagcagcaatacgtaaggtacttgacaatctttgatggagtcgtatactcatatctgtcaggtacttgacataattactgaagaggatgaaaaagacacacgaccagcgacgcttcgctcgcttccttattaaaggagactggcatgaacatcacacatgacatgagcaacgacctcaccgaatacgacccggaatcccgtcaagtagacggaccgaaccccatcgaaaaccgcatcagctcctccgcggcccgtgttcccgacatcatcagctgcacttccggcatcaccgtccagggccgccaactccactcgttcgcgttcaccacggacgcggccatcatccgcaacaccaatgccgacgccattctcgccgtatatccgttcaccggcgaaccagtcatcacccaggccctactcaccgtggcccaggccccgctgttcgtcggcgtgggcggtggcaccaccaccggcccgcgcgtcatccaactcgccatgatggccgagatgcagggtgcggcgggcgtggtgctcaacgcgccggcgccgccctccacggtgtacgacgtggcgcgcatcacgaacaccccggtcatcgccacggtcctgacctgcgatgacgaattggacgagaaaatcgaggccggcgcctccatcatcaacgtggcggccggccgcaggacgcctgacgtggtccagcagatcaggcagcgtcacccctccatcccgctgctcgccagcggcggttcgaccgacgagtccatggccgaaaccatcgtggccggcgcgaacgcgctgacctggaccccgccgaacgcgcaggagatgcagcgctcgatgatgatgcgctatcgcggcgaatccaccgacgacaacatgcagcactgacgtaaggattccgaacatgagcagtaccagcaacaacgccgccgtaaccggaaacgacgcggtcgacaacgtaatggccacgagtcaatcggcggagaacggcacaagccacaacaccgccgacggcgatatcaagaacgatgttctcagcagtttcatcagcattggccgcatcatggcgtatcgcgcgatacacagacggctcgtctcccccggcgccaaatcgccgcgcggcgaacatgctttcgacccgcgccgcggccaaggccgcgtcttggccacgctcagggaatccgaccagaccagccagaaggacttggccgcgatgttcggcatgagccgccaggccatggccgaactgttgaagaaactggaggccagcggtcacatcagccgccgtccatccaggcgggacagccgcgtcatgatggtcagcctcaccaaccagggccgcaaggccgccgatctgctgggcaaagcgcccgaccagacctcctccatgctggactgtctcaatgaaaccgagctacaaaccctacacggctacctgcagcgcatcatcgacacctcctccgacgacctaccggcctcgaccgccgaggatgtcaaaaagtgtgagctgcttatcgaacacctcaagcgcaggcgaatgccggccgaccgcgcatagtttgcgaacagcccgcacgacttgtggccgcataagcatgcggccgcacaacagtccagccgcacagtcatccagccgcccctacaaacacgcccgattcaccatttgcacgacatcttgcaccaaaccctactttgaaatgcggtattttgcgccaaaaccccattttgaaatgcggcattctgcacatacaaggcagaaaatgctactcccataagggattcggaaaggaactgccatgcttgagcgcaagatctcggacgatctgttggaatggaagctgatcggcaccggcaaagcactgctgctgaccggtgcctgccaaatcggcaagagctacgcggtacgcgagttcgccaaacacgaatacgctcattaccttgaaatcaacctgtacgagaacaagcaggaggcccgcgcgctcgcatcggcgaatgacgcgcaggagttcatcagccgacttaccttgttctcaccttcaacgctcactcccggcggtacattgattttcatcgacgaggtgcaagaggcaccggatgtaatgaccacgtcaagtttgatgtaccggcgtcgcaattcgacgatttgacgtttcaccacatgtcgctgattgcgaaaaacagcaagtcgtgattcgagcgtggcatcaccttgcttagtcatatcaacaaaatccttgatctctgcgagactcatgcccgtggatttcagacattcaatgagatcaagcaattcaagatcgccgtcatcgaagcatctccgtccgaaaccagttcaagcgataccgggcaaaagaccttggccgtcatagtagcgcaatgtatgttcggacagcccagtctttcgcgacacctgaccgatggaatatcccatgccaactcctttccctgcagtcgagccagtgtgagtccagccatattcacggatgtcctatgcggaacggacactcttcgactgcctgaaccttgcagcccaaacatgcatcaatcagcacaaatcacagacagtgggccatatacaacggcagcttgatgcgttctccatccacttcgagttggcggggatgcagaacgtattccttgcccaatcgttgggcataccttttgcggaatttgtcgagcgaagatacgccgtatcgtttcgtggatttcacttcaatcgggctgatgcgaggcttcatcgcggcattatcgtattcccgaacgatgaggaagtctatttccatggttttcgtggcatccgccctatccgagcgcgagaagaaatacagtttgcgcccattcgcccggaattgctga

SEQ ID NO: 503 - DNA, 54958 bp, Unknown
  R48_24m  MAG No. k141_43657
acgcgacgcatctcgacgagggaggcaggcaggaagccacgcagaccgatgtcgacgatgaggccgcccttgacggcttcgatgacggtgccctcaacgacgccgtcagcttccttgatcttctcgatgtcgccccaggcgcgctcgtactgggcacgcttcttggacagaatcagacggccttccttgtcttccttggtgacgacaagggcctcgatggcgtcgccgacctcgacgacttcgtcaggatcaacgtccttcttgatggaaagctcgcgggaggggatgacgccctcggtcttgtagccgatgtccaggaggacttcgtcgtgatcgatcttgacgacggtgccctcaaccagatcaccatcatcgaagttcttgatggtggaatcgactgccttgatgaagtcctcttcggtgccgatgtcgttgatggcaaccttggcgacttcagtgttgttctctgccatgtaaatatatggtttctaatagtggatggataatttctcgatattcagttatacgcacacccttacaggcatacagatattcacaatacaagcaactctgcccaaatttcctaggaaactctaggcgtgtcgttcggccatttccacgacgttggccaggagcatggctcgggtcatggggcccacgcctccggggttgggggtgtaggcggaggccttgtcgtagcaggccttgtccacgtcgcccttgatgcggtagcgaccggcttcttcgtcgtagacgcggctgacgcccacgtcgaccagcacggcgccgtccttgatcttgtcgggcgtcacgaatccggccgaacccattgcggcgacgatcacgtcggcgcggcgcatgtggtcggccacatcccgggtaccggtgtggcacaaggtgacggtggcgttgacggcgttgcgcgtgagcatcaggccaatcgtgcggccaatggtgatgccgcggccaagcacgcacacttccttgccgttcaaatcaatgtcataggcgtcgagcagctcgagcacaccgcgcggagtgcaaggcagcggtgtcgaaatgtcgccgcgcacatgcagcaccagttcgccgaggttgtacgggtgcatgccgtcggcatccttggccgggtcgatcatgtcgatgatcgcgttctcgttgatgcccttgggcaacggcaactggacgatgaacccggtgcaggccggatcttcgtcgagttcgcgtacggcagcggcgatgtcgtcgaagctggcgtccgccggcagttccttcttgactgaggtaatgcccacttcctggcaatcggcgtgcttgccggccacgtacttcatcgacccgggatccgaccccaccagcaacgtgccaagccccggctggatgccccgggccttgagcctgctcacccgttcggcaaggtcggtcttgatcccggccgcgattcgtttgccgtcgattattgtggacatcaacgccctcccctgtggtttcgatgctttctatcgaaacgataggctatcgttggaacaagtcaggattatatatcgttcgctctcacgaagaaggcgtgccatggggactcaaatcacacgacttacgcgactcgccgcagccggcctgagcgccgttctgttgttcgcgaccgccgcatgcgcaaccttctcccccgatgaaaccgagccggacaacaagaccagcgttcccgcaccgaccgggccgatcaatgtggtcgcctccctcaatcaatggggctcgctggccgccgagctgggcggcgatgacgtggaagtcacgtccatcgtgaactccaccaatgtggatgcccacgatttcgagccaaagacctcggacgtcgccaagctgtccaaggcccagatcatcgtggccaacggcgcgggttacgattcctgggccaccaaatcgatgaccaagaccacgaatatcgtatccgccgcttccgtcatgggtgccatggaaggcgataacccgcatctgtggttctccaaagacgctcgatccagcatggccacggccatcaccgatgcatatataaaggcactccccagcaagaagaaggccttccagaagcggctcaaggcatggcaggcggatgagaaatcgctggaaacatgggcgtccgagttcaccagatcccactccgacctcacctatgcagccaccgaacccgtggtctattatctgatggccgatctcgggttcaagaatcagacgcccaagggatatacgcaatcgaccacttccggcggcgaaccggcacccgcggacctgcagtctttccagaaactcatcgaagacaagggcgtggatgtgctggtcaacaacacgcaggaagccagtgacgcgaccaatatgatcactggcgctgccggtcgtgccgatgtgccggtagtcgacgtctccgaacaaatgcccaaggacgccgacacgctgaacgcctggatcaaccagctcatcaacaccatcatcgacgcggtggatccgagctatgactgcgaagacgccacggacggcaacgcgaattccgatgattccagcgccgacggcgccgccacggatgatgccaatgcgcaagattccaaggccagcaccggttccagcacggagcccaagtacatccgtcagtgcaaggcggccacatccagtgattcgtctcagtattcggcaaaggccgatgcctccaatggcgattccggcgatgcctccggcaacgaccagaccgactccggcaaatagttagaagcaaaggacagcggcatcggattcatgcaatgccgatagacgccttgcacgagaagggttgtgcgaccattgtcgagatggccgcacaacccttttctttggttgtcaccatccgtacacgatattgagaacgattgtcagcatcgtttgccacaatcgggcgttatgagtgaaacttccgattgcatcgtgttcagcgatgccgccatcaagcgtggtgaccatatcatctggcagcatggcacctttgccattcccaccggttcggtcacggccatcgtcggcaccaacggcaccggcaaaaccacgatgatgagggccgagctgggacttttgccgctttgccatggcagcctgaccgtactgggcaagcctgcgggcgagatgaacaaacgcatcggatatgtgccgcagagctatgtggcgaatgtcgattccaatctcaccgccgaacaatccgtgttgctgggcctgaccggcacccgattcggcatccaccccatcaccaaggcccagaaagccaaagcgctcgaggcgatggagttcaccggcatcgccgacaaggcgcagtaccgtctgtccgaactgtccggcggtttgcgccagcgtgtggccatcgcccaggcgttggtgtgcgatccacaactgctgatgcttgacgagccgttggccaacctcgatctggccagtcaacgcgccaccgtacacgtgctggccaagctgaaccgtgaactgaacatgaccatccaagtggttgcgcacgatctcaatatgctcttgccgattctgaccggtgccgtctacttgctcgacgggcacccgcactacgccgatatgcacaaagtgctcgactccgacctactcacccacctctacggcacacaggtgcaggtggtcaccactccgcagggtgacatgttcgtgaccccgacgccggatgagccccaggaccagccgcaggatatgcacacggcagccgaagtggcgcaattgcaccatcacgagcacggcaacgccaccaatggcagtgccgccaacagcgccgagaatcgataacatcaagctagccgatccacagcccgtcaacgggctgcagctcaggcatggagaaaatacagggacatgagcaccatcaacttttcgtatgatcccgaatggctggacacactgtccgctccattcatgaccaacgccttcatcgccggcctgtgcattgccctggccgccggtgtcatgggatacttcaccatcgcccgtcgttccaccttcgcggcccatgcgctggcccatatcggtctgccgggcgcgaccggcgcggtgttgctcggcctgcccgtatcactgggcatgggcgtgttcgcactgggcggcgcactggtgatcggtgctttgggcaagcgcgtttccgagcgtgaaatcgcaaccggcaccgtactggccttcgccaccggcttgggtctgttcttcgcgcgattgtcgagttccgcctcccagcagatgcagtcgatcctcttcggctcgatcctgaccatcaccaccggccagatcatcggcttcgccgtgttcgacgtattgctgctggcattgttggccatcatctaccgcccgctgctgttcagctcgttggatgagcaggtggcacaggccaagggtgtgccgatcgggctgatgaacgtggcgtttatggcgattatggccggtgtaatcaccattgccgtgccggcagtgggtaccttgctgattttcgcgctggtgatcacgcctgcggccaccgccaatattctggccggctccccattcaaggcgatggtgatcgccagcgtgctgtgcctggtgtcgatttgggccggactcgtgctgtcggcgatgttccccgcccccccgagcttcattatcgtgacgctttccaccctgttctgggctatcgccaaggccgtggagacagtgcggaagtaatctcattcatttttcttgcccccgctggcaaattcatagcgggggctttgttatatcttctccaccaaggcattggcgatggcggcgatgccttcgccgcggccagtgaatcccatatggtcggtggtggtggcggtaaccgataccgggcaaccaaccgccgcagacagggcggcttcggcttcagcacggcgtgtgccgattttcgggcggttgccgatgatcgccaccgaggccgatgccggcgtatacccgttggatgccagatgcgccacaacttcttgcagcatatcgatgccatgccttccggcaccatgcgcgtccgcaccgacaccgaacagtgaaccaatgtctcccaatcgggcggcggcaagcaacgcgtcaatcagggcgtgcgcggccacatcgccatcggaatcgccttcgataccctcgtatttggcggcatcggcctcgctgcatgaatcagacgccggccagtaaagcccggcaatccacagttcacggcctgagccggcaggcgcaaaacggtgagcgtcaaaaccctgccctatcaacactcctgcagaccccatgcagtccccttcgatggcgctacccagacgaacggcagcaaacgattatgaatcacgaagccccggcgtatcgcataaggacacgaccggggcctcaacaatcaaatcacttcttcttggacttcttctcggcttcgacacgagccaaagtatcggccgcggcctcttcgggctcggcggtgtgatgcttgtcgtcaccgggttgagcgggctcgtagcccaggttcacgtcgagcagacgctgggcttccgcctcgtcgatcttctcggacaaggcgatctcagaagtcagaatggcgcgggctttggtgagcatacgcttctcgcctgcggacaggccgtgctcgtcgacatcgcgctgggcgagatcgcgaaccacttcggcgatcttgttgacgtcaccggtggcgatcttttcgacgttcagcttgtaacggcgagaccagttcatctctttctcgatgatcggggtccgcaggatgccgaacaccttggccacttcggatgcggagacgatgtcacgcacgccgaccttcctggcattgtccacgggaacgttgatgaccaaaccatcggaagagagtacggacagctgcagatattcgcgcgtcactcccttgaccgtccgctcggtaatggcctccaccttcgctgcaccatgacgcggatagacgaccatatcgccgactttgtaagacatgtaccctccgagaactgacggcttacacacaaaaactcgaataattatgccatgcggcctggaccgcccctgtgagagcgctcacaaccacggagacacaccgaaaagggcaagaattcgccattttcgacgcgccaatgtagcgttttcgactccaacgcacgtagactttgggtcatggctaaagaaacgaagatcaaggaagataccgtcaccgtgcctgtcgcccaaggcgacctcgatgcggtgagcaatgctgaattctacaacccccacggagttctcggcgggcatctcggcatcggcaagcatgccgacaccgccacaatccgtgtgctgcgtccgcttgccaagtccgtgaccatcctcacccaggatggcgaatacccgatgacccacgaatacaacggcgtgttcgtggctaccgtgccggcctccggcaccaagaagcagcccacgattcccgactaccgcgtcaggaccgagtgggaaagcggcgcagtgctcattgaggacgacccataccgttatatgcccacagtcggcgacatggacacctatctgttcggcgagggccgtcacgagaagctctgggaggcgcttggcgcgcacgtgctgcgctatgacgatccgatgggcggcgtggacggcacgcccggcgagcaggtggtaggcaccgcgttctccgtgtgggccccgaacgcccatgccgtgcgcgtggtcggtaacttcaacgcctgggatggccgtcgtcatgccatgcgcgagctcggctcctccggcgtgtgggagatcttcatccccggcatcggcgcgggcgagacctacaagttccagatcctgaacgccaattacacgtgggagatgaaggctgacccgatggagcgtcagcacgaggttccgccgaacaccgcctccatcgtcaccgaatccacctacgagtggaacgatgacgcctggatgcagcaccgccgcaccaccaacccgcatgatggcccggtctccatctatgaggtgcacgccggcagctggaagcagggactgacctaccgcgacctggccaagcagctcgtggactatgtcaagcaggaaggcttcacccacgtggagttcatgccactggcacagcacccgttctccggctcctggggctatcaggtcaccggctactatgcggtggattcccgcctcggctcccccgacgacttccgttacctggtcgatcagttccatcaggccggcatcggcgtgatcatggactgggtgcccgcccacttcccgaaggatgccttcgcactcggccgcttcgacggcacccagctgtacgaggacccggacccgctgcgcggcgaacaccccgaatggggcacctatgtgttcaacttcggacgccgcgaagtacgcaacttcctggtgtccaacgccctgttctggctcgaggacctgcatgtcgatgcgctgcgcgtggatgccgtcagctccatgctctacctcgactacagccgcgaacccggccattggcgtccgaacatctacggcggacgcgaaaacctggaggccatcgacttcctcaaggaagccaccgccaccgcgtacaagaacaaccccggcgtcatgatgatcgccgaggagtccaccgcatggccgggcatcaccgcccccacctccgccggcggcatcggcttcggtatgaagtggaacatgggatggatgcacgacaccctcgagtatctgcacgaggagcccatcaaccgcaagtggcaccacaacgaaatcaccttctccatggtgtacgcctactccgaacactacgtattgcccatcagccacgacgaagtcgtgtacggcaagggctccctgtacggcaagatgccgggcgatggctggcagaagctagccggcgtgcgttcgatgttcgcctatcagtgggctcacccgggcaagaagctctccttcatgggcaacgagctggcccagtggggcgagtgggatcacgacgcctccatcgattgggattgcctgaactggcaggagcaccgtcaggtccagaccatggtcgccgacctcaacgccttctacaaggcgcatccggcactatggagccaggacttcgatccggccggcttccagtggctgaccagcgacgatgccgaccacaacacgctgagcttcctgcgcatcggcaccaagggcgagaccttggccgtggtggtcaacttctccggtgaagcctggcccgattaccaggtggcgctgcccaccggcggcaagtggaccgaagtgttcaccaccgatgacgccaagtacggcggctccgacatccacaacggcaccttcgaagcggtcgagggcgaatatcattcgcgtccgttctcggcgaagatcaccgttccggctctgggagttgtattcttgaagccggaagactgaactggtcaacaggctgaaaggtaaccggtttatttatgctcaataccacagcgcgtcagaatacgacaccgcgcacggtgctggtggtcgaggacgagcccacactcgccacggccatcgcccagcgcatcaccgctgaaggatggaccgctcgcgtggccggggacggcgcttccgccgtccaggccgcgtcccagctacgccccgatctggtaatcatggacatcatgctgccggtcatggatggtcttgaggccaccaaacgcatcgtcgccgaacgtccggtgccggtgctgatcctcaccgcacgtgatgacgaggccgacaaggtcatcggtctgggagcgggcgccgatgattacatgaccaaaccgttctccatgcgcgagctcatcgcccgctgcaaggcgctgctacgccgcgtggagcgtgcgaaggtcatcgccaagaattcggagaacgagaagctgctcgacttcggttcgatggtcatagacccggcccagcgcatcgtcaccgtgaacggcgagcaggtgcatctgacccccaccgagttcgatctgctggccacgctggcccgccgcccgaagtcggtgctcacccgcgaaaagctgctcgaagaggtctgggactgggtcgacgcatccggcacccgcaccgtcgacagccacgtcaaggcgctgcgccataagctcggcgccgataccatccgcaccgtgcacggcgtaggctacgctttcgagccgccgaccgcgtgatggcatccaaaaaacaacagcaatcccggcttgatgcgatgaaacctcgcgtcaagccggttgatttgttctcctctctgaagctggaactcagcgtactgatcgttatcgccactgccatcgcgtttgccatgtgctggttcctcctgaaattcggctggtccggttggatcgccatgccgctgactttggtggtggccttgggcatcacctatttcttctcccgcggcatcaccgctcccttacgccagatgcgcgatgtggccgaagccatggcggatggcgattacacggtccgcgtggatatcgatcaggatcgtcatgacgaggtcggccagctggctcgctcgttcaacgagatggccggcgaactcgaacatgccgataaaatgcgccgcgacatgatcgccaatgtgagccatgagctgcgtacgcccgtttccgctttgcaggcgatggtcgagaacatggccgacggcgtcaccgagcccactcccgccaatctggagagcatcctcacccaaacgcagcgtctctccgacctcatcgccttcctgttggatttgagccgtatggaggccggtgcggcgagtctgaatatcgagaagttcaatttcgccgactttcttgacgagaccatcgagccgttggaaatcgccgatggcggccacgcccacgacatccatgtcaccgtgccggccgacatctcgatggaaggcgatcaggaccgcctgcgccagctgttcaccaacatcatcgccaacgcgctgaagcattcggccgacggcaccaccgtgctggtcgatgcccatgaggatgacagccaaggcaccatcgtgaccaatgtggtgaatttcggctcccagattgcaccgtccgaccgttcggatatcttccggcgctttgtcaaaggcaagacgggtcccggcaccgagtcgggcggcaccggccttggcctgtccatcgcacgttgggcggcccaattgcacggcggcaccgtcaaagtggtcgatgacacgcgaggcgccgatttcgaaatcatcctgcctaaatatcacgtcgccgaacgctgatattgtccgccgtcctaccgtatactgtattcgaacagatgttcgaatacagggtgggaggcacagcatgacacagcaatccaagtcacgaaccatgccgcacgacaccacgctgtttgtcatgcagatggccggcgattccatgatcaatgccggtattcataacggcgatctgctgattgtcgatcgttcgttggcaccagtccccggagatgtggttgcggctgtcatggatgacgaaatcgccatcaagcggctggtttcacgggccggcatcaccatattgcacgccgagaatcctcgatatcccgattacatgccgagcaacggcgcttcgcctgctatctggggcatcgtcaccgatgtcattcacccgttgatatcgtcatcggaccgtcgcgccacggcatccgccaataccagcacgcccaccactttagtaccggcctgctgaaatgcctgaacgcattgccgcacggtggcacctgtggtgacgatgtcatcaatgagaagcaccgcgtcgccatggcctatgagatcacgcttcaccctgacatgaccggtgatacgacgggcacgctgtgccgaagaggtctgctgcacggagcgtgccttggtggaggagctcagggcattgcatggtcgcgcatcgacgccgtacccacgcaatgcccctgccaccgatttggccaacggtgccgtatgggcacgccctcttcggcgcattgatgccagcgatgacggcaccggaaccaccaatacgcgatgccccaagcatgatgatggtattggcgtcttgttcagcagcgacaccatgatgcggccgaaagggccgtcaagctcggtatcgtcgtggtccttccagtcgagaatggcacgacgcgccgctccctggtaaatcgatgcggaccatatacgggctccgccaccaccgtctgtatcccgctcccggcattgtgcgaacaaggcccgacatgccgcacacaatacctcatccggcgcgtcacacccagcgcagccgcgtggaaacagcagattgcaggcctgtgcccacatcgcatgccaccacttgtatacgctcggcccgtccataacgcgtcaccatcaagctggagtatcgaatcgcgcaagcagtgcatccagcagttgtaccgtgtcttgcggattctccacacgaacaccgatcgcaccggcctcaaccgcaggatagtcattacccgtaggcgtcatgcgatcgcccacgaacaccatttcatcggcccgtatgccaagtgtctgcgtcagcttgcgcacggcataggccttatcgatgccgcattcgctgacatccacactggtgtagccgccggccctgacccgcatgtgcggcagatcggccttgaccgcttcgaccagcgcctgtttcttcgtgttatcgcgatcccatgcctgtttggccgctacgggtgcgaactgtcccagagcggagaaggtgatctggctgcccctgttctcgattcgaggcccccatacctgctgttcccacaatcccagttcccgggcatgtcgctcaagactttccgagacagcggccacggtggcttcggacagatcatgcgcatacaccaaggcccattgcgtgccatcccaccggtaataccgggagccggaggcaggcatgacatgcagattgccgcgcctggcattcggggtgagtacatccagcacctgtgaggtgaccaccgccatgccgccccctgagatcagggccaccaccgtatggtcgagcagcgcacagaaccgttcgatcatcgcgggcctcatcggctgttttgagctggccagcgtgttgtccaaatcgaaaccgaacaccttggcgttggagcagacattatcgaaatcaagttcggaccacgaacataccaccatttgtcgcgcctccctcgttgacgaatgttcacagccaatgaaccaatcctaacgcatgttgcctccgccatgtcctatggtgggaaccatgcttcagccaccttggaacgcacgaatctaccgcaaccgccacggtcgcggcacacgaaccccgatgttcggcacccgtctgccccgttaccgcactcgcaccggcatgttcgacgatatggtggcggcccaggttcgcaggctcggccaagcgtggccggaactgatacgtccgctccagttcgcggtggaggatgtgccaccttcggatccgacgccttggcagaccgagccgaatatgacgtcccagtgcttccccgccagccacggcattcccgcacgagtcgtgctctaccgtatgccgttgcagaccgaggcacctaccaagctcgaattgcagttggccgtcagggatgagctggtggcccgcatagcggaattgtatgggcgcaggcccgaggaaatcgaccccgattggggcctgtgacagtattgcgggggccgtgccacttcaagtaagacagtggcacggcccccgcagctatatcggcgccgaaacatcatcagaccgatgcttcggcgagcgcgctctacttgacgatggaggaatcgttccgagcccagacatggaccgtggcgggcatcagcgttgaagcgtcgatggcggacaatccggcgatgtccttgtcttgcaacgaatcgtgactgaaacgcgctccccagctcactttcttggatgagtcctccaacatcagcacgaccgcggtgccatgatcgccggaaagtttgccggtctcaatcgtttgcgccgcgttcgcatccagcgtgatttcctcggaggtcaccgaagcaccggcatcatcgtaggcgtgcaaggtgaccgtcctgcgcgcattggacgtattggccagcgtgatggaggcctttactccgtcgggaagggccaaccccgagaattcggatggctcgccggcattgaccaatgcgaaatcggcttggccggagtcaccggagcgtgtggccttgacggagaacgacacggcatcctctgcggtggacatcacgcccaacgccccatcaggagcctctcccaagtcgatcgccgtcaccttatcggcagtgacggtggcatctttggcgggaaccaatcctttgtcggtaatccatgacagcccggtgctggtgtctgccttggcgaacagataagcggtgaccgcatcgccggcagtgatggacggcgccaccgacgcattggaggcggtcggcagcggcagcgcgaaatcagaacccttcggtgtcagaccatccatggtcaccgtacgtaccacggacgcgataggagtctccttgctggaaacggtcacgaacagaccatgctgcccatcgaccgcggcggacagttccatcgaggactccccctcagctggcacagacagcgtggattgtgtggacaatgccattttcccggctgtctcggaaccccagacggcaatgtcgacggtggtcggcttggtggagggattcgagacgatgagctgctgtgtggtaccggtcgtgccgccggagagcaggaacgactggctgagcgaggtcgatacgcaggatgccgccgatacgcctctcacatcgccgtcatcggcccatgatgcgatggtgccgacggtgccggtgccggatgcggcctgcagcatacgggtattgatcaggcgagctccctgatcaatcttctgagcaccggttttcaccgaggaatcgtcggtcggatcggcgtctttcaaagtcacgtcatctgaactggacttttgcccgatcgccgagacagtggcgctgtagacggagccgaacgccgcatagcgcgcctgcgtactcagattgccgacagtggcctggaaggcgctgtcgccgtacgtgccggtatcggccaatcctacaggtgccgggcagtaggtttcggactgggtcggactaactgtctggtcgatggcattatcggaagcggccaccttgtccacccagatattggggatgggggccatgacgagaacgacgaacagcgcaatcaacaccagcatggtgatcacaccgagcacgatgccgatcgcacgtttgaaaccagaagttgtgttgctcatgcctgctcctccaatccgtaggacggtcgtctgcgaggcatggcgaccaagcagtacaacgccgtgatcacacctaggcatatcagccaggcgtgcctccagacactatgctgtgcacgttgctgccatgaggtatccacctgctgtgaggtgctgctacgcagcgtcagacgatagtagctgccgctatccgtggagaccagggactgggtgccgttcgatgcggcgatattcgcgctcaactgttcatacggcatgtcgttcgaggaatcgccggtctcgggaaccacgtagatgccgccgaatccaagcgcgctgatggccgcgatggcctcttcgtcgggattggacagcagcgaggcacaggcctgggccagttgttcgtcaaccgcatcatgcttgccggacaacaggcgcgcccgctggaccggggaactgtcgatcagatcgccgcgcggggtgcgcatcaccgcatagttgacgatgttgcgggtctccgcgctcacggcaagcacacgatgatcggcactggcctccagataatcggtggtgaccatgggcaggccgttttcggacacgcccagtcccgcatccttatgacgttcgatgccatacatgcattggatgccaatgcagcacaccagtatcagagcaagcaccacacggccagacacgatgagcacatgcagacggtcccttttcggtgcgggatcgctgccggacgcatgcaacggttggaatcgcttcaccgccccaccggcgacgagacacacgcaggcaaggaagcccaatatcatcatcgcgatgccaggctgcgcggaaccggccacgacaccatcggcatccacggctatggccacacggctggaaatcagggcgagcgcgcctccacaaacgattaccacccacatcagccgcgaggtccgcaacgcgaacggcagcaccagcgaagcaagagcgagcagcgtgatgacgccgaacagcacagtgaccgccaaatcggcataatcggtcgatcccattcgccatcccagcgcacgctgtacggcctcaagcaggctcagcgacgccggcgacccgttggcggatgacgttggcactgtgatgtcgccgaacagttgacgccacatgcccaaatcggcgtaacgcaccgcattgacgagcgtaggggccaccgcaaaggcggcaggaaccggaataagcaacagcatggcgcgcttgcggcgcacgaacagcaggaacatcaggaacacgacgatcagcgcgaacagcagctgcggttcggcggccaccacagggatgaagcacagtgcggcgatggccgcggcctgaacggatgtgcgcggcttgagcgggtcttcggtatggtacatgcccacggcacggaacacgaatgcgaacgcggccggcaggaacaccattacggtgagcatcggcatattggcctgcgcataccagccgaacataatgccggtggatgcccacaacagtcctcccagcacacgaaccacgtccgagcgggtgaatacgcccgccagcgcccagaacgacaatgcgctcagcggcgcggccacaaacagtatcatcgccagagcggcggtcacatggccgagcgtgaccagcgaggccagcatcagcaccagcagccacggcgtgggcggcgcaggaatgccggtgccgctgccaaacacccatggcgtggtggtggactgcaccagttgagtgaagctggcaccggtggaaagcaacacatcggaatacaacgatccaccggagaatatcgaacggaacaccggccaatacatcaccacgatggccgcaaagcacaccagcgccatcaccacggctgcgctccagcgatatatggtgcgtgtccgcagatgggcacgttccagcggactgagcagcactctgccctgctgggattggaatgcatcccgacgatcatggaactgcttgatctgccgactgtcggcgaacaaaacctgcagggacgatgcggcgaccttcgactgtctggccaccagcctgcgcgatttcatgtttcccgcgatatcggccaaagccaaccatggcaggcacaattgcacccatgcttcatacggcttcttgccgaacatcatggctatggccatgccaaaactgcgaatcagcctccacagccagacgataatccaggacgacatggccaggtcagtgtacagatagcgctgttgggagcgatgcaccgtcatcgcatgattgaccgtgtgatcttccttaagcggctccccgcctcgcgtacgaatgccctcataccgtgcgcgacgatgtgatatctccgcttgcgggactaccaccacgcgtccgccgctcaggcagacacggcggcagaaatcgaccgattcgctgtaggtggtcagccaggcattgatgccccgcagtcgcgtgaattgcgacatggacaccagcgcgcccgccagcgacaccgcgaacacatcctgtcgcccgtcatactgctcctgatcgggttctccatcgaccaccagggaatgcacggcgtgtcggcctgcatacataccgacatcatgcaggtgggatccttcccaatcacactgtttgcacccgagcacgctggcccccggcgtattgcgccacgcctcaagcaatcgttcaaggcatgaggcatccgaggggcgggaatcatcatggagcaaccacaatgcgcggggagcgtcatccaaatcggcccgatccaacgcccggctgaccgcatcgccgaaggaacgcgcgcccttggccgaaacgatgtgaatggtcacatgcttggactgcggcacctccactaccggccccgatggcgagggaatgacctcgaacgaagtggttatcctcgaaccggcgcgcccggtcgcgtcggcgatgatgacgactcccggaagaacattctgcgtcaataccgaacgcaatgtagaccggaggaaacgcatatcttcctcaacggtgatcacagccgtaatgccggtatccacatcctgcctatgcgtatacggtcgagaagacatggcgtcggccaacgcctcatgaatatcgctattacctgtcggactcataaactcccagtgtacgcaccagacttgaagggggtgtgtgtggaactacgcctgctcccggtgctctcgcttatatcgacggcgttcgcgctcgctcatgccgccccaaataccgaatcgctcatcatggtcgatggcccatttcaggcattgttcacgcacttcgcatttggcgcacacacgcttggcatcacgggtcgagcctcccttttccgggaagaacgcctccggatcggtttgcgcgcacaacgccttgtgctgccaagatacatcgccatcaggtcggaatagtccccacaattcatgccatggctcttcggctgaatcgtcgaccacaccccacatgcgattctccttgcctattgagcttttcatacggactaaattacacacatgcaatttcgtttttgtcaaattctttctcgtgtcattacatcatttttatggaactgtgtgctatggcgcggacacgatgccctgatgccgttgcacatgatattgtgccgttcctgcgcaggaacaccatagcgcaggaacacccggcggatgctgtgtcaaagtgtcattcagacaatcgacagtttcaggaggggttatgacgcaggaatcaggtggggcggatccgcatatcaacccgccaagcttcattcctgcgggaaatcgacgcacccgaccttccgggcaggtgccacgctccttcgcccctgcccgcgcctcacgtcagtcaggtcaggctccatcggcccgtccgtccgtcacgggaaatgacatcgaagagcctcaaccgaacgccaacgccacggcaagcgccaacgtcacggacaacggcaggcggactccgcccagtttttctccgaaaaccggacgtgccacccgcagcacggctccggatgccgccgcaccgcgcagcattccgccgtcgcgagcgcggatgtcttccggctcatcccgcaacgccgtgcgcaatccgtcggatatgtcggtttcccggccctcatcgccagcagcaaacgtgtccacgaagttcagccatcttggccggccggcggcggcaacggcgaaaacggtaacggcacaccggccgcgcgccttgcgcatcatcttatgcgcgattgcggtactggtggcggcgttgattctttctgttttcggtgcctggcaatgggtggacagcaaactgaaccggagcgactggctgaccgacacccccaacacgccggcctcgacctggctgattcttggctccgacgagcgagacggttccaccgattacggcggcgtggacaatatctcaggcttcagaaccgatacgattctggtgctgatcaagcctaaaagcgggccgagttcgctgatttccattccccgcgattcgcttatgaacgtcgatgaccagtacatgaaaatcaatgcggtggcgcagattgccggcaagaaagccttggtaagcaacgtcgagcagattaccggccagaaaatcgaccatgtggcgcagatcaagttcggcggtctgcagaacgtggtgaacgccttgggcggtatcgaactgtgctatgacgaggatgttcaggattcctattccggactgaactggaaggcgggatgccatacgacggatggttccactgcattgtccttctctcgtatgcgatacgccgacgcgcgaggagacttcggacgcaacgaacgccagcggcaggtcatctcggccatcgtcaaaaaggcttccagcagtgggaccctgaccaatccgtccaaagtcgtggcagtgtccaatgccgcgatgagcgcactcaccgtggatgaaaaaaccaacccttacacgttgctcaccatggcgttggcgttcaaaagcgccaccggctcgaatggcatctccggcagcgtgtactggtccgaccctgattattacgttgatggcgttggctcctcggtgctgcttgacgacgccaagaacaccgaactgttcaatcaacttgccgacggcacgcataaggccggcaccgtgggcaatctggcggaaggctgaccgacgctttcccggagcccatcggcttcatcgtcggcgcatgatcgccaccattgcctacaccgccaatcatgcacgggcaaaatgtcatgtggataactcggcaagctagaaccacataccttgattcggcttgcgctttcggcatgcgctcccccacgctggaagcatgacatcacagcagaacgattcgaagcgacattccgcccatacggcatccgccgtatcccgggcgaagcaccgtttgggcgcgccgccattgcgcgcccgcctgaccatgcttgccgcggcgtgcccgatgatcgcgcaggcactgatgatggtcatactgctgttgcacgggcaatggctgttcgccgccatgatcgcaccgggcatattcgcctgtctcgtgtccctgctgctggcgctccccccacctccgggcccggagaagacccccgccccgcaacaggcaacgatcgatatcggtatcacggacgatgccgatgcccgcgccgcagacctccgtcatgcgccgtcgcagccgatagaatcgctgctgcacttcgcacgcctgccatggcgcaccattgtgggccattggcttgaaccccttgaccttgcggtgccgatcggcatgaccggaagcgagccgctgaggctcgatctgaaccgtcaggggccgcatgctctggtggccggcaccactggttccggcaaatccgtgttgctgcaaagctggtgtctggcgctcgcttcgatgaacgggcctgagcatctgaatttcgtgtttttggatttcaaaggcggttccgcgttccgcaaactcgaacggttgccgcataccgtgggcagcgtatgcgatctggatctggcgcatgccgtacgcgcgttgcgtgcgctggaagccgaactgacacgccgtgaacagctgtccgccgctgtccatgcttccgatatccgtgatatggtcaatccgccaccgcgcctgatcgtggtcattgacgaattcaatgccctgaaggaccagctcccggattatgtgaatcgtctggtgcgtattgcctcgctcggcaggtcactgggcatgtatctgatcgcctgtacgcagaatccgatgggtcaggtcagtgccgatatgaaggcgaatatgtccgtcagcatttgtttacgggttcgggaccgtctgcaatcatgcgagctgcttggtgatggtcgtgccgccgacctcagtccggcaatgcccggtgcggcgttctgcaacgattccgaacaggtgacggcattccgctgtgcaacggcgcgcgatatcgatgcggtatgccgccagatcgcgttcgcatcgcggttcgtcgggagcccgccgcagccgtccctgtttaccgcgccacttccccggcacgtaaaagaccggactgtggccaatcacgcaccgcaacgcattcgatttggacttgccgacgatggcatcaacctgcgagaagcgacggtatccctcaccggtggcaatatcggtgtcatcggcccgcaggggcgcggcaaaaccacgttgctgaaaacattggctcgacacgccagcatggctgatggcttggcggtacatgtcagttccccgcatcgccgggtatgggaatcgcaatggcttcgcaacggccgctgcacgccgtatgccagctcggatgcaccaccgcctccgcatatcgtgtggttcgtcgacgacgccgatgagttgttcgacccattccgcaccgacgagcaggcgctgtctttcacacatgcgttggccgatgagtccgtcagcgtggtattcgccgtcagcacgattcgcccgatacgtataccagagcattgcaataccagaatcgtgttcccgtgcggggaacgaacgtctgaccttatggccggagtccccgctcgcctattggatacgatgagtcatatcgatgccgacaacgcgggccgggccgtgctcatcgagggcacatcggcatgtctggtgcagtgcgcttcgtgaaaacttcggttttttctcggcgaaacctcttgaaaatcaccacggttcgtggttaccttggtactggacttaaggaacaacaccagccacggggcttttaagggaggcaagcaatgagcagcgcttttgattggcgagccaaggccgcatgtcgtgacaaggatccggaactcttcttcccggtgggcaacaccggtgcagcctatcagcagattgaggaggccaaggccgtgtgccgcacctgcaaggtgattgatgcatgcctgaagtgcgctctggacaccaatcaggattacggcgtgtggggcggcttgagcgaagatgagcgtcgtgcgctgaagcgccgcgccatgcgcgcccgccgttctcaggccatgcagatgcaaatctgatgttttgattatcgcttcgtcatactaggaaaccctcccacttgggagggtttccttatttttgggcttcgcatcactcatcctgagcggccctgagcttcatatcaagcaccacgcgggtgccgccttcgcggcgcggctcccaatgcacggaaccaccgaaatcattggtcacaaaggtgttgatgatctgcgtgcccaaaccagaaccggaagaacgagccaatcctccctgttcttcggagccgagaccggaaccgtcatcctcgaccaccacattgaggttcgggccggagcggcccacggaaatcgtgatatggccatccttgcggccttcgaacccatgctccaccgaattggtgatgagctcggtcagcacgagggacagcggcgtggcatcctgagcgggcatcatgccgaacttgcccatgtagttgatatcgatgtgctggtctttcatcgtggctaggtccacggccatgcgcagcaggttggcaatcaccttgtcgaagtcgacgacctcgtcggcggtctggctcaatccctcatgcaccatggcaatggtctgcacgcggcgttgcgcctcctgcaattccttcttgacctcatccgacttggtcttacgagcctgaagcctcagcaatgcggagacggcctgcaggttgttcttgacacgatggtgaatctcggaaatcgtagcgtccttggtctgcagctcctgctcacgacggcgcagctcggtgacgtcacggcatagcagaatcgctccgatacgaccgttgttgtcatataagggcagcgagcgtatcgagacggcggaacggttggcgttgagttcggagtcgaccgcggctttgcccgccagcaccaacggcagggtttccggaacggggtcgttctccttcaacagctgtgtgccgagttcgctgaggtaatggccaggcatggtggtcagcaggccgagacgcctaaagcagctgatggcgttcggggctgcgtatcgaaccacgccgtccatggtcaggatgatgaagccgtccgccacgcgagcgatatggcgctggctcatcaccgaatccttgtaggggaactggcctcgcggaatcatctcgtacagctgtttgcccgcgttaatgctttccgactcatatcgaccgttggattctcgtgtggccatattggtctcacgcacgaccaagcccaaggtcttgccattgtgccgaaccggcgcgtacacgttgcagacggtcgccttgcccacggttctcaataccgtggagcggaacaccacgctggagagcatggcggcgtccaattcgccgaccatgtcatccggcatgacgtttcccaccacgtcttccgcccgtagcgtcatcacggtggatgggcggcattgttcggccaccacgtatttgccgtcaccgtcctgtaccagcagcagcaggtcggcaaagctcagatcggcgatcacctgccaatcggcaacgagatgatgcagccactcgcggtcctcgtcgtcgaagtcggggcgcgttgcaaggatgtgtgaaaaatcagccatgcccctatcatacgcagacacgtcgccgccattgcggcaagccacacgggcaagtatgacgactattacgacatcgcatcttcaataccgcaccaatcgcgttgcacggctgcccgccgttcaggcggtcatcgcctcatacacctgagaggacaatgcggcgatctgctgctgcgcggttcccgagaccactcccgaggtcataaccaccatcacataatcccgttctgttccgtccgcggccttgccccacaccacggcggcatcattttccacgccggccagttcaccggttttattggccacctgaatgccagacggtactccggcgggtattttggcgcgtcgcgtctgcccgagcaatacgtcaagcatggagcggctggcttcggcggaaaccagtttgcctcggtacaatgcagcgaggaatctgccgcaatcggaagccgacgtccagttctcggtgccggtcccgtctgtgccggcatcggacaacacccgcaactgcttggatgagctgaagccgtatcgggcggccgtaccagtcacccgttgcatgcctgtggccatgtcgccatcgccgaccatcaataccagctgattggtggcagcgttcgagctgacggtgatcatctggttgatcagcgaggtggtatcttgcccgcccgcggccaaggtgccggcatgttgcttatcgtacacggcaagcatcacgtacagtttgatatccgaagccgccaccatgggctggccgccgacgctcacggttttgcccgtggccagatcctcgacatacaccgaccaggtgcctccattgccggccacagctgccgtgaccgccgaggacacatctgacatccgcttctcttccgccaccgtggtcaggtcgggagcaggtgccgccttgcgctccaaggtgtcatgcacagggcgttgttcgtgtttcgatgacgccgttgacgacgatgccgacgctgttgccggtgagtccgatgccgaggcgacgggcgatgttttggcgtgcgatgcgccgagaccgttatgcgcgtacatccatccaccgacgccgattaccaaagcggcgatcagggcggcgatcaggatcaatcccacgacgctgcctgttgcacgcgtgtcgctactatgcttggtatgccgagccaccgtcactgccccaatgtcttgtcaacactggccagcacccggctcatcaggtccgcggccaccgactgcccctgatattgggtgacaacggccacggcggccttatgaccattggcttcgacgatggcgaagtaattccaggtgtcctggatgccttggcctcggtgggcatgcacgatcatgtcggacggaatggttacgccttcggaagcaatgtccacgttcatcaatgacgcgcctcccttggcgtccactgcggcgagcatgcgggccgcatcgcgggaggaaccgtaattctcataaccggcattgctggccgccacatcgccgaaatcgcggttgaacgaggtgcccttatacccatgcgaagatgcccacgaattgacgccgctccagccacctaccgccgcggccgccatattgccggcattgttgtccatggaacccatcatcgcgtttgcctgcgctttggcgttgtcatcgccattgtcctgggccgcaagatagaccggcagatagagaccggcagccacgaattgcttgccggactgcgacgtggtcgcgatggtggcgtcctctgaggaatcggcgtatgttccatcgatgaccatggcggagacggccacatcggaggacgagtatgaatccgcgatgtcagacaactggctggatgtgatcaccggagtggaaggcttcgacttctccgtcgagcttttcttggacgaatcgtcgctgttcttgtctttggcgctatcagacgtgttcttcttggccttggacttggcgtcagaggaatccgtcgtgccatcatcggcggaatccgacgcatcggacccggtcgactgtaccgatgtttgcgcctgcggctgagctccccacaatcccatgctatgggtgacgaacaagccgatgaccaacgccacgacgcaaatcagcgcgatgagcacaatcaccaccgctttggtgtgatcgccgccaggacgcccggcgggaggttcaggagaagcaggtgccgcagggccagcggtcatgggtcccggtgccataggccccggcaccgcggaacccggcgccgttggcgtcgcgacggcgggcaacggcgccgccggctgcttcaccagcgtcagcgcgttatcgtcataggcaggggccgccggattggcctcgggctgctccaatgggcttccgcactgcgaacagaaggcatttccttgctcgttggcaaacccacactccgtgcaatacaccatcaccgaaccccttattgctgtgacgttctcatcttcggattccatagtatcgccaccattgggtgatagtgttcgtgtgagtcggtattgacaagcataaaagttacgctaacgtaggttacggcagcgtaagaagcgtatcgtcaactcgtgaaacgggggcatcaccatggcatcaacaaccgacgacgcggaaaagacgatgcatcacgacgctcataacagcgcgacgattgcagaggatgccaccatcgcatccaagcgtcaggcggctatcgaggcgcgcgaacaggcgttgcaggccaaggctgatgccgtacgggccaaggcccagttcaaggccgaggccattcgagccaaagccgaggagaaggcccggcacaagctcgccaaagcggagcaccgtgcgctgaaaatcgagggcattgcccctgcggaagtggaacgcaagattcgtctcgacgtgcacggacgaccaaagccgttgatgcgcggctggattcacgcgattgccgctcccctgtcattggcggcaggcatcgtgcttatatgcctggcacatggcgcgagtctgaagtgggcgtgtgccgtgttcatgacagcgtcgctgattctgttcaccaattcggcctgctaccatctgggcgattggagcccgcgcgtcaccgatgtgctgcggcgtatcgatcatgtcaacatcttcctgctcattgccggcacgtataccccggtttcgtttgcgctggaaccgttctggcgcaatgtgatcatcatatcgatgtgggcgtgcacggccatcgccatcgtgattcatgtgatctggatcaatgcaccacgctggctgtatacggtggtgtacatcatcttcggcatctacggcctggcttatatggtgatgttctggaattcgccgtatgcggggccagccgtggtggtgctgctgtgcgccggcggtgcctgctacatcctcggcgccatcgtctacgccttgcgcaagcccgacccttggcctcgcgtcttcggcttccatgagattttccactgcggaacggtggccggatatgcctgccatatggtggccatctacatggtgatcgtctcgctgtggcaataaacgctacgacatataagtatgcccccgcctacgggggcatactagtcacttataactcaggccagcggcttggcggccttgaccgtcacggacagctcgcggccgttcggtgcggtgtaggaaacgacgtcgcccaccttggcaccttcgatggccttgccaatcggggaatccggggtcatgatgtcgtagtcggtgccggccacgatgtcacggctgccgagcacgtaggtcatctcgttgccgttgagctcgatggtcaccacagagccctcgcccacggtgccttccggggcattctcgatgatcttggaatcgcgcagcttgacggtgagctcggtgatgcggccctcgttcttgctctgcgcctcacgggcggcctggtagccgccgttctcggacaagtcgccctcggcacgcgccacggcgatcttgtgcgcgatttcctcacgcagctcgccttcacgatgggcgagctcttccttcatcttgttgtatgcttcctgcgtcagcaggtagaccttgtcctcagccatatcgtcctcctgaaccgttgtcgatgctgaaacaattttcgttatttatgacaaaacgccggctatgaccccggcgttcgtcatgtgctgacctatggtcagcgggtggaaatgatgtcgatgacgaacaccagcgtgtcctcgccgccgatgccggcctgcgggatgccgcgggaaccgtagccgtattccggcggaatggaaaccaccaaacgcgagcccacgttatggcccggcacggtctggtcccagcccttgatgacctgtcccacgccgatgccgaagctggcgggctgatgacggtcgaagctggagtcgaatggggtatccttaccccacaccacgccgtggtagttcacggtgacggtgtcgccgcgacgcacgatcgggccgtcgccctcggtcagctccacaaccttgaggcccttcggggcttcgggcgccgggaactcgataacgggcgtggtgccgaattcggcgttcacctgaggcatctgatctgccattagtcctccttcaaagacacaatgcgccctaccttagcaccatcggcgaatcggcggtagtccttcatccctgtgcgatacgacacgctggccgtatacgtcgattccggtcatcatgctggtgaataccagacatgtcaatcagcattcgacgacattgacggcaagcccgcccttggaggtctccttgtatttggccatcatgtcttcaccggtctgcttcatggtttcgatggcctgatcgagggtcacgatgtgtgagccgtcgccgagcatggccatacgcacggcgttgatggcggtgttggcggccatggcgttgcgttcgatgcatggaatctgcaccagtccgcccaccggatcgcaagtcaggcccaagttgtgttcgatgccgatctcagcagcattctccacctgttctggcgtgccgcccatgactgcggcaagtccggccgccgccatcgaacaggccgagccgacttcgccctggcaaccgacttccgcaccggaaattgaggcgttgcgtttgaacaggtatccgatggcaccggcggtcagcagaaacgtgaccacgccctgttcattggcgttgtccacgaaatgccagtaatagtgaagcacggcgggaatgatgccggcggaaccgttggtcggagcggttacgatgcgcccgcctccggcattctcctcagagacggccaaggcgaagagatccacccatgcggcgtcggaagactcgagcacggcgtctttgcgccggctgtcgcggcgcagcacatcggaattcgaagcgagacgccgatacatcttcggcgcgcggcggggtacgtcaaggccaccgggcaatgtgggctccgccgaggtgcatccgtggtccacgcaggcgcgcataacacgccagatggcatcaatatcggatcggacctggatgcctgagcgtgaagcggtttcgttggcccatacaagttcggcgatgctgagatgatgttcccggcacaacgacaccagttcggcgcatgatgagaacgggtagggtgcctcgacgccgaaatcagtggatgatgattcgtccgcgtcggcaaaggaggtgccttccggaggacgttcatgaatgccgatcatcgggtcttcgggagcgcctttgcgcacgaatccgccgccgatggaataccagacctgttcgtcgaccaagcttgcggcggcgtcgaaagcctggaatcgcatgccattggggtgcgcggccatgcgcttccattgttcgaacaccacgtcgcggtcgtagtcgaaatggatgcgtttgaggccggcgaggttcagagtatcgtccaacgcgcaggtctcgcggatgcgcatcatgtggtcggtatccacggtggccggcagattgccttcgagcccggccatcgcagcacgatcggtgccgtggccgagaccggtcagcgccagagaaccgtaaagcgtgattttgacacgtgcggtgcgatcgaccaaatggtcggccagcaacgaggaggcaaaggcatgtgccgcgaccatcgggcctacggtgtgcgaggatgaaggtccgacgccgatggtgaacatgtcaagcacactgaacatttggctccttctcccctgctggttcggcatgccggtgtcaccaggcgtcatgccatcacgatatcgtattccagcctagcgcccggaatctttcgctttgcgcgatgatggccgcgcgcgtcgtgccggcgagcgataagtcagtcagtgagatagtgcggagaacatcataaccagtacgatgataccgatgatggccaatacgatctgcaccaccatcagcccgatggtcagtcccttcttggtggcgattttgggcgcgtacgcctgtgccaacaggaaggcgatgaagccgaacaccgcgtagttgacggtcagggccatcacatcgctgttcgacaacaccacgccgttcagcggctggttcagcgtgttcatcatcgtgctcatcacgaacatgccccacacgccgtagccgattaatccgacgacgccgtacagccatggcttgagtttgtcgttggcacgcagggtcagggcttcggcacaccacaacagggcgaagccgacgatgtaggtgaacgccacggcgatcagtatcacgatagtcgcccacggcaggagtgcggccacattgccgatcatggacagatagaatcccgagcaggcgatggcaccaacggtgagtgcagtgcccgcaatgacggcttgggcaagcatggtgggcagggcgccttgttcgactcgttcgacatcggtccagcgtgaagccatgtggattcctcgtttcatcaggtacatcgtcacaacgccacatagcctaacggccttttgtttcggccttataagctctccacatagtaagctgcgagcccctctgacgaggggagctgtcggcgaagccgactgggggagagaccgcggcacagccgcaaaaaacggcatcgaccacaggccgatttcaaggtgcctccggtgggactcgaacccacaagccgaagcgatcgattttaagtcgactgcgtataccatttcgccacggaggccaacttttctattataagctatctcctgccctgagcattgcttgcgggttgctgcgcttcgtgcagccgtcgcggcatagccgctcccttcgcctacaaacagcccagtgggctgtttgtagcagccggtagcgatagcgtcgccggcgtcgcatataacgcaaacagcccaccgggctgtttgcttaacggctcagcccgctggaggcacttaccacttatgctattgagccagcaaccggcgaccataatcgagcacaatgccgtccagcagcccgtgttcgctggcgacgaacgaatcgatggcttcaccatgatcggccttggcggcttcgctgacacgcgccagcacacggctccagaccacagcgccgccgccgaccacatcgatacggccggggtggatggtcttgtattcgcggcgctcggcgcgcgtcatcctaaggaacttgtcgtccacggcataggcgtcttcaaggctcaaccgatgcccgtcgaccacggtgtgatcgtattctttcaatcccatagccaaggcggtcatcgtggtcaccgtgccggacacaccgatgatggtacgggccttgcctgcgtccacggtgcggaaggcctcatcgatatgctcgtcgatgtccgcaacggcctcatcgatctgcgcctgggtcggcggatcgttggtcagatgacgttcggtcatgcgcacggaaccgatgttcatggagaatgcgccctgaacctgggtggtgggcgcactgacgccgtcgccaccgatgaccaactcggtggacccgccgccgagatcaaccaccagatagggggcgggcaggtcatcgcgattgaccacggaagtggcgccgaggaagctcaggtcggcttcttcagtgccgggaatgacttcggggcgcacgccgaggatacgttcgatctcatcctcgaactcctcacggttttccgagtcacgagtggcggaggtggcaacgaaacgcaggccgtcgatgggatgctcggcaatcacaccggcgaattcccgagcagccgcataggcgcgttccaacgcttcgtcggcaaaacgatgggtcttgtccacatcctgaccaaggcggatcacacgcaggatgcgcggcaccacctcatgcatgccatcggcatcgacacgtgcgattttcagtcgaatggagttcgtgccgcaatcaatgccggcgacggttacggattccttgctcattgccttctcctcgtatcccttagtgcgtatgaatggactgttcgcggtggctcatctgttgatcaatcatccagcgtgcagcggcagacggtcggatcgaactcgtctttgacgcgttccagcaccaaatcgccaatggggttgacgcccggccccataaccaaggactgggccagcagggcatgcaggcacttgacgcgcaccggcatgccgccggccgaagtgccttcaatatgctcctcgctgtcgccaagacggcctgccagttcgtgacggaatgccagatacagattatgggcctgctcatatgcggccttgagctcctcatcagcggccagcatatcgttgtattgctgcatcacgccggcggcctcgacatgggaggcggccttgacggcttccggaccggtcagatagcacgtggtggggaaagggattccgccgggcaacaccggacgggtgattacggcaagtggcctaccgcagacgcatcgcgcccccacggcgaccatgccgcgcgggtatcggccgagctgacgctgcacctggtcgatgtcatggtcgttggcgggctcggcaagcatggtgtcgacaagggccttggccttggcggcgatatcgatggtcactgttgggttccctcccctgtgttttgctgggtgttctgatcggattgggtgttctggtctgacttatcggactgcttggatgagtcgttggatgacgagtcagaggaaccggaagtatcggatttgccggactcgctatcggtcacaggctcatcggcctttttgagcgagtaagacagttcgctgtaccatggcaggacttttttgttgctggtattggaatcttccgttttctgggattcgcgatcggagccggtcacggcttcgggatgcagcacacgcacggcctgttcgccggggaatacgaagccgaggcgttcacgggcctgggcggtgatgtaggccttgtcatcccaacgcttgatatcgttctccaactcctgcttttgggcgatcagcgaggcttcctcacgcttgaggccattgagctcggccaggttcagggtataagtgtggaaggtggagaccagctggatggtgccgagtgcgatgatgaacagggagacgaagaacgctatgggccccgccgacccttttttcctgacttgtgctttgccggttttgccaggtttgccggtacgggacgacttgctcatgtcacatgaaaatacccgccgcattcgacttgacgaacacgacgggtatcgagcttcagtggaaactcacgcctttacgggcgtttcagctcacttggccaagtacttcttgcaggccttgaaggcgctgtagccggcgtactgagcggtggagccgagctcctcctcgatctcgagcaggcggttgtacttggcaacgcgctcgccacgggccggggcaccggtcttgatctggcgggtgttcttagcaacagccaggtcggagatggtggtgtccggggtctcgccggagcggtgggaaaccatggaggtgtagccgttggcggtggccagctcgatggcgtcgagggtctcggtgacggaaccgatctggttcagcttgaccagcagggagttggcggcgccgaggtcgatggccttctgcagacgagccgggttggtgaccagcaggtcgtcgccgacgaactgcagacgatcgccgaggcgagcggtgatggcagcccagtcttcccagccttcctcattgaacgggtcctcgatggagacgatcgggtactcgttgatgaggttctcgtagtagtcgagcatgtaggcggagtcgcgctcttcaccgtcgaagcggtacttgccggtctccttgttgtagaactcggaggaggcgacatccaggcagatgccgatctgcttgccaggctcgtagccggcggcggagatggcgtccatgatgtacttgagggagtcctcgttggacttcatcttcggggcgaagccaccctcgtcgccgaggccggtgttcaggccttccttcttcagaacgttcttcagggtgtggtaaacctcaacgccagcgcgcagagcctcggagtaggtgtcgaagccgtacggggagatcatgtactcctgaatgtcggtggcgaagtcagcgtgagcgccaccgttcatgatgttcatgttcgggaccggcaggatgtggccgttggtgccgccgatgtagcggtacagcggcaggccggcggactcggcggaagcgtacagagcagccagggagacacccaggatggcgttggcgcccagcttgcccttgttcggggtgccgtcgagctcgatcatcaggtcgtccagagcgcgctggtcagcagcgtccatgccgatgaccttcggagcgatgacctcgttcacggccttgaccgcgttaagaacgcccttgccgccgtagacggacttgtcgccatcgcgacgctcccaagcctcagcttcaccggtggaggcgccggacggaaccagacccttgccctgagcgccgtcttcggtctccaggtagacctcaacggtcgggttgccacgggaatccagaatctgacgcgcgtacacgctttcaattactgccacaactactccttaaaacggttgtgtatcttgaatgacattcttaagagtagtgcgatttgtggacgttgtgaacaacacgcccaaaatttagtgttagcgctcacaatgccgatgcgccgcctgattgcaaggcagtacggacgaaatcgctcagtcgacgtccttgccattgaggtagtcgatttcactgtcggacaatttcagttcgccggctttgaacgagtcctgaatctcctgcgggtttctggccgagggaatcgtgaacagatattggtattgcgcaagttcccacgcgagcgtgacgcgctggtaggagcagtcgtgggacttcgcgacttcgcggaaccggtcgaacagatgctcgttgaacgggtcaaggaatccaccgagcggcgaccagcagacgaaagccaaaccgagtttttcgcaggtctccaacgtgtgttcggggtcgcggtgaaccggggagaactggttctggacggccacgagacgatcgcccaaaatgttgtgggcggcttcgatgtccgcgttgtcgattctggagataccgaccgctttggccacaccttcgtccacgagctgcttgagtgcgcccatctggtcttcgtacgacacctgcggatcattgcagtgcgagtagagcagatcgagcgtatcgacaccgaggcggcgggctgattccttggcattggcgatcatggtttcgggtcgggcgtcggcctgccagccgtagttgccgttgccgtcaagcgtgcgcagccagccggttttggtggctacgagcacctgatctttggggccatgccacgagtgcagagcatcgcggaccagatattcgccatagcccatatcctccggttcgccggtgccgggtgcgctgggcagataataggaccaagccgtgtccaaataacggactccggcatcgagcgcggcatggatggtctcgatcgcctgatcacggttggaggggcgcccctcgatggcgagcgccattgtgcccatgccgaggcggggaatctcatagccggcaagtgttgccgcgtgttggtttttcatcgttgtggcctccatgccaagtcatcgaggagttggttagtccagaggactacctggtcggagctcatggggccttggcccagggaaccggtgaacggggtgggtacgatgagctggtgggtgaccgggcggtattgggcgcctttgtaaatacggcccatacgcatctggatggattcgggcgggtcgatacggccgatgcgcacgcggttggattgcgcgagaatctccgaaatgccgagcttgcgggccttgaacttcagacgggccacgtcgaacagggtctcgaattcgaccggcggcttgccgtaacggtcggtaagctcctcttccagatccttcaaatcggcctcgttgcgagcggaggcgagcttgcggtacgcttccagacgcagcttgtccgaatcgatgtactcgatcggaatcgacgcttcgatgggcaggtcgatggacacggccaccggctcgacgttctcttcgggctccttgtacttctccacggcttcggacaccatgcgtacgtacaggtcgaagcccacgccctcgatatggccggactgctcgtcgcccagaaggttaccggtgccgcgcaattccaagtccttcatggccacatcgaaaccggagccgagcgccgtgttctgcgcgatggtggcgagccggtcatgggactgctcggtcatcggcttggacgggtcgtacaggaagtaagcgtacgcgcgctcgcggccgcgaccgacgcggccacgcagctgatggagctggctcaagccgaaacggtcggcatggtcgacgatcagcgtgttcgcattggagatatcgagaccggtctcgatgatcgtggtgcacacgagcacgtcgatgtcgcgatgccagaagtcgcggatgatctggtcgagctgcttctcccccatcttgccgtgggcgatgccgacgtgcgcctcgggcaccagcgtgtggatcttgtcggcgatggacgcgatgtcctgcacacgattgtggacatagaacacctggcctcctcgcagcagttcgcggcgtaccgccgcggtgacctgcgcatcctcgtaggcgcccacataggtcagcaccggcaaccggtcttcgggcggggtggccagcgtggacatctcgcgaatgccggtcacggccatctccagcgtacgcgggataggcgtggcagacagggacagcacgtccacgttggtgcgcagggctttcagcgtctccttgtgttccacgccgaaacgctgctcctcatcgatgatgacgagtcccagatccttgaacttgattttcgggttcagcagcttgtgcgtgccgatgaccacgtccaccgtgccggtttccagaccctcgatggtctcgttgatctctttggtggtctggaatcggctcatggccgccacattgaccgggaaaccctcgaatcgttcgctgaacgtctcgtaatgctgctggacaagcagcgtggtgggcacgagcacggccacctgcttgccgtcctgcacggccttgaaggcggcacgcagtgcgatttcggttttgccgaagcccacgtcgccgcagatgaggcggtccatcggcacgggcttctccatgtcggatttgacctcgtcgatggtggtgagctggtcggcggtttcctgataggggaaggcatcttccagttccttctgccatggggtgtccgggctgaaggcgaagcccctggcgcgctggcgggcggagtacagcttgatcaggtcgtcggcgatctcgtggacgtgtttgcgggccttggccttggtggccgcccagtcggagccgccgagcttgttgagcttgggggcttcggcaccgatgtatttgctgacctggtcgagctggtcggtggggatgaacagtttgtccgccggggcgccgcgcttggaaggcgcatattcgatgaccaggtattcgcgagtggttttgttggcgccggtgccgatggtgcgctggcgcatttcgatgaaccggccaatgccgtgctgctcgtgcaccacgtaatcgccttttttgagttccaccaagtcgatggccttgcgccggcgtttcggcgttttggccacggccacggccgaagtgcggccggtcaggtcgcgttcggtgagcagggcgattttggcggctttgtccacgaagccgtcgatggcctgagagcggatgacgtcgaaattggcgatgccggtagtgttgatcgcgcgcctgagcctggccaaggtgccggccgcagcggcggtgatggtgacgtggaagccggcgtcgagcaggccttcgatgccttgggaggccttggcctcatcccctcggaattcggccgggttctgggcgtcgagctgcacatggccggtcagcgtggtgtccacgccgaaactggtgaggcgaatcaccggatgttcggagtattcgagggagctgatggtttccgcatagtcgaggaagctggctttgtcgaagctgatgggcgcgccggcgccgtggccggaagcggccacatgccagctggcggccaggaactcgttcgcggtttttgccaagtcttcggcggaacggcgcagtttctccgggtcgctcaggaggatcacggcgtgcttgggcagcatggagcccaccggttccagatggtccacgagcgcgggcatcagggattccatgccttcgaccggaatggcgttggcgatggattcgagcatgtcctcagcattgggaatcgaaccgaccaaggctttggcgcgggcgcgcacggcgtcggtcagctgcagttcacggcatgcggtggcccagatggtcttgaggccgtcgccgtaggtacgctggtcggaggcgtggaattccttgatggtgtcaatttcgtcgccgaagaattcgatacgcaccgggtgcggtgcggtgggcgggaacacgtcgaggatgcctccgcgcaccgcgaactcgccacggtccatgaccaggtccacgcgcgtgtaggcgttttcgatcagacgtttggcggcttcgtcgaggggcaggtcctcccccacggtgaacacgagcggctcgacgtcgcccagtccttggacgaccggctggatgagcgagcggatcggcatgacgagaatgcgaatcgggccgaacatcggatcggtatcgctcggatgcttgagtctgcggaacacggccatgcggctggccacggtgtccgcgcgcgggctcagacgctcgtgcggcagggtttcccaggcttcgagctgggcgatgtcgtccgggtcgccgtcataccaggagcgcagcgagcccacggtctcttcggcttcgcggccggaggccacgaccagcacgaccggcttgccgggtttgccggtcacaccctgcccgatggcggcggccaaagccgggcgcaagccttcggaaacaccggccagaacggaattgtcgatgtcgtccgaaacctcgatgtcaccagtggcgagtctaaggaaggtcttgtcctgttccagctcagacaggatgcctaccagtgagccgttgatcaggtccgggtgcgtcgcctcaccggccattgaacttctcctgggtcttggcaagaccgcggaagatgatgtcctcggcggcgtcggcgccgtcagccaggaattcgggcagctgcttgcgctggtccggaccgaatccgcccagcacccagttcaccgtgttgtcatgcgcgttcgcaccgcgcttggagtgaccgacgcccatgcgcacacgcgcgtatttcggcgtgccgagggaacggtcaatcgacttgatgccgttgtggccccctgcggagccgcctgccttgaccttgatacgaccgaattccaagtccatgtcatcgtgaatcaccacgatatggtcgggctcgatctggtaataggcgctaatggaagccaccgcattgccggaatcattcatataagtcagcggcttggccagaaagaacttgacggtgcggccgtccaggttcatcacgcttttaccgagcatggccagacctttgtggtcggcgaagttcaccgtccaacgttcggcgagcacgtcggcggtcatgaagcccatgttgtgccgcgtgtcctcatattttttgccggggttgcccagtcccgcaatcagccagaaatccgatgccataatccactcctcgtccgtcttcctatattcccgtatgcacgttctgtacgttccgtacgtcatgcgcgcgttcgcctcgcgcactggcccatgcccggccggattcaaccgtcaagattgtactcaacgccgccgtcaagccttggaatcggcaagcagcagggcacggcattgctcggcatccatcgatcggaccgatgaatggtgaaacgcttcgacgtcacgagtcacgatgacgtcggcgtcattgtcctcggcaacggcacggatgagcccgtcctcgaagtcgggctcatcggaccggtacgacatgcacgcatggcgttccataagtggacggatgtcgaacaattccatcagtccaccgatatcgtctcgcgccgcccgctcctcgccataatgcttgcgcaacacgcaatacacgtcattcaatgacgataccggcgccatgatctcaatgtttggctgtgcaacggcttccatgagcaaatcaacacattgtttatggaaaggcgctcgtttgtcattgcacaaatcgagcagaatattcgtgtcaaacagcagtttcatcccgtcccccaaatcgttccatacgtgcctgcgcgagaatctcctcatccgaaagatcgccttccgcctccggcaaattccggtcggcgaaacgttgaatcaactcctgctttttcctacgctcccgctcctgaatcagggagagcgtcagacgctcgaattccggcagtttccccgtatccgcaaggtagtcggtcagatcacgaatcaggtccgaataggtgcgcccattacgcttaagcactttctccgcgtcgcgcttccgttcggcattgacgcgcgccgtcaccatggccatagtcatatcgcacctccttgtaataccagtattacaagagatggggacgagtgaatcgcgtctattaggcggtgccgccagcgaccttttcgcgctgtttgccgttgaggcaccagtaggccagcgccacgaacagggccgccgaggatattgccgagcgtggctgcggacaggttatagaggatgcccgacacgtcgagcgccgcgacgcccgccgcgtcggcgccgaaaccaaacgttttggcgaccaggcccatcggcaggaagaacatgttggccacgcagtgttcgaagcccatcgccacgaatccggcgatcggcagcaggatgcccagcaccttgtcggatacggagcgcgcggcgaatccgatgcgcacggccaggcagacgagcacgttgcacaggatgccgcacacgaacagcgtgtcccagcttggcgtcactttaacatcaactccggttggaaaaaaatctcagtatgtagcattcggttctcaaataggagaaacatgcagcggcaatcaacaacttgtcgtttacgacgccaagcaagggaaacagctcagacagatgacgcttccctgcaatcggatgacatattgcgggacggcagcggattttgggcgttcttggcgtggcatcccgcaagcgttatcgcacgttatttgcaccgaatcataagaatggcagaattccaatgatttcgcaggaagagttgcgggacgcgagctatgtgcatcgtttgacgtgtgtggcatcccacgtgattgcgggatgccacgtcaaaacggacgaaaatcgcgtgccgtcccgcagtttgccgttatctgggataagcgcgtccgatatatggcgttcgaggaaaagagctgatccgatacaactttttagtgttataggacaccggaatccatggagagcaagggtaaaccgcctcgggcctacaggtccaaataccagtaggacatgtcccgcatggtgccggtggagtcggtggcagcggcgggcatgaggccgaattgggtgaagccgaagcggcgcatgagggcaatggagccgacgttatcggcgaaaatgatgccacaggccttgcgcatgtggcgggcccgcgcctcggtgagcagcctgtcaagcatgaacgtgcccactcccctgccttgccatgccggatcgatgtaataggccaaatcggtgacgccgtcatacccggcacgatcgtagaacacggagagcgcaccgaagccgatgattgaaccgtcttccgattccacaacaaaaacgccgtagggcggcgtatgggattcgacccaggcgcggcgttggtcgagggtgcgcggggtgaggtcggcggtggccccacccgccaccaccgcagcgttgtagatgtcggtgatggcttggatgtcggattcgacggccggatggaaggtgtatggcatgaagttcctttgaatacgcaaatagcccgtccttatgataaggacgggctatgtcagttgaggtaaccgactcccttcagtcgccttcggcgatagctcccctcaccctgagggaagccaagttacttgtcgagctcgatggccttgttgagggcgtcttcaagctcctgctgcgccttgccgtaggcggtccagtcgccgttcttcatggcggactggctgtccttcatggcttgggcggcatcgttcaacgcctgctggagttcggggctgcggtcggaagacgagccggaatccgactttccgtccgtggtgccggactgaccaccattggtatcggaaccagattggtcaccggacacgttctcggcatcgcccgcggccgcaccggaattgccaccgaacacctgatccaaggcctcatccaacgtatccgcgaatccaacctgatcaccgaatgcgaccagcgtcttcttgagcaacgggaatgaggtcacgcccgaagacttgacgtacacgggctgcacgtacaccagtccgccaccgagcggcagggtgagcaggttgccgcgcaccacttgcgtgtcgccggattgcagcaggttcagttccttggatacatcggcgttggcgttgaagttgttctgcgcctggccggggcccggtacgttcgaatccttgggcagctcctgcaatcggatggtgccgtagttcgagcctatcttgcccttctcattgccggcatctgagtcgaccgacaggaagccggtcaggatctcacgggtggactggccagccggaatgtaggtggaggtcagcgagaacaccggttcctcggtgccaccggtctgcaaggtcaggtagtacggcggctgcaggatgtcctggtcctgctgggactgggattcggtcggatcgaccggcgtctgccagaagtcttcgcctgagtagtactggctggcagaggtcacgtggtacttggagagcagctcgcgctgtaccttgaacaggctttccgggtagcgcatgtggctcatcaggtcgccggagatatcggagagctggtggtactggccagggaagatcttctcccatgccttgatcaccggatcggattgatcccacacgtacaggtccacggaaccgtcgtaggcgtccacggtggccttgaccgagttgcggatgtagttggccttctgagagcccagggacgagaccgttgcggaagagacggtggtggaatccttggtggcggagccgaggtcggttatttgcgagtacgggtaggcgtcggaggtggtgtagccgtcgacgatccacttgacgcggccatcgaccacggccggatacacgcggccgtcaagcgtcaggtacggtgccaccttggccacgcgctccttgggggaacgatcgtagagaatctgcgattcgctggtcacacggtcggagaagagaatctgatcggagccgaagcggatcgcgtagagaatcctggagaacaggttgccgaccgaagggccgccgtcgcccttgaacgtggtcagagcaccttccgaaccggtcgggtagtcgaactcccaagcctgcgtgccttcaggggcaccgacaatcgagtattcggtggtgttcggcgagaagtagatgcgaggctcgtacttttcggattcggtgagcttgccctgggtggggatgccggattcgaagaattcgggctggccgtcggcggtcaccttgttgccgtaggcggccaccacgccgtaaccgtgggtgtacacggtgtggtcattgacccagttgcggttgtcattgccggccagatcgagctcgcgggcggcaatcacggtgtcctgggagacgccgtcaatctcgtacttgtcgaccgccagggtgtcggcgaaggtgtagtactgcttggactgctgcaactgtttgaacgtggggctgacgacctgcgggtcgagcagacggatctgcgcggtggtgtcggcctccttggccagagcgccctgctcacccttgtcggtcaccttgtattgctcggtcttgagcttgtcaagaccgtaggcggcgcgggtggcgtcgatgttgcgctggatgtaggtggattccatctcctgtgcgttcgggttgacgcggaagcgttgcaacagcaccggccatgccacggtgagtacaagacccaccacgaccacgacggcaatggaggtcaccggcacacgccaggccttgagcgcggcggaagcgcgcacgccgatggacgcctggccttcgagcgtgtgggagcgcatgagccagatgcccagcaccacgccgaggatggcggtcagcacggccatgatgaaggtgacggggatgttggcatgtacggcggtgtaggaggcaccggtgatgcgtgaaccctgcacggtgagctggtcgaagacgccaatcatctggcgcactgcccaagcgaacatgttgagcatcagccagatgccaagctggcgacggcaacgcttggtaatggagaacaggccgcgtccgttaaccggcatggtaatgcggataccgcccatcagcacatgcgtgaccacggaaaacacaaggcccacgcccagcagcatggccacggcggcgagcacgagcttcaggcccggcagcacgaacacgtagaagccgttgtccagaccgaactgcggatcggtggtgccgaacgactgcgcgttgaacatgagcagaatctcgctccagttcgcgttaaactgggaaccgaagatgacgccgacgatcagcgaaatcaccacggccacgcggcgagcggttttcgagctgacggatttgccgacctcgaccacatcgccgttaatgcgaatggtggaaccgtcggccgaatcagggcgtgctcgaatggccagccaggcggaaacgaagccggtcagggccatgagcagcgcgtaggccacccacagaccgattttcaccccgagctgggtccagaccacggactggaagccgagctggccgtaccacatcagatcggtgatgaatcgggacaggccgaagaacagaccgacgatgatggccaaggccagcaccacgccgatcagaatcttgctgccacggctggctcctgagccaccggacgctggcttacgggtgatacgcggattggccggaccacgtggagggcgggatgacccggaggggccagcgttggtgttgtgggccggaccgtccccatcggcctcgacatcgaggatgatcggatcgtcattgttcgcattgttgcgtcgtgaatcgccgccattgccgaacagtactgagaaaggatcgttaaaagacataactcaagcctatcgaaagggcgggaggtcggttatgccctgagcacagaatgaggcaacatcctgttctacgctctgttctacgcttgccgctatgaacagacaacggccacaacatatgcgtccctcagcacacgccacacgccaacttcggcacaggagcattccaatcgtggcggcaatatgtgctttggcggtggtgttggccggtgtggcagtctacggatggcatgtcggatggttcgccaaatccacatcaaacggcaacaccaccactccccagacctcccagacgagtgcgttaccgcgcaccgacgttccttccccgaagaagaacgacgatccggcggcacaagcccgacgtgcggtatccgccatgacgcttgaggaacgtgtgggacagttagtgatggtgccgttgttcgccggttccgaaccctcctcgttggcttcaacaatcgccgacgaacacattggctcggccattctcattggcaattggaataccggcgtcgatacggtcaagaccgcgaccgcgcaactccaaggatatgcgccggccggcaatcgtctcatcatcgccaccgatcaggagggtggtcaggtacagcatctgactggtaccggtttcgacacaatgcccagtgccgttgagcagggcacaatgtccgctgacgcattgcgtcaatcggcaggcacgtggggttcgcaattagccactgctggcataaatgtcgatttggcaccggtgcttggcacagtggttggcaatcgtgcctcaaatgctccgattggcgcgctggatcgtgatttcggattggatgcggccggcaacgccgaacatggcatcgccgttattgaaggtttgcgagacgctcaagtcggtgcggcggtcaaacattatcctgggttgggcgcggtaagcggcaataccgacttcaccaccgaaggcattctggatacgaccaccacgttggacggggccgaggcaggtgcctttgaccaggcgattaccaaggccgatcctgcaatggtgatgatgtcgttagccacgtatcaatccatcgacccgaataatccggcggtgttttcttctacgattatcgacggtcatattcgcaacgtcctgaagtacacgggcgtggtgatttcggattcgatgtctgccgaagcgttgagcagctacgatgtaagccaattgggagtaaatcttgtcgaggcgggcggcgacatgccctgcatcggtcagacggattatgtaaagccaattgtggacggcctcaacgaacgggcgaagtccgatccggctttcgcttcgaaggtgacggcggcggcgactcgcgtaatgacattgaaaatcaagatgggactgacctgaccgttcatccttgcactggcgaggattgatgcgcgctgattcgcgctaatcctcaccagccctcgtacaaatgcacactagtcctcgtacgaatcgtcagtcctcgtacgaatacagaccatgcttgccgatgtattgcaccacgccgtcgggcaccagataccagaccggctcgtcgtgttcggcgcggcggcgtacatcggtcgaggagatggccaaggccgggatctcaagcgtatcgaccttgccttcgggcaaggtcacgccgtccgggctggagtagccggggcgcgtgacggccacgaagtgagcgaggtcccacatgaggtcggcgtccttccactgcatgatttcggccacggcgtctgcgccggtgatgaagaacagctcggcgtcgggatgttgggcgcggatatcgcgcagagtgtcgatggtgtaggtgacgcccggacggtcgatgtcgacacgcgagacggtgaatttggggttggatgcggtggcgatcacagtcatcagataccgatcctcggcgttggtgacgtgcttgtccagcttgaacacaggtcggccggtgggcacgaaaatcacctcatcgaggtcatacacccaggcgacttcagaggcggcgaccaagtggccgttgtggatcgggtcgaacgtgccgcccatgatgccgacgcgcaggcgtgtatgccagttgccgcgtgcggaaagcctgcctttgccgtggctgctggccccggccggtacggacaggtcggacatgcgccgttcggtttcgccttgggtgacggcaatgatttcggcgggctcggcggattccaccgttttttcggactgaactgacgcagccgttttgtggctgccggtaacaccactcatgcctggccgccctcgccggcggcgtcatcggctgattcggtttcctcttcgatttcgccggcggagggattgtcttccttgggatcgatcttgcccatgtcttcatcccattcatcttggaccacgcgacgaatctcggcgaaggtgggcagcgggaagtccggctggtagaggcggcggacctcggccacgcgctcggtgatgcggatgagcgtgtcggtcatgccgtcgaggtcgccgtcgtgctccatctggctgtatttgccgatgtagccttccatgagttccatgtgttcgcgcacgatcttgagctgggcatcgttgaggtccacgacttcgggtgaatcggtctcgggccagccgatgagcacggcgtccgcgtattcgagcgacgcacgctgggcggcggaggcgatgccgtcctcaatctgcacgaggaacacatagcggacgatgctgagccgttcggccgcgatcttcaggccgagcttgggatcgttgaggtcgatgtcgggccgcagttcacttgccttgtttgccgtgtcagccgtagtgttcatgttgccgtcctcgttcatgcgcgcacctggcctgttccgtaaccgatccacttggtggtggtcatctcccgcaatcccatgggaccgcgtgcgtgcatcttctgcgtagaaatgccaagctcagcaccaaagccaaacacgccgccatcggtgaagcgagtggaggcgttgaccatgaccacggccgagtcgatgcgcttggcgaattcctcgatggccgcataatcctcggcgatgatggattcggtgtggcccgtggaatgcgtgttgatgtggtcgatggccgcgcccagatccggcaccaccttgatgcccatcttgagggccagatattcagtgtcccaatcctcctcggtggcgcggttgaggtcaaggccctcgatcgccgcgccggagatgatgtcatacgacgtggtgtcggcctgcagtacaacgttcgcctcggccagagcggcggcgatctgcggcaggaattcggcggcgacatccttatgaaccaatagcttctcggcggcattgcacacacccacgcgctgggttttggcgttgatgatgatcaggatggccttggcgagatcaccggacttgtcgatgtagatatgcacgttgccggcgccggtttcgatgaccggcactttggagttgcgcacgacggcttggatcagacccgctcctcctcgcggcacgagcacgtcgatatggcctcgcgcctccatcatggcggtggcaccggcgcgtccgtactggtcgacggactgcaccagtgcggattcgaaaccgtgtgcttcaagcaccggggcgatgacgcccagcgtggcagcattggtgcgttcggcggcgtgaccgcctcgcagcaacgcggcattgccagatttaaggcacaggctggccacgtccacagtgacgttcggccgggcctcataaatcatgccgatgacgcccatcggtacgcgcgtctgggtaaggcgcagaccgttgggcagattgtatccgcgcacgatttcgccgaccggatcaggcaaggtggccacatgacgcacgccttgggcggcggcggccacgcgcggcacgtcgaacagcaggcggtcaagcttgcccgcatccatgccgttttccttggattcgagcatgtccagcgcgttggcggcttcgatgtccgcggcgtgctcgtccagcgcgtccgcaatggcgagcagcagttcgtttttggcttcggtatttgcctgtgcaagacgctcctgtgcgcgtgcggcctgatcggcctggcggcacaccgcgtcgaacacctcaggactcaattcatcgctcataacagtcaagcgtaactcacaacgcggctgattgcttactccgacccgcttgttatgggatgtctgacgttttgaatcgcaaacagaaccggctcccctccatctcaggcgggaagccggtgacgtgatgcgctccggtcagcgaatcatcactaaccggtacaccacggtggattagcgaatcagcaaatcagtggatctggtccaggtcggggtagagcgggaagtcttcggcgagcttgtcgacgcgggccttcagcgcggtcacgtcggcggacgggccggcggcgagcgcggtgccgatgatgtcggccacctcctcgtattccttcgggccgaaaccgcgcgtggccagggcggacgtgccgattctcaggcccgaggccaccgaggccgggcgcgggtcgaagggcacggtgttgcggttgatggtgatgccgcaggcggcgagcagatcctcgccctgctggccgtccatctcgctgttgcgcaggtcgaccatcaccaggtgcacgtcagtgccgccggtcagcacgctgatgccgttggccttgacatcgtcggccaggagacgttcagcgagaatcttggcgccgtcgagcgtgcgctgcatacgatctttgaattcgggggtgccggccaccttgaagctcacggccttgcccgcgatcacatgcatgagcggaccgccctgctgaccggggaacacggaggagttgagcttcttggcgtattcctgcttggcgaggatgaagccggagcgcgggccgccgaaggtcttgtgcgcggtggaagagactacgtcggcgtacggcacaggactcgggtgcagacccgcggctacgagtccggcgaagtgggccatgtcgacccagaatttggcgccgacctcgtcggcgatctccttcatggccttgaagtcctcgatgcgcgggtaggcggaccaaccgccgatgatcatggccgggtgggtttcgagcgcacgctggcggatgatttccgggtcgatgcggaaggtctcggggttcacgccataagcctcggcatggtagaagcggccggagaagttgattttcatgccgtgggtcaggtggccgccgtggtcgagggccaggccgagcacggtgtcgccgggcttgacgagcgcctggtagacggcggcgttggcctgggcgccggagtgcggctggacgttggcgtattcggcgccgaacagggccttggcgcgttcgcgggcgatggtttcgacttggtccacgtattcgcagccgccatagtagcggcggccggggtagccttcggcgtatttgttggtcagcacggagccctggcattgcagtaccgctcgcggcacgaagttctcagaggcgatcatctcaaggccattgcgctggcggcccagttcggagtccagcagttcggcgatctcaggatcggtttcgcagatcggcgcgttgaaagcatcggtcgctttctgcgcaaggggtgaagcggtcatgggtgctcctttttggtatgggcgacaattgattcgccgttgccgccttactgtatggccggtttgtagccggcctgtttcatgatatggccggtccccgttcgatggcaatggtgattttcgccggtttgaccggtcggctacgcgagacggacggctcttctgcccacggcccacgctaaactggtgtggattcatcatccctttcaggcagaaggattcatcgtgacaaccaccttccattccacccgtagcaccaccgattcgctgaccgccaagcaggcgattcgtaagggcatcgccgatgacggcggcctgttcgtttcggacgcgttgggcaagaccaaggtggacgtggcctccctgccgggcaagtcgtaccagcagatcgccgccgaggtgctgggcgcgctgctgccggacttcacggccgaggagctgggccagtgcatcgccgacgcctacggcgaacagtggtccgatgagcgcatcaccccactcaagcccctgggtgacgattacgtgctcgaactgttcaacggtccgacttccgcgttcaaggacgtggcgctgcagatcctgccgcgcttcatggcgcacaccacgccggccgatggcgacgcggacgagaagatcatgatcctcaccgccacctccggcgacaccggcaaggccgcgctggccggcttcgcggacgccccgggcaccgcgatcaccgtcttctacccggaaggcaaggtctcccaggtccaggaactgcagatgaccacgcaggccggctccaacgtgcaggtggccgccgtggaaggcaacttcgacgacgcccagtccgcggtcaagcgcatcttcggcgaccgtgccctggccgagcgtctcgccggcaattcgcacgtggtgctttcctccgccaactccatcaacgtgggccgtctggtgccgcaggtcgtctactacttctccgcttacgcccagctgctcgccgaccaggtgatcaatgtcggcgatgaggtcgagtttgtggtcccgaccggcaacttcggcgacatcctcgccggctactatgccaagctgctcggtctgccggtcaagcacctcgtggtggcttccgacaagaacaacgtgctgttcgacttcctgaccaccggtacctacaaccgccagcgcccgttcttccagaccatctccccctcgatggacatcctcatctcctccaacctggagcgcatgctgtactacttgtccgagggcgacacccgtctgatctccatgctgatgaacgacctcaacaagtggggcacgtacgagatcccggaagaactgctggccaagattcgtcagatcttcggcaccggttgggccgatgaggatcaggtacgcgagtccatcaaacactgctgggacgagaaccgctacgtgatcgatccgcacaccgcctgcggctactacctacttgagcagatgccgcgcgacccgctgaccccgcgcgtgctgctctccaccgccagcccctacaagttcccgcgcgtggtgaacgaggcattgggcttcgacgccaccggcaccgacttcgagtgcatggatgtgctggcccacgagaccggcaccaccgccccggccgccctgcgtggtcttgagaccgccgacgtgcggttcaaggacgtcgtggccatcgacggcatggaggactacgtggagaaggccgcccaggcgctgtaaaacataccagcacattggctcccctcagagcggggagccattttttacatcagaattgcgtttacatcagtatcgcggcgactggcagtcctatggcgattgccaacagcacgatagtgccgatgatcacgctggggcgtgcgaggttgacggtccagccgacgccgaaacgtttggggatcatgatggcaggatcgtcacggttgatgtagatgatgccgccaatccagtgcaggtcatcgtcatacggcatggcattatcgtccgaaatgtcaccgccgtcactgtgccgaacaccggcatagacgcgcgccccgttctgcccgtaatacacgccgatcatcagcgcgccgaccagagccgccacggcgatgaacatgccgatgatgccgattagattgatatccagcacgccaatggtgacaagctgaacgcctaggcccaatccaccggctgccagcagtccgatgaccagcacgtagatgctccagacccgcgagaacacaccataggcatacccggtggcggcggggtggtcgggatcaatcgggtgcttggcgtagatgatcgcggcatggctggccaccatcaccgctgccagcaccacctgcgcgagcacggcgtaccaaatcaccatcggactcttctcggcccaaccgttcacattgccggcgatatccgcatgaatcggcacccgctccggcatccggtcatagcccagcaacccgacagcaatggtgacagcgagacaaacgacttgcagcaattcccacttcaagctcatcgggtcgggattgtcccgctcacctatcaatgctgcacggcgggcactggacgcctcccatccctgatcgactttgatggatagtactttgcggcgaaacatctgctgcagcacgaaaccacatatcgcaatcgccaccgctgcgatggacacagtccagaacgccgcgtcgactccgcagagttgccaaacggccagcgagaccagtatggcgcatacgccaagcgccaccgtaattcccgaaaacgcgactttaaatccgcgaatgcgcgtattgacatgggcggcggccggcactgtgacaccgaacacctcatgccggtcggtaacccatggaacccctgccaggccggcggtcactatcaccggcaacagtaaaaacgcacacaacgcgatgttcatcgacacgactgtattattcatcgttatctcccctgatttccttttgttgcaccgtcagtaacgctctgcgaggagcgcacgccgtatgcccgttcgcattgccgtttggtggcatcgaggaatgcggccgaatcaccgccgcgcgccctgtaggccaaggcaaggcgatagagttcctcgcccatccgctcatcctgtgcttcggcagttcggttcggtgcttctcccccgccgtcatgctcggcgacggttgcaccggcaccacgacgcataacgatgtatccctcgtcacgcaacagcgcataggccttgttcaccgtgtgcaggttgatgccaaggtccacggccagcgagcgcacggacggtaacgagtcacctggcgacagctcatcgcccgcgatggctgcgatgagctgcctgtgcagctgctcgtaaatcggcacgtcactgcgctgatcgatttccacaatcacggtcaattccacccctctcaagaactgttctatttgttctacatcaaatataacagttttgccgtatgagtcaagatatgcgaatctcggttgaacatccggcaatgggccaacggcgtgttgcttgaattttctaggaaggcgggaatcgccatgctgccggcgaatgggaaaatccatgtggcttgtcagattctgttcctgcaactgaatagtcccatgagggagtagacagcattgcggcgaagggctcggcccaaaccgcaataaagcgtgccgagcgccaaagccgccaacaccggtatgacgccgctgcaggagaagctcgcgaagctggacgaacttcatgggcggcaccgccgaacagcagtcgaccattctgttcacgctgttcgtggtgttccagccgttcaacgccttcaacagccgcgagctgggcaacgccagcctgttcgccaatctgctacgcaataaggtgatgatcggcgtgttcgcgctgatgttcgcacttcaggtgctggtggtgcagttcggcggagcgatgttccgcaccgtgccgctgccgatcgacatgtggctgaagatcatcgcggtcggacagatgcgcggttagagttctttggctcggtagatgcggatggctataagcatggagccaaaatatgcgagcagacacaacacggcgagaacaagcgccgtatgccaccagatcgtcaggaaatcgg

SEQ ID NO: 504 - DNA, 3398 bp, Unknown
  R48_24m  MAG No. k141_44656
atccaggcctgccgggccgccggcgtgagcatcgaagcacacctgttccccgaaggcagccacggcctgtccctggccaatgcggaaaccgctggcaacggcttctatgcgcacatcgtcgaatgcgtgcagtgttggcctgatttggctgaagcctggttgcgtcgcctgttctaggcaaaacgctattacgctgtgcgccaagtgcgccacgcagttatggaataatagcaatcgtatgcatcggcagcagttgcgccggtgtccataaccgcgcagtcctgtgcgtccagccgggagagaaaacccggcagcggccgcaaggctgactactccgcggcaataccaaggagaacattatggatgatctcaaagatcaatccgcagtgtccgcgaccgcaacgaacgaggtcgtggaatcggaagaagtgcgcgcgcaggaagcgctattgggggaagctgatccaagtctgaccagtgccgacgacgtggccaaagccctgaatgtcgacccatcccagggcctgagcgaggaagaagccaagcgtcgactggccaaattcggcccgaatgagctcgccaccgccccgcccgtaccgaaatggaagaaattcctggcccagttccaggacccgctggtctacctgctgatcgcggccaccatcatctcggtgatcgcatggttcatcgaaaaggccaatgcgcagcccggcgcggaaggcggtgaagtgctgccgttcgacgccatcgtgatcattttgattctgatcgtcaatgccgtgctcggctacatgcaggaggccaaggcggaggccgcggtcgaggcgctcgcccaaatgacggccccgcagacctcggtgctgcgcggcggcaaagtcatgcgcatcaacaccgccgacgtggtccccggcgacatcatcgtccttgcggaaggcgactcagtctccgccgatggccgactggtcaacgcggccagcctgcgcatcgccgaggcttccctgaccggcgaatccgtgccggtcggtaagaagccggacacactcaccgaagccaaggcgctgggcgaccgtgccaacatgatcttcaacggcacttccgtgacgcaaggcaccggccgcgcaatcgtgaccggcaccggtatgaacacgcaggtcggcaagatcgccgacatgctctccgccaccgaagatgagaaaaccccgctgcaaaaggagatggattacgtctccaagatcctcggcattgcggtgtgcgtcatcgctgtcgtggtgctggtggcgctcgccgtgctggaaggcttcgacgacgtccatgacgtgattgattccttgctgttggccgtctcgctggctgtggccgccgtgccggaaggcttggccgccatcctgaccgtggtgctggcgcttggtgtgcagcgtatggccgcgcacaacgccatcgtcaagaaactgcattcggtggagaccttgggctccgcttccgtgatctgctcggataagaccggtacgctgacccgcaacgagatgaccgtggagcgcgtggtcaccccgtccggcgcagtgcagatcaccggcaccggttacgcgccggaaggccgcatggttatgaccggtggcgtcagtcctgaatccgagcaggcccagattgtggccgatgaagtcgtcgccacgcttgtggccggcacgctcgcgaacgacggcgaactacgcgaggagaacggccgctgggagatcgtgggcgaccccaccgaagtctcgcttatcgtggccgcccgcaaagtcaaggccgatcgcaagatcacgcgatacacgcgcgtgggcgagattccgttcacctccgaacgcaagcgcatgtccatcatcgccaaggacagcaccgattcagacaagctcaccgtgttcgccaagggcgcgcccgacgtgctgttgagctactgcacgcgcatccgcgtgggtggtcaggtccgtaagctcaccgaaggcgatcgccagtcgattctcgccaccgtcgaacgtctctcctccgaggcctaccgtacgcttggcgaggcctgccgtccgctggaaaccagttctttggctgatgtgcccggtgtaagcgtcaacgccgcaggccaggtgtccgacatcgccgatcaggccgaagccatcgaaaccgatctcatctggaatggcatggtcggcattatcgatccgccgcgtactgaggtgcgcgactccgtgaccgaggcccatcgtgccggcatccgcacggtgatgatcaccggcgaccacccgctgaccgccgcccgcatcgcctccgaccttggcatcatcgccaaggacggcaaggccctgaccggcgaccagctcgaccagctgcccgatgaggccgcactcgacaaggccacgtccgaagtgtccgtgtacgcgcgcgtggcccccgagcacaagctcaagatcgtcgaatccttgcagcgtcaaggcaacatcgtggccatgaccggcgacggtgtgaacgacgccccggcagtcaagtccgcggacatcggcgtggccatgggcatcaccggcaccgaagtgaccaagcagagcgccaagatgattctggcggacgacaacttctccaccattgtggccgccgtacgcgagggtcgcgtgatcttcgacaacatccgcaagttcctgcgctacctgctgagttccaatgtgggtgaggtgttcaccgtgttcctcggtgtggtgtttgctggcttcctcggcatccgccagccggaaaccgtgggcgtcaccgtgccgctgctcgccacacagttgctgtggatcaacctgctgaccgatgccgcgccggcgttggctatgggcgtggacccgcagaccgacgatgtgatgggtcgtaaaccgcgtaaggtgacggaccgcgtgattgacgcctccatgtggggcgacatcatcttcgtcggcgtcattatggccatcgtcacgttgattggtatggacatgcacctatccggcggcttgttcaccgaccgctcggtggatgccatcggccatgaagcgcagatgaccgaggcccgtacgatgggcttcacgattctggtgtttgcccagctgttcaacgcgctggcctcccgttcgcatctgcagtccgcattcgtgggtctgttctccaacaagtggctatggggtgcgattggtttgtccgtggcgctgcagctcgtggtgatttacgtgccgttccttaacggtccgttcggcaccgtggcattgagcccgatggcttgggtggaatgcatctgcctggccgcaatcgtgctgattgcctccgagctacgcaagattgtgctacgcgcgatagccaagcgttaagccatcgcaatagccctgattgtgggcatatagcagtgggccggggggggg

SEQ ID NO: 505 - DNA, 11016 bp, Unknown
  R48_24m  MAG No. k141_45267
gacaaggctgccgccgaggccgcctacaaggttgccgcccagaagctcgacaaggctgctggcgctggcgtgatccacaagaaccaggccgccaaccgcaagtccggcctcgctgttgcgatcaacgctctgtgagcataagcctcttaaggttttagcaagtcccgcaagtcatctggcttgcgggacttttttatatctccgttcaaagaggtacattggcggtcttgcgaaatgacatctccgttcagaaaggtaccgaatccgagaaagcccaagtataaacgccgtcattgcaacgcttatactcgacgtttcgtgcttcaggcacctctttgaaagcagttgtcattttgcagaaggccaaatgtacctctttgaaggcagttagccctgaggcggtcttgaatcatcctgaggcttgtcttcttcgtccttggtggtatcgccgggatcgacggtatcggcgtgcggatggatgaccgggcgcttgagatatcggctttcgctgggcaggtagacgcgatgacgctcgacggctccgggcaaggtgacgttgaagccgaccgagagcaggcgcagcgccaccacgatgatgacgatcagcacgtcgagcagcatttccgagcacatgtcgaaccaaccgtagtgcacaccacgccatacaagcacggtcagaatgcaaccgatgaacgagggcacggcatagaggtgtttgtctcgaataatcattggcacatcgccgatgaagatgtcacgaatgaggccgccggccagtgctgtgaacatgccaaggaatacggctgtcatgcctgaggaaccgtaggccagagcctttgcggtgccgctgactgcgaatagtccgaggcccagagcatcgatgacagtcatcgtccatttgagtttggtgatctccgggtgggccaccaccacgataatgccggaaaacagcgtggtgagcacatagcctttgtcggtgatgccgaccggcggcagggcaccgagcatcacgtcgcgcacaagaccgccgccgagtgcggtaagccatccgcacagcatgatggtgaagatgtcgtagcccttgcgaatggcggcaagtccgcccgacaatccccaacacaggattgctaaatactcgatgaccacaaaaacgatgttgttctccaacaccacctgcatgagccgctcccctctggtaccgcttcggttcgtctcagtccgtcttcgttctgttcccgttcatccttattcggcgctacagcccgtcgtacccgagcctacaacaggccttgcctgacgcaattggactagagaacaaaccgaataaatgctattgccggttcgactccacactttttttcttacagcgtcgccagcgcgccaaactttgagcagccaccgacgttagtccttctcatttgtcggaggttggccaaagtttggcacggcaccgacgatcacgcgctccagtgtcgttgccgtgccaacttatgtacagctaacgacgctaagcccctttttaccgtcgtttgatcgccagaacctgacccgttaacgacgctaaggtgtctcagcgacgtcagcagtccaaaccttgaaccattactgacattgaacatcccccagcgtcgccagaagctcatgtcttgtctcaccaccgacgcaacgccgtcgctgcctctgccaccggcttcagtttcgagcaatgctcgaagcctgacggcaaacggtaggctgaagcatagtattccgtcatgtcactcatcttgctcataggtttgctcctgttctcatctggatgaaccataaccaaccctcgcaacgtgcagaagacctaaatcatattatttgttgcgaaatgttgctaaatccatctgtacctctctagccaggaacatttccaatacgccaagaccccttggaattgttgacattctaaggggtcttagtcggaaacaaaaggtgctagttcagcacaccttccacatccagttgtgcgggtcctcgacttcgccgagctggatgccgagcagctcgtcgcgcagttcgcaggtgagcttgccggagccgccgtcggcgacggtgacgtcgaacttctcggacttgaagcgaccgatcggggtgatgatggcggcggtaccgcaagcgaacacctcggtgacttcaccggacttgatgtcctcgagcagctggtcgagggcgatcatggtctcgaccacgtcgtggcccttgtcctgcagcagctgaatcagagagcgacgggtcacgcccggcagaatgttgccggtcagggacggggtctccacgtggccatccttgtgcacggccatcatgttcatgccaccgagctcttcaaggtaggtcttggtggcggcgtccacaaagcacacctgctcgcagccattctcaacacccttgtactcgccgagcagggaggcggcgtagttgccgccgcacttggcgaaaccagtgccgccagggccggtgcggaaccacttgtcttcaacccagatgctcaccggcttgacgccgcccgggaagtacgggccggacggagaggcgatcacgcagtagtcgacctcctgcggggcgcgcacgccgaggaacggctcggaagcgaacatgaacggacgcatgtacagcgtgtactcgcggcgggacggcacccagttggcgtcgcgcttgaccagcgcggccacggaaccgaggaagtcgtcaatcggcagctcaggcaggtacagacgcttggcggagttctggaaacgctcggcgttcgcatccgggcggaacagccaggtggagccgtcggcatgacggtaagccttgaggccctcgaagcactcctgtgcgtagtgcagcacggaagcacccgggtccatcttgagcggtgcgtacggttcgacgcggcggtcggaccagccttcgcccttggtccaagtcatgtgggtcatgttgtcggagaacacctggccgaaagccggcttgtcgatgagggactggcgcttctcatcggatgcggggttgtcgttcggcagtacggtgaacggttcggtgagcttgtcgagtgctgccggatcgtggtgcgtgttttcagtcatcactagctacttcttcttgactttggcggcccgaaagccaccatatggggtgtgtgctgtgcgcttgtggcgcgaactctgttgcatacttttgcacacccatgtgttactcgtgtggcagagttcacatggtgaaaaaacgaagaagcccacaccgttctcaacggctgcgggcttccacgtttcagttatgttctgaattgttcgctatcgaagcgaccgactcacttggcgtcggcagccggagcagcggcggcgtcagccggggcggcagcagcttccggagcggtggtggactcggtggcatcctccggcacctcgacggtgacgacggactcttccggatcctcgacgtccagctcgacgccctcaggcaggacgacatccttggcgaacaccttggtgccgtcggtcaggccttcgacgctgaccacgatcttctcgggcaggttggtgacgtcggcgcggaccttgagctcctgaatgtcgacgaacgccacggcagcacccttcggggtgccttccacgaacaccggcacctcgacgtcgatcttctcgccggccttgacctcgaggaagtcgatgtgctcgatgatgcgcttgaccgggttcttctgcacatccttgacgacggccatcttggtgttgccgtcgaaggcgatggtgaacagggcgttggtgtgacgcagggccagggtggtctcgcgcatcggcaaggtcacgaaggcgggctcttcgccgccggcgtagatggtggccggaatcttgttggcaacgcgcagacgacgagcaacgcccttgccgaactcggaacgggcctcgccctcaagcttaatggtggtagccataatggatactccttgtatcttcgtttcgtactgtctcgctcagacgccacgacgcgccgaaagacaccctacaaggagtgaaatacgccgagtcgataacggaatctgtgtcatgtgtcagcatgcacacttccctcgccaaagcaacaattgtcaagtatacgccaaccccggactttgcgtaatgatgcttcgatgacactgcatataggccgtcccagctacgtcaacgtacggtttccgcgaaataatccctaactttgtgaagaacgtacgcttacccgttctcatcatacggttttcacgaaatcgttcgccatttcgtgaaaaccgtacgctcagcgacactcagtgtacggtctttcacgaagttggggatgatttcgataataacgtacgatggtgagtaccgtatcgggaggttgatatgactcgttcggacgacgtcatcaatgaggatgaccatgacgtcatcgccgcacacactcgcgttgtcaggggtatggctgcggcacttgccgcgatagccgccaccggagccggcgtcacagccgcggccgccaacgtcatgttcatgttcgcgctggacaccaaggccaaacgttcgatgttcaacatgccgcacgaggagacgccgaaaggcatcgaattcgacatgtccgagcagcttgaggccggccggtggttcgaggaggccaagcaatcggtcacgctgcgcagccatgatggatggaaactccacggctggctgttggacccggattgttccgacccacagccgcatctatacgcgatctgctgccatggctataccggagagcccgcggaaatggccaaatgggcgcatcgctatgcgcaactcggttttacggtcctgctacccgcgcagcgcgcccatgaattgagcgaagggcgctacgtgggtatgggattgctggaaagcgacgatctgttgggctgggtttcgctgatcaccgcagctgatccggatgcacgcattctgctgcatggcaattcgatgggcgccgccacggtgatgatggcggccggcgatgcgcgactcccccgcaacgtcgtcgccgcgatttccgattgcggatacagttccgtggtctcgcagtttacggataatgccgaggcgatgttccatttgccgcactcgttggccgtgctgctggtcaaagtggccagtcatgtgtctaaacgcaaggctggataccggtttgaggacgcctcctgtgtgaaggcattacggcacgcgactattccgatgatgttcattcacggcggagcggatacttttgtcaatccgaagtatctggacatcaattacaacgcctgcgccagcatcgaccgcgagaagctgctgattcccggcgccgaccacacgatgagcgccagcaccgatccggaccactattggcgtcgcgttaacggctttgttaagcgggtgtttgggctgtagtagatatagaagcttggctcccctctgtgaggggagccaagaatggttacgcgagcagttccttgacggcggcgatgacggactgcagactcttcttcgcgtcaccgaacagcatctgggtgttgtcctcgaagtagagttcgttctggatgccggcgtagcccatgccgcggccacgcttcatgaccacgacgttctgggacttgtcgacgtcgagaatcggcataccggaaaccggggtgccaggacggcgagcagccgggttggtcacatcgttggcgccgacgaccagagccacgttggcctgcgggaactgcgggttgatctcatcgagatccacgagctcctcgtagggcacgttggcctcggccagcagcacgttcatgtgaccaggcatacggcctgcgaccgggtgaatggcgtaggagacttccacgccatggcccttgagcagttcgccaaggtcagcgagctcgcgctgggcctgagcctgagccagaccgaagccgggcacgaagatgaccttctgcgcgtagacgagctgaacggccagatcgtccggcgtggtctccttcatggtgccttccggaccgtcgccagcagcggcggcgtcagcaccaccgccgaagccaccggccaagacggagagcagcggacggttcatggcctgagccatgaggatggacagggtcacacctgcggaaccgacgagtgcgccggccacgatcagggcaacgttgtcaatcgccagaccggacatagccacagccgtaccggtgcaggcgttgagcacagagatgacgacgggcatatcggcgccgccgattggaatcacgaagaccaagccgtagcacagggcgaacacggtggtcagaatcgaccacagcagacgctgttcgggctggacgcacagcatgaccagcgaggcgacggacagcacggcgaacagaatgttccatacgcccttgcccggcaggttcagcttcttgacccacttgatgccctgcagcttgccggcggcgatgagcgagccggtgaaggtcacagaaccaatgagaataccgagaccagcggtgatgagcaccacgatgtccggggtgccttccttggtcaggatgtcgttcagggccacgagtgcggcagcgccaccacccacggtgttgaacacggaaaccagctgcggcatgtcggtcatcttcaccttcttggcggagacgacaccggccacggcaccgatcaggatgccgacgaccagcaccaccacggcgacaatgttcacgaagcccttggcgaaaagcacgatgaacgccatgagcacggccacgaccatgccgaacgcggagatctggttacccttgcgggcggtcttcggagagttcatgaagtgcaggccgaccacgaacaggacggcggagaacaggtagacgaaccatgcgacgatgtcgatggcgccaacggttgcggaggtcattacttcgactcccccttcttctcgttcttgctggacttgaacatctcgagcatgcggtcggtgaccacgtagccaccaacgacgttcatggtgcccagcacggcggccaggaagatgaacacgtaggccagtgggctattggcttcggctgccacgatcacaacgccgacgatgacgatgccgtggatggagttcgcgccggacataagcggcgtgtgcagggtggcgggcaccttgccgatgacctcgataccgatgagcagcgcgaggacgaacagggtaatggaaacgacgagagtaggcatggtattccttcttccttacttctcggacttctcggcatcggcagcagctgccggggcggcggcacgaccggcaaccaccagcgcgtcgtcgagttcttcggtgagatcctggccgagcttgccgtcacgcacgaagtgcacgaggatgtcggccacgttgcgcgaaagcaagttggatgcggtggtggcgacgccggaggccaggtagggagcgccgatcagcttgacgccgccctcggtgatctgctcgccgacggcggagccctcgacgttgccgccgaggtcggatgctgcgcagtccacgatcacggcaccacgcttgagacccttgacgccggctgcggtgagcagcaccgggggcttacggcccgggaccttggcggtggtgatgatgatgtcaaagccggcggccttctcatcaacggcagcctgctgctgagcctgttcttcggcgctcagcgcgcgggcataaccgccctcgccctggcccttggagaagtcaagtcccagatcaaggaacttcgcgccgagggactcgacctcgccctgggaggcgggacgcacgtcgtacgcggtgacgaccgcgcctagacgcttcagcgtaccaatggcctgcaggccggcgatgccggcaccgagcaccagcgccttggccgggcgaatcgtgccggcggcggtggtcatcatcggcaggaaggaaccgtaagcatcggcggcggtgatggctgccttgtagcccatcacggagttctgagaggtcatctcatccatggactgggcgctggaaagcttacggggtagcttttcgatggcgatgcccaccagaccggccttctcgagcgcggccacgtaatcggcatcggtgaaggaaccgagcatgccaatgacccactggccggccctgagcttggccacggtctcggcggacggacggtccacaaaaccgagcgcgtcggcttcggcgagcacctcgtcacggctggtcaccttcgcaccggccttttcgtaatcctcatcggtgtattcggcggcaatgccggcaccggcctcaataatcgaggagactccgctcctcttcagccgggtgacgatatccggcgtcagcgcgacgcgggattccgtttcggacgtttcgttcaaaacgccgaacaccacggtggcttctgggttttgcgccatgagagccctttcttgttctacttcaaaatggacatggttatccgcatagaaagtgtagtcggaaggtaaagaccatgacttgagattccgccaatcgaaacagaaacgaacccgaaattagtgagaaatacgaatgtatccatgtgcattgcggatgaattgctcggaagtcgtccaacaatcacccggcatcgatcagcaaccaaccgctcagtaattatcgacaatcaccgtttcgtagctcacggttactcaacaatatcgggacctgtgcaatattttgccacgcactcccctaacccgccagaatcctacggttgcgtaaggtgacgagttcggtttgggcgattacaatttgaactttgagaagcgttcgcctcatggctggacgacactgaaaggtttacaggagcaagacttgtcggttatcaattccttcacgcagcacactatcaatctcacccgtaaggcgctcaggttgggatccgacttcgtccacccggtccacgacgacaccccggacgagcccgattacctgtccaatgccgacgtgccggtcgagaccaatatcgctttgcctcacagcgacgattgggacgacggccacctgaccgtcaccgacatcgaccccatcaccggcctgctcaccacctccaccgaaggcaatccgccgctggacgaaggtacgtccatctacgacctgtatgcggaccgcgccgaacgtatgggcgatgagccgctgtacacctacaagtccggcaacgattgggtgaccgtcaccgccaacgagttcttggctgatgtgcgtgccgtggccaagggcctgattcattacggcctgaagaagggcgatgccgtggcattcatgtgccgaacttcctacgactgggacctgaccgacgcggcgatcatggcgtgcggcggcgtgctcgccaccatctacgacaccgattccgccgagcagattcgcaatatcgtcaacaactccgatgcccgactgctgatcgtgcaggacacggacatgcgtaagaaggcggatgggtccgtcgaagagtgcccgtccctggagcacatcatcaccatcgagaccggtggcttggacgaaatcaaggcctacggcaccacggtctcggacgaggagctggacgagcgcatcgattcggtcaagaagaccgacctgtgctccatcgtgtacacctccggttccacggccgcgccgaaaggcgtggaaatgacccatgagcactactgccagaccgcgctgaatctgccggcctacatgcccgatctgctgcacgacaagaaaaacaccatcctgctgttcctgccgcaggcccattccttcgcccgcgccatcaactacatcgtcgtctcctcgaacgtccgcatctacatcgccaccggcatcaagacgctgatcagcgatctgcaggtggccaagcccactctcatgatcgtggtgccgcgcgtgctggagaaggtgtacaacgccgcgtcccagaaggccggccacggccccaagggcgtggtgttcgcctccgccgtggtggctgcgcagaactatatgaaggaagtctccgccaacggcaaggcaggtgcactgacccgcactcgccgcgctgccttcgatccgattgtctactcttcgctgcgcgaagtgctcggcggtcgcgccaagtggattgtggccggcggtgccccgcttgacccggaactgctggctttcttccgtggcgcgggtgtgcctgtatacgagggctatggtctaaccgagaccaccgcaccgtgcgcgttcaacccgctgggtacgccgttccacgctggttccgtgggcatcgcattccccggattctccctgcgcatcgccgaggacggcgaaattcaggtcaagggtcgtgctgtgttcccgcgctatcacaagaacgacgaggccactgagctgtcgttcaccgaagatggctggtatgccaccggcgatctgggccgcatcgacaacgacgggttcctgtacatcaccgggcgcaagaaggacctgatcatcaccgccggcggcaagaacgtctcccccggcccgatcgaggaggtcatccagcgttgcgagatcgtctcccaggcgttggtgctgggcgacaaacgcccgtttatctccgccctggtgacgttggacgagaagtcgttgcgcccgtggctcgccgccaaggggcttgacgagaacatgtccctcgaggacgcggcaaggaacgccgccgtgcgcgccgaagtgcagcagtgggtcgatcgggccaacgagggagtctcccgcgccgaatccgtacgcaagttcatcatcctgcccgaggagttcactcaggagaacggcctcatgaccgcttccatgaaggtgattcgccccaaggtcatcaagcgctactccaccctcctcaacacccagatgtacaccaagcggaagtaaaccgtatagcaaaagctccctctgacgagggagcttttttcgtctatacgccctagaagccgaggcgttctagttgcttggggtcggactgccagcctttggctaccttgacgtggaggtcgagcttggctttttggccgacgatgcggttgaccggggtgcgtagcttcttcttgacgtaggtgaggttcgaggcgc

SEQ ID NO: 506 - DNA, 3295 bp, Unknown
  R48_24m  MAG No. k141_46016
gagctacgacgagttcgatctgctcgccttcaaccgctccgagtacatggacgccgtggccccgcaggtcaaggccgagaacatctccaagattctctacccggaagactccaccaaggtcggtaaggaactgcgcctcgaacagcagtacttcttcgtctccgcatccctgcacgacgccatccgcgtcttctacccgggccaggacaaaccggacctgacgaccttcccggacaagatcgtcttccagctcaacgacacccatccggtgatcggcatccccgagctcatgcgcatcctcattgatgagtacggctacgattgggataccgcctggaccgtcaccaccaagaccttcaactacacctgccacaccctgctgccggaggcccttgaggtctggccggccagcctgatcggcgagctgctgccccgtcacctcgagattatcgagaagatcaacgcgcagttcgaggccgagcttgcggccaagggcgtcgacaaggacaccatcaaggacatggccatctacactggcgacgccgtgcgcatggcctacctggccacctacggcggctcccacgtcaacggcgtggccgagctgcactcccagctgctgaaggacgtcaccctcaagaacttctccgacgtctacccggacaagttcaccaacgtgaccaacggcgtgactccgcgtcgcttcgtcaagctcgccaacccgcgcctgtccgacctcatcaccgagggcctcggcaccgacaagtggctctccgacctggagatgctcaagggcctcgagccgctggccaaggacgatgagttcgtcaagaagttcgccgccgtcaagaaggccaacaagcacgcattcgtgggcttcgccaaggaccactacggcatcgatatcgacgagaacaccctgttcaacaccatggtcaagcgtctgcacgagtacaagcgccagtctctgaagattctcgccgtgatctccaactacgccgacatcaagtccggcaaggtcaaggccgaggacatcactccgcgcaccgtgttcttcggtgccaaggccgctccgggctactacctggccaagatgaccatcgagctgatcaacaacgtttcccgcgtgatcagcagcgatccggccgtcaagggcaagctcgccgtccacatgctgccgaactacaacgtcgagatggcccagaacctcatcccggccaccgagcttgacgagcagatctcccaggccggcaaggaagcttccggtaccggcaacatgaagttcgctctgaacggcgccctgaccgtgggtacgctggacggcgcgaacgtcgagatccgtgagcgcgtcggcgccgagaacttcttcctgttcggcatgaccgtcgacgaggtcgagaagaagtacgccgagggctacaatcccgcctcctactacgaggccgatccgcgcctgaagcaggccatcgatatggtggccgacggcaccttctccaacggcgaccgcaacgcctactccccgctcgtggccgactggctgaccaaggactggttcatgaccctggccgacttctccgcctacatgggcatccagtccgagatcgaggccctctacgccgatgagctcgaatggaaccgcaaggccgtgctcaacgtggccaactctggctacttcagctccgaccgctccatggaagactatttggaacgtatctggcacactgctcctctggcctgacggccgccggagcataagaagccccgcaaccgacatccatcggttgcggggcttcttgcgttgaaagaccgccctatcaggcttcggccggggcggctttcgcctcgtcatcggcctcatcctcggccttattcagacctaggtcgaccggcgaggagctgttctcccacggctcctcccacggatcgtaatccgggttctgctgcttgtagatgtacaggccgacaagcgcggcgagcaatccgccgaacagcagcgcgaagaacttccaaccgttagaagacttgttctccatgacggctcctttccctagggatcgtctggtcggtatgcccattcagaccgactctgctccctattctaggccgctgtttgtgacgattgggtggaatgacattcgtgggcgattcatccacgcccgcatgccctcggtcggctcagcatcttcgcggcgcgtggaacgcatccgagaccttcgatacagtggactgcatgcatattcctacacaacgggagattcgataccagtgggagcgcggtggtccggtgatgacctgggcgctgattggtgcgtgcgtggcagtgtggctactggaggtattgctgggatttattgccccgggcctgagggcttggttgatgtacctcggcatggcggctccggtcagactggtggctgagccgtggacgctcatcacctcgatgttcctgcatgcgccgaactcgctattgcatatcctgttcaacatgatcgccctgtattccgtgggcccagtgctggaacgaatgatcggccactggcggttcttgggactgtatgtgatttccggccttggcggctctctgggacttatggtgtgggctgcggtggctccgggaggcatcggctggcagatggcagcctatggggcttctggagccttatttggcctgtttgcatcattgctggtggtatatcgccgtatcggcgccgatatccgctccatgttgatttggatggcggtgaacttcgccttgccgtttgtggtcggtggcgtggcgtggcaggcgcatgtcggcggctttgtagtgggtgggatactcacatggctgctggtgggtggtgtgccggcgtggcgcggtaaaagcctgaaatggcgcatgcaagtgtacggctgggtcatggtggtgctggtcattgcgttgattctgttgtgcaatatggccaatccttacgggtggatgagtttcggctccctgcactgatatggcttgatatggctgtaaaaaacgattgatgccgggtattgcggaacatgcagtgcccggcatcagtgtatgtgcggaaagcggcgatgtggatattagcgatgtggatatcgtcgttcggtgagtgggtgtgtgccgtatgaagatatccacagtaatgagatgcgcgcaatgacgagttatccacgataacgagttatccacaatggtgacttgtgcacaagtgtgtagaaaagtgcatatgactgtggataacttattgggagaagttaggaataccgcggtattactgggtttgttgcagtggataac

SEQ ID NO: 507 - DNA, 16645 bp, Unknown
  R48_24m  MAG No. k141_46186
ctcgtccccaccgccgccgaagcccaagccgccgcggccctgaccccggaccagcagatcgccaaattgcccgaagccgaccaggccacggtcaaccagatggccggccagatcgacttcactcgcgacggcatcgaatccagctacggcaaggacgcccagcgcgccacctccaccttcgccgacgaaatcctctccgacacccgctccaaagacaccggcgaggcgggcgaactactgaacaccatgctggtcaccattgacgaggctgacctcggcggcttccgcaccattccgatcatcggccaggtggccgtcagcgtggataagctgcgccgccgctatcagaaagtcgacgcgcaaatcgacgaaatcatcgtgcgtctcgaatccgcgcaagccaaactcgtggccgacatctccatgtacgacacgatgtacacgcagaacgcccagcaataccgtgagctgaaaatgaccgtactggccggcaagaaggcgctcgccgacttcaacgccaaccagctgccagcgctggaggccgaggccgccgccagtggcgacgccatgcaggcgcaagtgctgaaggacttcaagtccaagctcgaccgttttgccaagcgactcgacgacctcgaccgcatcagcgtggtcaccttgcagaccgcgccgcagatcaaaatcatccagaacgcggaccagaccatcgtggacaagatcgacaccaccatctccaccacgattccggtgtggaagagccagatggtgatcgcgctgggcctgtccaaccagcgcaaggccctcgacctgcagaacaaggccgacgatgtgaccaacaagctgctggcgcgtaacgcggccgccctgcacaagggtgcggtggacgcggaaaaggccaaccagcgttccgtggtggaaatcgacacgctggagaagatcaacgccgaactcatcgccaccctgaaggagaccgtgcagatccagaaggaaggcaaggccaaccgcgaggccgcccaggtcaagatgcgccaaatcgagtccgacctcaaaaacgccttgctcgaaaacgcccggcagatgtgagccgttcgcgcgccagcatgctcccgttggcagaggtatatgagtacgcctactggtgtgcgtatatatgctcccgctggcgggagctggcagccgtaagactggctgagggtggtcacggcgctcggctcggccggctttaccggcaaccattccccgccgcaatttctctgtgggcataatcccggaatgattgccgcgctcgggaattgggtgaagtgaaggttaaaggttgagagcccgggagggttccggaaccggccacgataaccgctgctagccccgcgatacgggttggcggccggcatccaagccgattctctcctaatcaaggagtaccgattatggcaatgtttccggctttgatgaatgacacgatgttctcggatctgttcgatgatccgttctttgagggttggcgcaacacggacaacacgatgagtgccgcaatgcctgccaacatgatgaccaccgatgtgcgcgagaccgacaagggttacgacgtcgacatcgatatgcctggctttaagaaggaagatatcaaccttgagctcaacaacggctatctgaccgtgtccgcctcgcgttgcagcgagcatgaggacaaggctccggccgctgagggcgaggcttccgacagcaagtgcgcttgcgcgtccgattcgggcaagtggctacgtcgcgaacgctacatgggctcctgctcgcgtagtttctacgttggcgaggacgtgaaggagtccgacatccacgccagctaccggaacggcacgctgtgcatccaggttccgaagatgcaggcccagccgcaagtcgagtccaagcaccaaatcgcgattgagggctgacgatacttgattcgtcccgaagtcccgcttcgagtagctttgccccctctgacgagggagctcccgcgaagcgggtgggggagagataaatcgtaaccaaaccatgcttcccacgccgcctgccctacgctttcaacgccgactaacctgacagacggcgggaaacatagccaatgcaaatgccgagtagggatttaccctacccggcattttgctgtttcaatcaccgaaccccaccctgttcgcgcgccggtcgtgtgccgttctgcagctgtacacatccgatgagtagaatgccttcgaaacgaggcaagagaggcggacatatggcgaacggcgcacagaacgcaagcggcacgccggccccggcggcgagccgttccggcggccacgtcgtatccgcgcgcgccacgaccatcggcctgatggcgatcctgctgtggagcttcatggccggcaccgtgcgcatcgtctccgaaaacttcggtgccacgcttggttcggccctgatctacacggtcggcggcatcctgctgctgatgttccggcgtccggccccgattcgcgagttccccaagaaatacttgattatcggcggcctgttgttcgtattttacgaatcgtcgatatccctctcgctgggtctggcctctaccgacgcatcctcggtggaagtgagcctggtcaactatctgtggcccacgatgatggtgctgctgtcggcgggcgtatcccatcgcaagcacgcggtcgtcaaggtgctgccgggcgcgattgtggccactgccggcgtggtgctggcggtcggcggtaattccgggctcgactggcatgcggccgtgcagcatatcgccgccaaccctttgccctatgcgctggcgttcgcgggcgcgctcgcttggtcggtgtacgcggtgttcacgccagccatgagtcatggggtggacggcacttcattgttcttcccctgcgtggccgtggcgttgtggattatccacttcgcgtccgggcaggggtggccggccgagccgccgagtctggtcgcatggctgtttgtgttgattgccgcggcggcgattggcggcggttatgcctgctggggctatggcattctgcatgggtctatggagcggctggctattgcgtcctatgccacgccggtgctgtccaccggggccggtgcggtgctgctgggtttggcgctgtcgctgccgttttggtgtggcgcgctgctggtggccgccggatcggtgctcaattacttggtcagtgcgcgcaaatagcggggtggctttgctcatggggcggtaataatcccatggggcggtaaaaccctcatggggcggtatcccaaaatggctttattctgccgtttcacaatttcttcaaaccgccccatgggccttttaccgccccatgggtaaattaccgcccgatgggcagcagcaacttactcgccgcggcgctcggacgggcggcgaatcgggtcaagcagcgtattcggatcggagatgccgaacatgctgcgcccgccggtggattcagggtgcttggcgagaacggccagcgaaatcgcccccggaatcataatgatcaccgaaagggccgccaatccccagttcacgaagaatccgagccccagtacgatggccaccacaaccaccaccgtgacgataatcgtcaacagtgctcgacgtgggttggtttccctggtccaagaggtgctggctgcgggttttgctgttgaactggccgcggcgtttgtggctgttgtgccatcagccgtgccggtcgtgggccttgccgccgcgctcgtcgcggggtcagtaggggcgtcagacacgttatcggcgacattgccggtcgctgctggacgttgttcgtttgcgtgagtcatatccaccaacatattccctgcttccggctaaagctgggacaagcctgcgcaccgctaatccagcgccgacactggccttgagctgcggacgtccaggccggatgtgaacaggagctgaacggagtctggggaaaccatgagaactcgcgacaatttttgtgaaattgggtgacgctctatgaatcgcgcgctagtattgcgtgagcttacaagacgaggagcctggagcgcggggacgaaggatgaagaactccgtttggaagacgttcatggaattgtcgctggtccgcggaatcgtgccgtggaccgtgttcggactgaccgcgatcgcggcaatcatactgattgttgggctggcattgagcaagaagcgcggcccggcagcagacggcctggcgccggacggcgaatcgtcggcccaatcgcccgtcgacccagataaccagccggccaaccagcctacgaacgcggctgctacggcgtcatccgcagcttcgacggaagagacgtttatttcccatggcctgcgtacgccgcaacgtcgtcacttgcatccgctggccgccgcgctggccgccgccgtgctcgccggcgcgggcggactactggccacatggctgatgtccgacgtgttcatggtgttcggcgtatcgttgggttggccggtgatcctcaccgtcgcgggaggcttcgcgggcctcggcttcgtgctggccgccgccgtgacgttacggggggcccgtcgcgcgctggccgtcgtgctggtgccgctggtgctggcgtccaccgcgctcggcgtggactcgatctacggcgaataccagaccatcggcagtctcgtcggctatacgccataccccccgctcggttcggtcaccgtgcgcaaggcctcgatgagcgtcggcgagtggcgcgacaaggcgcgcaaggacgctctgccatccatgcccgactcgggcagggtgttcgtcgtcagcatcccgaacaccgaatccaagttcaaggcgcgcaaggcgatggtctacctgccgcccgccgcgctgtccgcccgcccgccggccctgccggtgatggagctgctcgccggtcagccgggcagtcccggtcgcctcatcgacgccggcaacatcgccgccacgatgaacgcttacgccgccgaacatgacgggctggcgccgatcgtgctcgcacccgaccaaaacggttcggccatgcacaacagcctgtgcgccgacaccacccgaggcaacgccgaaacctacctcaccaaggacgtggtgaactgggccagggcgacgctgccggtagccaagtcggcccgtatgtgggcgatgggcggattctcgcaaggcggcacctgcaccacgcagctggtgccgcgtcaccccgacatctacggtgcgatgctgccggtggatggtgagctcgagccgaccgacggcagcgtcgagacgatggttcggcgatatttcgccggcgaccgcaaggcctacgacgggcaggtgccggtcaacgccatcgccgccaccggcacggccggccaggcgctgttcgccggcgccggcaaaggggatcggaagtcggtcgccaacatgcgcaccatcgccgcggccgcgcgcgcggccggcatgcagaccaccgaactggtcgtgcccggcgccgaccatgactggcatgcggtgcaggcggtctggaaccccggtctcgactggttcggcgcgcgaaccgggctgggcgaaatgacgaaatcgttggaggaatacccacaagtggaggtgttgcaatgagcgaagaacaacagcatgggaacgcgcggccggcggccatgccgcagacgcggcggcccttgcgggacgcggaaccctcgcggacgaagcccgccacgacctcccgcgccaccaaaccgcatacggcaaggtccagccatgcggcggaaagctggcgtgaactggccggtgacgtgcggcagtgggcggacgaccaccggctggccgtcaccgccacggcggcgctggtggcgctgaatctggtggcgtggctggtggccgcgatggccggattcgcgtttccgctgcggctcagcaccagcatggccgcattcaacgccggcaaactcatctgctcgctgttcctggcgcgcggcgtcatccaactcatggtcgacgccgtcctgtggctcgtcatgctgtcgatagccgaaccatggctcggccgtgtgcgcaccgtcgtcaccgcgctcgcctgcgcggccggcggcgtgctggcgggcctgaccctgtgcgcggcggccggatggatgttccaggactccctgttcgtctcccgcatgcggttcgcattgagcccgctggtgttgccggtcggcgcgctcatggcggccagcgcgttctgcagccacctatggcgcaggcgcatccgactcgtcggctatgtggcgatcctggtcacgttgctctacagcggcaaccccagcggctactgcatactcgccgccgcgctgatcggccatgccgccggccgtgtgatggccggtccgcccgcgcacgtcgaagccgaatggcactggctgcgcagcacctccttcgaggcgcggcgcatattcgcggccatcgccgtggtactggccctggggccggtcatcgccatcacctcccataaccatgcgggcccgctcagcacgatcggcctgctcatgagcccggtttccgtcgacgatggcatgctggccaaatgcctggccggtgacacgcacggcggatgcttcctgcagttcgatctgttgcgggcctcgatgcccggcgcggtgctgcgctcgttgctgcccaccgccgtgaccctggtgctggcgtggggcctgtatcgcggacgtcggttcgcggccatctgcaccgtggccatcaacctgttcacggtggccatcgccgtcgcctactatctggtcgtgccgctgagcttcgcgccggacggcatggcctccctgctgcagcacggcgcgatcgtggcctgcgtggcgaacgtcctgcccccgctgctgttcgccatcgccctgctggcggcgatgaaacacttcccgatccgcatcggctggtgcaggctggtcggcggcatcggcgccatcgtgctggcctggctggcgtgcgccgccatatacctgatatacggcatcgcccaacccgccaccttctcgccacgcgctacggcctcgtcgctgctggccgagctgccgggacgcttcctgcccatcggcttcctgagccatatgaagctgtcgttcgtgccgcgcactccgatggcctcgatcatgtaccaaggcgtcggcctggtgttctggatcgtggtgctggccgtggtgatccactggatgggcgacgtgagcgaatcgaacgagcgagcccgggcgcgcgccgaacgtctggtcgaaaccggcggcgaatcgatgagcttcatgaccacgtgggaaggcaacagctactggctgtcccccacgggcagatcggccgtggcgtatcgcgtgctcaacggcatcgccctgacctgcaccggaccgttcggcgatccggcggaatggatggacgatctgaacggtttctcccagcactgtgcggaacgttcgctgtcgccggtgttctacggcgtgcatcgggaacagcgcgacgcgttgctggaagccggctggaactccatcgaggtcggcagcgaaatggtggtcgacccgcgcggctggaagacgaccggcaagaaatggcaggacgtgcgcaccgccatcaacaaggccaagcgcgacggcgtgaccgacgtgcagtccaccttcctggaagcgtcgcttgatgtgcgcgaacagatcgaggacatctccgaggagtgggcgcagctcaaggcgctgccggaaatgaagttcacgctcggcggcgtcgaggaactgcgcgacccgcgcgtgcggctgctttacgccatcgacgcggacgggcgcgtgctgggcgtcaccagctggttgcccacctggcgcgacgggcgcatcgtcggctggacgttggatttcatgcgccatcgcaccgacagccccaacggcatcatggagttcctgatcgcgcgcatggccgagcggctgcgtgacgagggcgaagccgatcccacgcacgccgtggagttcatgagcctgtccgcggcgcccctggccggcatgaatcccgatcgggacaacgccggggaggacggggcaccggccagcgaaggcacgcaggtgctccaacacgcgctgcagatcgtggccgactggatggaacccgcctacggcttccactcgctgttcaacttcaagcgcaagttccagcccaccgaagcgccggtctacgtgtgctacccggacccggcggcgttgccgcagatcggactcgccgtggtgcgcgcctatgtgcccagcgtgacggccgctgaagtggccggcatgctcagcacgctgcggtcgtgaaggtgtgcacacgggtacgcaggttagccgattcgagcctgagacggggtatctgctttcagagaggtacatttggccccttgcggacaactaactgccttcaaagaggtgcctgaactctgaaatctcgagtatgagcgttgcaatgacaacgtttgtactcggggtttcccgtattcggtgcctctttgaacgaagatagcattctgcagaagcccgaatgtacctctttgaacggagaaagcctgacaaggagggcgcggcaagcgctatctccgtttcgaggggctgatttggtctctcccggaggtctactcccgtttcgaggggctgatgccgaagtattcacgctccaaaatcggcggaatggcgttggcgcggatgggtttttacatgcggtctagcggccgaccagccccttgaaacgggagtagacctccggcgggggtcaaatcagcccctcgaaagcggttttgccggtgcagaggtgtcgttgactgcatcgcgagccgcctcgacgtagtaacgtggggcgtatgagcgaacgtaacgaacacaatgacggaaatacgcaaaccgcatacttcgccggcggctgcttctgggggctggagcgctacttccagaacgtcgacggcgtcacggacaccacggtcggctacgcgcaatccaccgtcgaatcgccgacctacgagcaggtatgcgcgggcggcaccgatgcggccgagaccgtgaaagtcgagtttgacccggcacaggtcagcctgcggacgctgacattgctgttcctggaggtcatcgacccgttctccgtggaccagcagggcgaggaccgcggccggcagtaccgcaccggcatgttctacacggacgagacgcagcgcgccgtgtatgtggcggctctggagcagctggtcgaccgccagccgcagcgcccggccgtactggtcgaaccgctgcgcaacttctacccggccgaggcacaccatcaggactatctggtgaacaaccccggcggctactgccatgtaccgatcgccgcaatcgcgaacgtaaaacgccgtcaaaagtacgtggaacgcatctgggatctgacgcttgagcagttcgcggtcacgcagaacgccgctaccgagcgcccgttcgtcaacgagtatgacgaggagtttgagcccggcatctacgtggacatcgtcagtggcgaaccgctgttctcgtcgcaagacaagttcgattccggctgcggctggcccgcgttctcccgcccgattgccggtgacttgctgaccgagcatgaggaccaccgcattccgggccgcgaccgcatcgaagtgcgcacgtcggacacacagattcacttgggccacgtgttcaccgacggcccggccgaccgcggcggcctgcgctactgcatgaattccgccgccctgcgcttcgtgccgcgctcgcgcatggccgaggaaggctacggcgactggattgcggttgtggatggggatgatcaggcatgagcatggagaatatcgcgggcgctcgcaaacctgccaagcgtgaggatgagcacacggttgccggcgagcatcgcatgatgcgccgtgcggaccgcgaggtgaccgatcccgagcggatcgccgcgatcatcgccgcctgcgacatcgttgaagtggcctatgcggatgccgagggcctgactatcgtgccgctgaatttcggctttgattacgacgaggcgactggcaagctgacgctctggttccactccgcgccgcgcggccgcaagctcgacgcgattcgcgccgccgccggtggccgactgcccgtggctttcaccatgcagaccgactgcgaggtggtggcgggccgcaccacgtgcaattggggtgaggcgttcaagtcgatcgtcggcaatggcacggcgtcactggtcgaggatctggatgaatgccgccacggcttgcagacgctgatggcgcagcaggcgcatatgccgaatgtggaattcactgatgcgcaggtccgcagcgtcacggtgtggaagattgagtccgactacttcaccaccaaagtccgcaccaaacccgtgcccgcacacatgcatcagcgttagccggggatagcgcgccacctccccactggcgggaggcagcgcgcagcgccggtggatggcccacgtccggacccgatagacttgccgccatggcagcagtgacagtggtaattaccagctacaatcagggcccgttgattcacgaggcagtcgagtcgtcattggccccagacggttcgtccggaacggatcatcatcgtgaacgatgggtccgatgaccacgcatccgtcgagatgctgaacgccactctcgacgattgccggcacggggcgatggatgcgaatggtgtggccatcgacctcatcggccaggcaaacgccggtccttccgccgcgcgcaaccgtggcatcgccgccgccgaaacgccgttcgtagtggtgttggatggcgatgaccgtttgcggccggccttcattgagcgcacgttgtcgatgttgtccgccgacaaaacgatggtcgccgcattcggctggctgcagactttcggtgtcctggaatcagtggtccagccgactggtggcaatgccgccgcgttcgtgtcgcataattgctgcccggccacgtgcatgattcgccgtgtcgcgtgggagtgctgcggcggctacgacgagtcgatgcgcggcggcttcgaggactgggacttcttcctgtcgttgttggagtgcggattgacggtggaaaacgatatctgcggtgctggggttactggcggtactgagcatgtcggaggttttgggagtgcctgggatacagagaatcccgcaaaagacgcggcccatatcggcatcgcccccgagccgctgatcgagtaccgcacggccccggcctcctcaaacgtgaccagcatgaccaagcgcctcgatctcatgcgcttcctgatcgccaagcaccgcgatctctacgccgcgcacatcgccgacgccatcctcggcgttgaagccatctccatgagccgcttaaccatgtgggaatcgttgatgtgcggtgacacctccgccagccaagccttcatgacccaccccacctatggcgacggcgtaatggccgccgccgtacgcttgcggagttgagaggcatcagctgaccaaatgccgatagagctccggatcgattggccgggccaaccgcaggatcgacagcgtgaccttcacgctgccttgtccgcttgcgtcaggtttggtggtgagctgagggttgtcaaacgcggcaacgtggccaacgtagtagtacttaccctcggcctcttccgccttgcgcataacgaataacgggacgaaatgcgtctggccccaattcgggccaatgccgttaagcgcccatcggaattcgggagactgcggagttcgtccattcttgctgaagtatttcatttcctgtgtgctcaggaattcatcttcgtattgacttgccgcgtatttcacgaagatgggcatggtattggtttccttgtcgaggaggtaaccacccacgttttgcggagtattctccttcttccatccgcacagtcgcatgacgtctgccatggaatatttgcgttcgtacaagaacatgtgatcaaagacctgttgcctggcggcggcctcacggaatatatctcggcaattggccataccggtgcgcagagtgtccgcaaagaagatacggaacgttctgttcgtggcaagcatatcggcgaatctgctgttcaaccgatatgcggtaccgttttctgtgccggtgctgttcacggcttcgactaatggctgattgccgaaacgattgcagtttgggccggtgaaatatgagtaatcgagcacgctgatcgcagagtcgaattgcgtgtctgaactatcggactgcgggaattcagtacgaatcgcatcgagcaattcgctgcggccgattggcgagcccgcactccaatgctgcggtacgtcgtcgtcgagccgttcgctgacgaaatggcatagctgagcaagaatgaccaattcgtgcggtcgcaatccgggcagcagcagctccgctgccatcttgagtatcgcgtcttcaacgtcggtcaccggctccaactgatcctcaaatgtcgcttcatgatgtttgcctttgcccaggcttttttcacgggaacgcacgaaatcaagatagttgctgcgcttcgatgcgatggtatacggcagtgaggggtcgtagttatagatgtccgtaagcatggggatgcggcccagctcgtaacggacttggcgatactgttcggacagctttttcatgtcggaccagtcggcggtgtccaaagacttaaggatgcgctccttggcgatcgggtcgaaactgatggacgacaggccgattgactttctctgcaggttcttgcgagctctgtcgcggtcgccggtgttgccgtataacgccaccggaatcagatagttgttgttgtaattgccaatgaaatcgataaccacaacgctttctttgtgcgggaatttgcgcagtccgcgcccgagctgctgcgtgaagataatgctggattcggtgctgcgcaacatgacgatttggttgacggcgggaatatcaactccctcattgaacatatcgacagtgaagagataatcgagttcgccttcagtgagcttgcggacgtattcgtctcgctgcgtttgggacatgggcctgccgtcatcgtccgtgctggtaacggcagcggtgcgataggggcgttcagcttgttgattccactgttggttaaacagctgggatagcttatgggcttcctcctgtcggctgcagaacacgagtccggtgaccggaatgttgaactgcccatattcctgcaacttgtcaatgatgtagcggactcgcttttcggtggcaagctgctcgatctcgtacttgagctgtttcgagtccttcgcatcaaggcccttggagacatcgagacgatgggtgattccattcggatcgtcgttggagccaaggtattccgcaacaccgtagtagtggaatggacagagcatgttctcgtccaacgccttttgcaagcgaatttcgtacgcgatgttatgcccgaatagctcgaagatgttgatgccgtcggtgcgctctggcgtggcggtcatgccgagcatgaagtcggcatctttgaaatgattgatgacgcgctgatatccttcggctccagcgtgatgaacttcgtcaaccagaacgtagtcgaattcatcggatttgaattgcgccaaaacctccggctgccgcatcgtctgtaccgtggcgaatacgtagcggcggtcctgttgcttgctggtgcctgaatacaatcccaattcggattcatcgcagccgagcaccttttggtaagacttcattgcagtttgaagaatcatctgctgctgggcgatgtacagcatgcgcttcggctggcattcgcgtacgtcgaatgcggaaaggtacgtctttccggtgccggtggccgacacgataattgcgcggtgctcgccttgttcacgaatcttcttgagattcgccaacgcctcctgttgcatggcgtttggctgaatgtcatgcccctcaagcgactgcagaatctcatgacgcggtggggcgtatttcttgaaatcttcctcatactgtttgatccactcttcggtcagcggaacggaatcagccacctgtgagtcgatttcatcctggaactgcccgaccagctctccatccgccagcgatgagactttgagattccattcgcgttgcgtggtcaatgcggctccagtgagattggaactgccaacgtacaggtcgtaatagggtgtgccgtctttcatgcggcgagaaaagatatatcccttgggatggaatggttgtccttgagccattgcggaaactgaggtattacgggaaccttcccacacgcgaacgtcaacaccagtggtgttctgaagatgcagcagctcccagaatgccctgggatcgttgaaatgatttttcgttgaggtaatcagtgtgcccgctcgggtcgctgtttcatggtgacttctgaagtcttcaaataagctgagcacggcctcagccgagacgaatgcgacagaaatgtcgaaggaatcgctagtagccaaggaattgccgatttcctcgcgcatggtcaatccaccggggcgatttgcgatgagggtcggcttatattcgctgggagcatctgagcgcggctcgatcagacctgagatgacatcttcgaggatcgagggggttggatcagaatcgtgatgttgcgtgttggctggagagtctgaggtgctgaccagatttatagacatgttgccctgttcccttgcgattcggatcgtttgatgactgcctgactgcgctgtggcgcgttcattggagcgtcagttgtttgttcgcgataatcgcgactgcttcgcgatctaccggagcccagttcaatgtcggcatatcagcaggattcagccatcggatatcggtgtgctcggtgagatgcggcgtaccggcgatgaggtgacagatgaatgtggtgagccgcacggttccaaagtcgtaggcgtattcgctggtacatacctcttccgcgacctcaacttcgcataacagctcttcttcgatttcgcggtgcaaggcttgccgcgctgtttcatgaggctcaattttgccgccggggaactcccagtatccggccaacgactttcccgggccacgctgggcgcatagtacggtgccgttggtgacgattgcagctcccacgacgttaatgattttgcgttcccgctccatgaacaaccaggatacaacgcttcaagatccacaagcgatccacgatcctcggtggttttgcatatcgatcctgatgcttttgattatgcgatcggacgggtcgaaaatgtcggtgtggacgctgccgactattgtggtagccaagagaagcgatccgtttccgaggtgagattcgggaacggtccgactctcggcagtgatttatccacgtagacaagccaaaggagcctcgccatgatcctcgtcaccaccaccccgtctgtcgacggatacaccatcaccaactaccagggcatcgtcttcggcgaagtggtgtccggtgtgaacatgttcaaggatcttggcgcgggcctgcgcaacatgttcggcggccgcagccagggctatgaggaagagctgatgcgtgcccgcaacgaggccatcgccgagatgcagcagcgtgcggaggcgatgggggcgcacgccgtggtcggcgtggacatcgactacgaggttctcggcgccgacaacggtatgctgatggtcaccgcgtccggcaccgccgtgcagctcgcgcgcaaggcctgaaaatacctatattgagggcggtcgggtggcctgcttggctgcccacgcagttcgtgcagcttacagcgcgcaaacgatcagataaatcgccacgacgtggcaggtgtatccgatgaccgtgcccaagtgaaacacctcgtggaactcgaaccagccggggacggggttcggcttgcgcagcgcgaagcacacggcgccggcgatgtatgcggcccctccgcatgcgatgagtatggttggcgcggggccgaccgcgggggccgtccaaagctgcgggataagcgtcaccggcgccagtccgagcacgatgtacacggtggtgaacacccaattcggggttcgtagccagacgatatgcagtatcgtgccgatggccgcggtcgcccagatcaccgtgaggtatgggcggcgcgtgcccgggtcgagcgcgaaaagcacgggtgtgttggtgcctgcgatgatgaggaagatgttcgaatagtcgatgccgcacagcacgcgggtcaccgccgtgcttcgccacggcacgacgtgcagcagcgcgctgttgccgaacagcagcatggccgaggcgccgtacactgcgcaggccaccttgacgggaccggccggcgcgatacaaatgagcacgatggacgccgcgatgcacagcggcagggtgacgaggtgcagccatccgcgaagacgcggcttgcgattgccgaatgcatccacgggaacaatctgacgcttgaccgctttcagcgcggctttggcctgacggtaacgtgattgtgcggccttgtagcgggccgatgcgcgatccagtgcggcggggccggtgcttgcaccggacttttggctcacggtcatggaaggcgtaactgttgaggcggaagccatttttcgcccagatggcgtactgatggaaacgctc

SEQ ID NO: 508 - DNA, 8536 bp, Unknown
  R48_24m  MAG No. k141_46217
gaagtatgccgggcaggtgatgacagcatcggtgacgggctcaccgaggtaagcctcagcgtccctcttcagcttcatcagaatctgtgcggaaatctcctgcggggtccacttcttgccgtcgatgtcgacggtccagtcagtgcccatgtgccgcttgacagaagaaatagtgcggtcaacgttggtcacagcctgacgcttggccacctcgccgacgaggatttcgccggacttggagaacgcgaccacggacggggtggtgcgcatgccctcagcgttgacgataacggtgggctcgccaccttccagcgtagcgatgcaggaattcgtggtgcccagatcgataccaactgcacgtgccataatgtgtgctccttaattattcgtttgttcttacgttgttcgctcaagttccttggttggttcttgggccttccaaaacttgagcctacatcactcaacttctgtttggcaagttctattcccaaattcatcacaaaagttgagcgatgtaggctcaggttttttggagcggctctgagccacccccagtcagcttcgctgacagcccccgccagcgggggccactcagcaactgacgcggcgtggactactgttcggagccctccttactgttgacggcattgccgcccttggagaaccgctgcaacagcatgccggcagcggtcatcaccaatacggcgaccgccatgacggacagggctacgccggtgttgggcagagcggcagcgccgaactgccgggattggccggccgcggtgtcggatgcgccgttggaggcgttgccgtcaccggtctgaccattgccgttgccactatcgcccggagtacccggggtggcggtgccgcccgactggttatcgtccttgccgccatcgggcttggtcgaatcatcgtcggcgccggccttgagcacggcagcggcgagcgctccggcctggtagccgtcagcgcccacggtggttgcagcattcttatcctgcgtctccgtcaccttgccatcggcggccagcacggtgtacttgccagccggcacggcctcgaccgttgcggccgattcgttggcgttgaacaccaccacatacgtgtcgctgccgtccttcagctggtaggccaccacgccgtcggactgctgcagcaccgtcatgttcttggcgatgtcatcatagctgctcaggtgcaggttcttgatggacttgcgcagggcgatcaggcccttcacatagttcacggaacccgcctgctcgaccgtgcggttccagtcgatggcgttcaccgcgtcgccggcgttgtagctgttgccattgccgcccttggtgcgcaggaactcctggccgaactgcatgtcggtgatgccctgcgagagcagaatcagcgagtcggcgagcttggcgcgagcgagtcgcgtctcctcggagtcgttgggcgcgctcttgaccagcttgtcgtacaaggtcaggttgtcgtggatctcgacgtactgcaccacctgatccgcgccgccgtagttcgtgtcggcggtgccgttgttgcagtggccgttctcatcgatgccctcgcgcttgttgttgcagccgagcacgttggtggcgatgaggttctccttgtcggccttgccggcgatgaagccggtgtcctcgtcggagaacacgctgcccttgatcgcgtcgcgcagggagtcgttgaagaacgccacgcccttgaccttggaggcattgggctgcgtggtttcctggttgccaatggcgtcagtcatatcccagccttcgccgatgacgagcatcgacggatcgatctcgtcaagcgccgcacgcacctgattcatggtggtctggtcaatcagacccatgaggtcgaagcggaagccgtccacgttgtactcggtcgcccagtacttcacggaatcgacgatgtacttacgggccatcgcacgctcggaagccacgtcgttgccgcagccggagccgttggtcaggttgccattggcgtcgtagcggaagtagtagccaggcacggtcttgttgaaggcgtgttcggaggcgttgtagacgtggttgtagaccacatccatcaccacgtacaggccgttcttgtgcagcccggagaccatctgcttcatttccttgacgcgagcgctcgggtcactcgggtcggaggagtacgagccttccggcacgttgtagttctccggatcgtagccccagttgtactgcgcgccgtagctcagatcgccggtctcgtccacggaaccgtagtcgtagacgggcatgatctgcacatgcgtcacgccgagcgacttgaggtagtcgatgccggtgggcgccgcgccctgcttgccgtcgaccgtggtgccctcctcgacgaagccgagatacttgccgcgattggcttcggagacgccggagttcgggttgatggtcatgtcacgaacgttcgcctcggtgatgatcgcgtcggtcggcttgctgaacgacgccatgcgcttgccggcatcgcccttctccttgtcggagagcacgacggatcgctcgccgttggccacggcggcggtcgcgtacgggtcggcggacgtgttgaccgtgccgtcggcgaaggtcagctcgtagtcgtaggcgtaatccttgagatccttgtccacggcgaacgtccacacgcccttcttgccggacttctccagcgtcacggcgtcggtctgcgctgccttcggatcggtggagtcggcgtacaggcgcagcgtcaccttggtggcggtcggcgcccacagcttgaacgtggacttctcggccttgtaggtcacgccaagatcatcgccgtcgtaggcgtacttcttgtcgaacgcgtcggagcgcacgacggcgccgagcgacacggtctgcgtgccgtagtcctcgatcgtcaccttgtaggccttggtcacgtcaagattgtcggccgcggtaatggtcacggtgttcccgctagccttcacgtccttgatcttcgcaccctcgaccgacaccgcgtcggccggcttgtcgatggtgagcgccttgttgagcttgaccgtgatggtgttgaagtcggtcatttcggcggagacgatcgtgcccttcgcgtcgtagagcgtgccgttggtgtagatcgtcgtgtcgccctgcaccagccagatttcggcggatgcggtgccgtcggcgttcacggtgatggcggactgcgggatcgtgcggttctcgtcgttcggatccttggcttcccagctgtcgccgccgtagcgcacgatgaactgcggagcgctcatgccgctgcccttgagcgtgtacttggcgatcaggccgtagtcgtcgtgctcggtgaacgggtaggcagcaccgttgacgccgtcggcccagccccagatgtcccatgccttcatgccgtcttcgctggtgtagtcgtcggcgaggcggtggtagtggatggtcacgtcgatctggttggcggccttcttgtagccgtcgggggcttcggtgagcgtttcgtccggattggcgccgtcgacccagatttcggcggtgccggtggaaccgtcgatggtacggtcgccgccgaccttgtcccagccttcggtggtgacgatcacaccgatcttggcggcgtcgtacgcaccatcgatggtggtctcgaacaccttgccgtaggagtcctcgccggtgaaggcgtgccacgcgccgttcagggtggcgccgttcttgtcggtgccccacatgtacacgccgcgatcggcgacggcgtcgccttcggcgggcttgtagtgcacgatcaccttggtcttgggctggtacgactgcacgtcggagggcacgccggcgctggcctcgtggtcggcgaccgccgtccagtggccctgcgcggtgtagttgccgccgccattcgggttgtcccagttgtcgccgccgtcggtgaatacgtattcgaaggacttgcccttcggatcgaccgtgaacttgacccagccgttgccggcgtcggccatcagctcgtggccctgctcggcccagccgtcgataccgtagtggaggtacgcctgcttccagccgtcgggcagcttgtagtagatggtgcggctcgtgtcggccgtggccttcttggtctcgtcgttgacggacaggtccggatcggacggatcggacttggtcgtgccggtccaggaatccttggtcgcgcccgcgtagatcgcgatggcggagttcttcgcgagcgtcgcgtcgaacgtgccgtcgtccttcacggtcacagttgcagagcagtcgccggtggcgtacacgttgcagtattcgccggcgggcagtgacgtctggaacgtctgcttggagtcgtcggcgctgttgttgagcgcgaggtagccgacgtcgccgcgaccgaagccgagcacgttggtgtcgtacgccttccagttggtgacgtcggtgccgttgaccgcgttgtggaagccgatcatgccgcggatcgcggtccaacgttcggcgcactgccaggtgccggaggtcatcgagccgtcggtcgggcactccatgtcgggcacggaggtttcggtggcgccgggagcgccgtcgtcggagttgtcgaagtagtagccggagtagatgtgcggctggccgtagtcgtacgcgagcatgaacgcgttcgcgagcaggtacttcgagcccttcttgtaggtgatggccgatccgcgctcggtatcccagttggtcacccacactgcggccttgtcggagctcacccagccgtcgccgccgaccttcgcaaggcccttgctggcgtcggtgatgtcgccggcgaaggcgaccgacaggtggttggtgaagttgaattcggagaccttgccgttcgccacatagttgctcggctggatttccgcggcttcggaggcgttgccgatgacttcctgctcgaagaagatatcgtcggcgttgcggccggacttctcggcgagcttggccttgatggcggccacgtcggccgtggcgatgtgtttgaccgcgtcgacgcggaatccgtagacgccgaggtcgagcaggcggttcatgtagtcggcgagcttgtcctgcacgtattcctggctggtgtcgaggtcctgcaggctggtcaggcggcagttctgtacttcgtcggcgttggtgtagtcgccgatgttcttggtgcagtcgtggaagttctctttggtgtacgggattgcggggaagttgccctcgccgtcgtacttgctgccggcgacgccggtgccctctccctgatcggcgccggtggtgtggttgatgaccgagtcggcgatgatctcgacgcccgccgcgttgcacgtggcgatcatggtcttgaactcggcttccgtaccgagcttggagtcgagcttgtagctgaccggctggtaggaggtccaccattcagtgccctggatggactccatcggcggggagacctgtacgtagcccacaccttcggggccgtaagcctcggtacactccttggccaccgaattccagttggtttggaatgcgatggcgatcacatcgcccggcgcgccaacagatgtgcgcgcctgtgcattggcctcggtctcgtccgcagaagccggcaatgctaccagcgttgtggcagacattgccaccgctatgccggttacggcaaggcgtttggcgagcgagctgaatcgtcgtacggccatatgagtcctttctctcatccttgagcattgaccgcacgaaccatgaaggggaacaccccctatcgcacggtcagaccgttgacaacgtttgcaacactttcagcaccactcctgcagaaacggcatgcagcacagttgacagactgcatacgttcgcaacactatgtcccaatcagcataccacaccaagtaacacttcccccagcttcgcgctaacgtttgcagtgtatgatacaaatgattgcacatcgtggatggcgcaacccgttagggggattacgtggcatagctgataccacgaattgcacgaggaggaacatgggcaaggcagacatctaccaagtagccaaggaggccggagtctccatttctacagtgtcgcgcgccttcacccgcccggaactcgtctcggcgaagacccgccgcaaggtgctggatgtggccgataagctcgatttcaacatctcccgctccgccaccgccctgaagtccggacagacctaccgtgtggcgatgctgatgaatgaggagatcaccagctggttcaatacgcaaacgttcgcgggcatcgaatcggtgatgcatccggccggctatgacatctcgctgttccagcacatcgataccgccgcaaaccgtcatgagttcttcaccgacctgccgattcgccgcaatgtcgatgccgttttcgtggcctcgttcgctatcgatccgcacgaggtcgagcagctgcagcgcattcatgtgccgatcatcggcatcaatacgccgtcttccgaaggctttgacgccaccatcagcatcgacgacgaaaaaggcatgtacacggccgcgcagcatctcatcaacctcggtcacaagcacatcgtctacccctgttccgaggcagccgggctggattcctcgattgacgcacgcgcacagggcttcatcaacgcctgcaaggacgccgaaggcaagcacgacatcaattgggaagtgctctccgtgccgcgcggcccggccttcgccgactccgcattatccgcgctgctggcgatggatgagttcccggacgcaatctgctgccagatggatatgatggcgattccgctggtgctcaagctggagcgttacggccaccgcacgccgcgcgattattcgattgtcggctttgacgacagcccctatgccgacaccatcaacttgacgaccatgcgtcaggatccgtatgcgatgggccgcgcagctgccaataaggcgttgacgctcatcagcggcaagacgctctatgacccacacgaggtgctcgaggcacagctagtgccgcgcagcaccgatattccattcggggaaatggcgtaactaggccagcgcgccgacaatcaaaagcactggatagaccgcgtaccaggcccacttggtccaagactgcttgaacccgacttcgtcattgcggtagtgcaggaaggccacaccaataccgggcgtaatgcacatcacggcacccagcagcccggcggcgaacatcatcgtattttcacgcgcgttcaggaagtagaacaccagcacaaacagcagcgtcagcacaccggtatacataatccgctgatccacgcccacgcgcagcagcaacgcccacagcagtccggccagaatgaccacaatggtcagcagccaacgcaccgcagccgcaccacctcgccgagcaccggaccacgggcgcagactctccccgccgtactggtatgcaatccaatccaccagcatgagcacgaccagggcgatgaccaagccatacaccgggttctgcgcgctcaagtcgaatggcttgccggtcataatcaagtcgtacggcacatcgctgaccaccgcgacgatgaacagacggagcacatattttccaatgctgcccgtatgccggtagccgtcgaacagcagccatgagtagatggggatggcgcaccatgaagccgccgtgcacgccaccaccacggtcagtgcagccatgtcctgagtcgggtcgcccaacatggccggcaggaccgagacgccggccacgcccaatgccatgaatagggcgccgatcatcttgagacggaatacggacaggcccttgcggcggcgcttctcaccacgccgctgctttgccatctccacttcgttcataaggttgcgccttcctgttctggctcccctctgaagagggggagctggctcgcgcagcaagactgaggggagcctatgtgtcaggcaaactcccctcagtcacctacggcgacaactcccctcagagaggggagccaagctatatattcaagtatcccaataatccagcataatcggggccggtcagcgagcgcacggcgtgctggctggtttgcggatcgccgggcggggagatctcggtgcgcatatagacgccatcgatgcccgcgccagccgcgcccataatgtctgaacgttcgtcgttgcccaccatcagcaccctgcagggggccacaccctcggcctgcgcggcacggcggaatatggcgggagatggtttgcgcacgccgatttcactggagataacaatccggtcgaacgcatattccaagcccaacatcgccagctccggccgcgtatagcaggattgcgcgttgctgacgagcacaacgcgcaaccccacggatcgcaatcgcgccagcaattccagcgcgcccgggtagaggcgcagcatactggtgctggcctgtcgaaacgtccaagccaacgcccgggccatatccatccggctttcccgaacggcagcgttcccctcaagcgaagtctgcgcggcggcttgggaatcgcggcatatcacgtcatcgc

SEQ ID NO: 509 - DNA, 14387 bp, Unknown
  R48_24m  MAG No. k141_46845
acccatatgatttgctgagcgaccgcaaaacacgcaatagccgagacaacaccgtcagcgttaaagcttaaggcgactacttgcccaatagtccggaaatctggctgatgatgtcagcgggcagtcctgcttgttcggcaatggatccgaggtccagattggcaccctgctcctgaattgcaccagcgacctgactgatctggtcggcggagatgttttcctccgccagcgcctgcagctcgtcaagtcggtcggcgttcaaatggtcgccaacgacctgttgatttcacccaactgatcggcattgaaatgctcaccgattaccgccggcaaatcaccaatcgaaccgagattgaaatccccgccaagcacattgcctagattgtctgcggcaaaatttttcaggctatcgaacagtcccacatgtgccgctggtactgcttgttcagcaactgctgcagagcatcgcacagaccctgcatcaatcgccgctcttcggcagacaagtcccgcgtgacaccaatctctgcctttgcgctcatcagctggggagctcacggtcacactcatgcgtcgcagaccacgagcctcacgcgcccccccctcattccacatctgtgttaacaacatgtgttaatcgcatgcatcgccaccatgattccccaatgatttcaaggggtccccggtctcactattgtttcttccctaagaccgcctcaatcatcggcactttcctggtggccaccacctccctgaccggcaacgcctcgctcggcgtgctctccatcgccgtcctgctcgtcgcggcgctcgttttcctgctgctccagaaggatccgacgcgcgcaaacgtgctgagacatcgccggtgaaccaagttctgcctttttaccgacgccagctcgcataagcaggaatcagacgtcggcgctgggacacagaacgggaatccgccgacgttcagagtatctgatgtcggtgccgggccatgttttggacgccaccgacacaagtaccactcttggcgacggtggtggggcatccgctgtcccaccaccgtcgccaatcgttctcagcggcgttgacaatccattatctgtcctttcaacgccgccaaacgtccacagcgtcggcgacggtccggattttgacgcaccaccgatgcaaaaccattgcaggcggtccgtacggaacatcagccgcgaccaccgaacgagcaccagatgcggcatcagccgcgacaccagccgcacttatcgacgcgcccttaccgcgtcatcacgtccatcaatacaatgactcatcggcatatccggctgcagcccaataatcgtcggccgatagcgagcgattgaaaccggtggcatgatcgcttccgaggtcgccctcgccaccgaaatcgacatcgaaatcagtaccagcatcggaagtaccgccggacataccggcaacgaacctgacttcggttttcagcaggtatttctccgcgaaattcagcgtggtgcacaccatcgcaaacccctttccatgcgcgttgccctggcggaccaagacgtccttgtgtaagtaagtatggcggctccccttccacaccgccatatccactatggaagcgcgccgcggcacacgacacaagccccgggacataggaagaagttatggccggttcaaagcacccgtattacagcccaaacggcaccgcgcgcagcgggattgcacgacggccggacgccactcataatcggaaaccgctcacagccaaatgccacccgaggccggacgccatataaggaaccgtggcacggcagatatagaaaatgcccgccatcatagactgacgagcgtgatatcgggtgggcgatgtaggaatcgaacctacgaccccttcggtgtgaacgaagtgcgctagccgctgcgccaatcgcccgagcttgtgatgaaaaaaccggcaacattctgccggcgattcatcgagtgggcgatacaagattcgaacttgtgaccccttccgtgtcagggaagtgcgctaccactgcgccaaccgcccgggtcatcctcaggctgaatcaatcatcctgaaccagccatccgagagcggacaacgggactcgaacccgcggtctcaaccttggcaaggttgcgctttaccaactaagctatgtccgcatgtgttaccttcacgggcaacaggtgacaaagatacgccaatctcaggaaaaagccaagcccccgcgtgtcccaccggttttccaacgattatcgggtgccgtcgtgcacataactcgcggtggccgtatacagcagccaggcgatgggcatggccagcataaacagcgggtagaaccaagcgatgggcacatctggcacggccatggccgtggaaatcaggaacgcatgacgataaccgatcagctggccgaagaggccaaggccctgatcggcgaccgtgccgaagtgaagttcctgaactacgccgacgtgccgttcttcaaccaggacgaggaattcccgaacccgacagccgccgtggccgccgccttcctggcgctcgttgcggagtaatcccgcctgaatcttggttacgttccgcctcaaggcggacggcggaccagctgcatcagcaatgtgccgaacccctctgattgactccaatcagaggggtcgctgcgtttcaaggggctgatttggccttctccggaggtctactcccgtttcaaggggctggtggctgagtagacacgggccaaaaacggcgtaatgacgttagcccggagccgtttatacttgtggtttcccggatgaggagcccctcgaaacggagatagacctccggaacagcccaaatcagcccctcgaaacggagttagacggttgggatgtcggaaagaacactcatgccggcccaagaacccccactatgtcagatatcgctgcccagcacgcaatactgaccgtacagcacgacccgtccttcatgaaatcaggcacggtatgggcttcatccctcaacgcgcgataatggcggtatgacgcaacgacaactgatgcgggccacagtcgaaacgcccatcggccggatgatgatggcctcggacggcgagggcctgaccgagctctgtcttgaagactggtggtgggccaccgaccaccaagccgttctcgactcgaaccgcgaacccgatcgtgaacccgatgtgttccgtatgacccgcgaatggctgaccgcctatttcgacggcgaacgccccggctcggatcaggtgccgccgttgcatcccgccggcacgccattccaacatgaagtgtggaatctggtggccgagattccctatggcatgacggtaagttacggcgaactcgccgccgaattggccgaacgacgcggtggcggccgcatggccgcgcaggcggtcggaggcgcagtgaagcgcaatccggttactatcatcgtgccctgtcaccgcgtagtcggctcgggccgcgcatttggcggctacggcggccgactcgacatcaaggccgaactgctcgaccacgaaggcgtggatctggcccgcttcgatctgccgaacctttgacggccccagcggtccgcctcgtcaaaaggattgagtggttacccctcccgccggcgggaagtggcacgtaacgccggagggtggtcggctggctggcatcgcaacccccgctacccgacaattttcgacaagctgacgggaatcctcccacgaattgttcgccgtcggtgcagtcttgctcgatcgcgccggccaaaaccgtacaatccctacaatggaatgtatatggttaattgctgcgcgcagccgcacggccgcacgcaatcgcaagaccacatggcccaaggggatatgcaatatcaacggaagcaggaggtgcgtatgaccggcattatcgattacgcgcacaccgaaacgcgctccttcgccgacttgccgttcaacgaaatcgacgccttgatcatctccacgctcatctatgaggatgtggccagtatctgtccgacgttgatgctggatgagacgcagtcaggctcgttcgccgcacgcattcgcgctttcgagcccaagcatccactgatctggctgaagggtatctggcatcccgagcttgaatcggtaagccttgacgaggccaaccgcgagctgcatcgttcgccgaaaacgcatgccgacgacaagccgcacgaagcccaaatggtttcagtggtcaatccggacctgacccacgacctgttccaggccgcaggcgagaacccccgctacgccaacgttcgcctgggcgcggtggtcgagcacatcaatcagggcgagcaaacccaattcgccgccgccaccttccaactgcccgacggccacaagcgccggaagccgacctacaaaggcacgttggttatttccttccgcggtaccgatgattcgctcatcggatggaaggaagatttcaatatggctttccagtatccggtgccggcgcaacgttcagccagcgcctatctggatacggtggcgcgactgtgggagggtccgattattctggtcggccattccaagggaggcaatctggcgatttacgcggccatgaacgccgaccccaaggtgcgcaagcgcattcagcatgtctattcactggacggccccggtttcccgccggagattgtgaccagccccgcctaccgcaccatccagccgaaggtgacgaaaatcgtgccaagttcgtcgattgtgggcatgattttcgagaccccggagccttgccgcgtggtctcttccgattcggatggcattatgcagcattccgccttcacctggctattggatggcgaccagttcatcaccgagccggatttgagttccagctcgcagttgtttaacgaggagctgaaccattggatcgccacgcttacgcccgaacagcgcgagcgtgcggtggacgcgctgttcaccgtgctgcacgccaacggcgccaccagcttcagcgaggtgatgagcaacttccccgcttcgattccggcgatgcttggcgcgtatgtagggctgacccccgcagaccggcgtcatttggttgaggccctggcgatactgttcaaggcgtccacggccaaacgcaggccgacgcccgccccggcttccgcgccgagttctgcgaccgccaaaggaacagccgaaaccccagcaggaactgcgacaggaacagatagcgcgcccccggccagcgccgataccgacaccgacactgacaccgcagcttcgccctcagcggaggacgcaactgaaatcgccgattagctcatagacatgtccacaaataatagttatactgcccgataagttattagacagcgtgaccatatcacgctggtgcatcaggaggaagagatgccacgtccacgccatgattccgaggtgctgcccgccaaagaacgcctagagaacgctttctgggaattgctcgccgaccgcgactaccgcaagatcaccgtcaccgatgtggtgcgtgaggctggcgtgaaccgtaattcgttctattatcacttctccagcctgcccgaattggccgattcagccatcctgcatcaggtcgaatcgattccgatcaaccgcacccccgacccaaatggcaatcccgaggaacaatggcgagaccgcgtcaccgccacgctctccgacccggagcagcggcagcgcctcgaccgcctggccctgttggccggcccgcacagcacgcttgaactgaccgaatcgctgcgcgacttctgccgtctgcaaatgctcagcacattgcaacgcgaccccaagaaccttgacctgaaaaccgatctcatggtcgagttcaccgtgggcggcatgctcgccgtgctgcaacgttggcccgaattgagcgacgccatcgaaatcaaagacctgcttaaagaagatgtggccgtgctggccatgggcatatacctggccatgagccaaaaggacatgcttaattactggaatcgcatcttcgtgcacaatgcgcaggattcggccgcccccggcatgcaggccaccgccacgcatgccgcgccatcccccatctcaccgtcgaacggccccgcaggattccccgggtacaccgcttgaccgaaaaccagtgagtctggattgtttccgtcgaatgaacccccgcgtgaggtttctcacaaggcgcaatcagcctctcatgctggcgtttccagccctcacacaggaagatggaagcatgagcgaaacatcgaacaaaacccgtctggaacatgactgcatcggccagatggaggtgccggcgaacgtctactggggcattcacacccagcgcgctatcggcaacttcccggtctccggcatcaccgatagccaacatcccgagctgattcgcgcctatgccacggtcaagcgcgcctgcgccatcgccaatgaggaattaggcctgatcgacccggccaaggccgaggccattcgcgccgcctgcctagaaatcgaggccggcaaactggccgatcagttcccggtcgatgtgatgcagggcggtgccggcacctcgtcgaacatgaacatgaacgaggtgatcgccaaccgtgcgctggaaatcgccggccaccagcgtggcgattacacatacatccatccgaacgacgacgtcaacgagtcgcagtccacgaacgacacctacccggccgcctgcaaactcgcgcttatcgacgcgatcgggccgctcgccgagtccaccaagaaactcgccaaggccttccacgatctggccgacaaacatatcaatgacgtgacgatcggccgtacgcaactgcaggacgccgtaccaatgacctatggtcaggagtttcattcgttcgccacgctgctgaaatccgatttggctgcattcgatcgcgtggtgccgctgctggcccagctcaacctcggtgccaccgccatcggcaccggcatttgcgcggatctgcgattccgcaagtccgccatcaagcatctggcgcagatcaccggcttgccggtcaccgccgcgcccgatccggtggccgccatgacggatatgggcgcgtacgtggccacgtcggccgccatcaagagccttgccgtgcacctgaagaaggccgccgacgatttgcgactgctcaattccgggccgcgctgcggtttcaacgatctcaacgtgccggctcgccaggccggatcatcgatcatgccggccaaagtgaacccggtgatccccgaatgcgtcaaccagtgctgcttcacgatcttcggcatggacgtgactgtgaactgggctgtggccgagggccagttgcagctgaacgccttcgacccggtgatggtgcatgagctgctgaccggcatggcgttgctgacgcgcgccatggagacgttccgcgtcaattgcgtggagggcatcgagatccacgtcggtctgggacgctcgtatgcccagtcctcgccgtcgatcgccgccgcactcaaccactacatcggctatgagcatgcggccgacatcgccgccgaagccgtgcacaccggccgtaccgtgcgcgaggtggccggcgaacgcaccgacctgcccgccgagcagctggacgagattctcgatccgattcgactggcccgtggcctcggccaaacctgccgcgagcatcgggactaggcgtcacggcgacgtcatcaccacgacgatgctgcaccgcggtgccgcggtggtgccggtggtgccgacggcacgccaccggtatcgcaccatcggcaccaccgcaacggccaaaacccgacgtgggcccgcatgtttacgacttcaccagaaatggtcgatacagtagggcatatgaccgaatatgcacaagacatcgcacgctggtttcaggtgaacgccggcaaactcatctggctggccgtcgtgctggccgtcgtgttcgcggccgaccgcgtgatcagccgcgtgctgcgcagggttctggatagttcgcagattcccagcgcctcgattttcgtgaatctcacgcgcgtgaccatctgggtcaccggtacggcgatggtgctgcaaccggtgttcggcatcaatccgaccaccctggtcaccgccctcggcgtcggaggcgtggcgatctcgctgggtctgaaggatacgatcgccaacatcatcggcggcttcggcctgatgctgggccgcgtaatccaacccggcgacctggtgaccattcaaggcgtcacaggtaccgtgcatgacatcacctggcgacagaccgtggtgcgcacccgctccggggacatgatggtcattcccaattcggtgctcaatacggccgccttgaccaagctcacgccggccagcgaaggcatggccacgctcgaattcacggccaaggcctccggcgacccgtccgctatcagtcaggatattctcgaccgcgtaaccaaagccaccgccgacgtggcactggagggccagccaccgctggtcaagttcaccggcttctccccttacggcatgaccggccaagtgcttgtgttcgcgcgcgagggtgtgctgccctccaccatcaaagatatggccgcgcgcgccatcgccggttcgggcactaaataccttgttgaagatggcggctcgtcagacaatctgtgatatctcccggctcacctctctgggtccggctatgacagtcatgcgaacagcatccaaccggtaagcatcacagtcagcagtaggtacgcaataacgccgggattggcataggcggtgcgtattttaagccccgccggcaactcctctggcgcaagatagaactcccagttcttgcgcttggtgataagcagcacgataccggcaatgcagaggcccaacatcactgtgccgtacaacatcatgatgcccatgccgcccatgttgccggtttcagccatacgcatgatttcggcctcgctgattgtgccgtcgaggatgcggggatcgatctgttgtatcaccaatggggcgagcactgccccgttcaggttgatcagcatgtgcatagccactgaataccgcaggcgggaggtgcgtgtgtatacatatccgaacatcagtcctaggccaaaggcgtagaagaactggaacacgttcatatggaatagcgcgaacgccaatgcggagaacatgattgcggtcttttctccgtaccggcgcaggcgggagataatctccttgcgaaaaatccattcttcgcaaaccggtgccaacaggcctatgaacaatgcgttcacccgccagtcgctgccaagaatcacgtcgttgatgcgattggtggcctgaccatcagtggctccggcagacaatatattgccgatcatattgcccaagaacattaccggaatgcacatgacgaaaatccgaatgaactcccccgccttcatggggtactgccgggtgcgaataaccggtacgcgagtgaaggccaacatactcagcggcatggccaccacatacagcggcccggaggaggcgagcagcacagcccaagcgggcacatcggcgccaagcagcgttcgtagtgcttcagtggccagaatattcagcccgatccagaacaccatcataatggcgagcgccgagccgattgtcgaaaaccggcgatgggccgtgaaccaccaatcgcgtggggtttgttgcggctgctgcgccgacggcattggttcgctcatacttatcccccatagtcactggccgcaaacggaccgatcacacgtgcaatactcttcaagaatacggcacggcgtttcgattgcattgggaatggggaaaatcatcaatgggcaaggaatgatctacgtcaatcaatccccatgccgagagagtcctctactctgcgggattgttgtgggacggcacgcgattttgcccgattttttcgcggcggcccacaccactccacatatgactgatgacgccgcacgaagaaatggcgtcattgcaacgattcctcaatacattctgtgggacggcacgaatgtacatcgtttgacgttcatgccatcccacaccggcgtgggacggcacgcgataatcgcccaaaaatcgccgccgtcccacacatatcattgccgataagccattcgacgatcgtacagtcacaaaacagaacagaaccgcacgatcatcgcaacgccattcagcaggcgagcgcggcgaccggacgcggggcgacaatcacgtcatcgcccaccgccagaccggccggcagctcgctggcgggcagctgcacggtggccttgagctgttcacctttgttccagcgctggtattcgccggaggtgatgaccgtgtccacacgaaccaaagagccaaggaagtgaatgacctccacgcgggcgcgttcgccgacgtgcgaatcgctgctgccagccaaggccagcatcaggttctccgggcgcacgagcacggccacggaatcgcccttggcggagccggcgagcagcggcacgcgctggccgaagaccacggcctcgtcgccattggatgcgccgagcaggcggttggtgagtccaatgaacgtggccacgtactcggtggcagggcgctggtacaggtcctgcggggcggcgatctgctcgatcttgcccttgttcatcacgccgatgcggtcggccacggccagcgcctcttcctgatcgtgggtcacgaagacggttgtggtgccggtggtgagttggatgcggcgaatctggtcacgcagctggacgcgcactttggcgtcgagcgcggacaacggctcgtcgagcagcagcacgcgcggcttgatggccagcgcccgggccagggccacgcgctgctgctggccgccggacatctgctgcgtgtacttcttggcctgatcggcaagccccacgagctccagctgttccatggcgatcttgcggcgttcggccttgcccatgccgcgcacttcgaggccgaattccacgttctccagggcggtcatgtgcgggaacagcgagtacgcctggaacaccatggccatctcgcgcttgttcaccggcacaccggtgacatcctgtccgccgaccatgatgcgtccgccttggatgtcttcgagaccggcaagcgatcgcagcgcggtggacttgccgcaaccggatccaccgagcagcacgaccatttcgccgggcttgatgtccaggttgaagtcgtcgagcgcgtgaacggtggagccgggatagatcttgacgacgttctgcatctgaatggaaccaccgccgcgcttggcggtgtctttgagcagggccttggcggccttggtcacgtccttgccgcgcacgccctcgagggtagcggtgggatcgttcttgaaggcgtcctcggcagtggaggacacggctgccggaatggccggggacgccggggcggcgtccactgcggtaccggtttcctgacgggtgggagttgaatcgttgttcatcgggtcacttaccttcccttgacttacgcattgcgtcggagatcaggtcgagcgcaacgaggagcaccacgccgaagagcagagccagcagcgacatggcggtggaaatttgggcattggattggccgagctggtagagcgcgacctgcaggttcatacggccgagcagcgaggcgacggtgtattcaccgagtaccacggcgatggagatgaaggatgccgagaggatcgactgccacaggttcgggatgatcaccttgaagaacactttgggccaggaggcgccgagcgatcgggaggcttcgaccaacgtcttgacgtcgatggagttgaggcccacggcgatcgcgcggaaggcgaacggcatcacgagaatcacataggcgaagcacagccagatcgggttggtgctcaacacgtcggcggaaagccaacggtagatcggcccaagacccaccaccagcacgatgaccggaatggtcagcggcagcgtggccacccattcgattgcacgctccaaggctttggagcgaatatgcacgatgaccatggtgggcaccagcaggatgagcatgatcacgacggtgacggcgctcaacgacagcgagatgccgacgccctgccatagcacgctcagatcggcgcccaacgattcgccgttgccggtgaaaatcgccgtccacggcgcggccgaccagcgaccggacaacgggtgacgcagggtgaagatgaacatggccagcagcggcacgaacaggaacgccagggtgacgaacaggatcacgaatttgatgatgctctgtttgcgcacgcgggcggcacgcagctgcggcggcttggttgtggaagtttcggtcattgccaacgtccggccctcttttccacggcgtggctcagcagcatgacgatggccacgacgatgatcattgcgaatgccagcacctgcgcgaagccctgctggttggggtccatctcattgcgcatggcaccctggatcatgagcggcaccaggatcgaacgctgggagaacagggcggcggcggtcgcataggcggagaacgcggaggcgaacaacagcaggaacgccgagatgaagcggggtgcgaggatcgggcaggccacgcgcgtccagtattggacggtgttgccgccgagcgactcgcaggcttcgcgccactgtggacgaatggaatcgaccgcaggcaggaagatgatgatcatcagcggaatctggaagtagcagtagacggtcaccagccccggcagggagctgagccaattcgggttcacggtatagccagtcagggttttgatgagcatggtgccgatgccgttgatgccaagagtggcgatgaacgcgaacgcgagcatcacgccgccgaactgggcgagcaccgatgagatggcggcgaccatacggcgcagcggtccgttcggcttggcgccgatcaccagcgcgtaggaggcgagcgcgcccaccacggcaccgatcagggatgaggccacggacaccaggattgacgtgccgaacgcggcgatggtgttggcttcgaacatcttgtggaagttcgcaagcgtgaaaccgccgctgcgatcctggaacgcgccgatgatcacgatcacggtgggtgcgagcaggaagcaggcggtgtaggcgaagaacgggagcgtggtggtgagcgtgccaagctcctgacggtgcttcgccagtgcggacgaagcgggggtcgatgcggcggacggacccgcggccttggaggcggcgggtccgttcggtgcgatgggtgcgattgcggcggtcatcgtggactctcagttgccgatcgtcttgtcccagttgttttgaagccactcggtgatgcgggtggagtcatcgttgctgtaggtgaccggctggccttcgatggtgatggcgtccttcagggtggcctagtcgacggtgccgtcggccttcatggagtcgagcagcaccgggttggcgccgcccttgaaccacaggttctgggtttcggcggtgtacaggtattcctcccacaggcgtgcggcggcggggtgcggcgcgtccttgttgatggcctggttgtagtagctgacgacctgggctttggggaaggtcttgtacttccagttcacgcccttggacttgagttccttcttgtaggaggcctggttgtaggtccagtcgaagaccacgccggtctggccggagtcgatggtgccgttggtcacatcgatggtgttcaggttgccggcttccttgagcttcttgaagaagtcgagaccgggctgcaggttgttgatgtcgccgccggcgagctggttgaccatcagatagccgttgaaggccgcgccggcctcggtaggcttgccgttcagggacacggtgccggcgaacttcggatcgagcaggtcgttcagggaggcgacatcgccgtacttgtcggcgttccagcccacggacatgatgccggtgtagtcggcgtagtaggcgccgtcgacgttcttggcagcatcagggatcttgttccaggcctgcaccttgtacggggcgaaatagtcggtggaggtggcggcgatggcctggccgacgtcgaagacatcgggggcggcgtcggtacccttgttggtcttggcggcgtcgatctcctccttggaggaggcgttcgggttcagctcggtgatcttgatctccgggtacttcttcttgaagccctcgatgacctcgccgtagttggaccaatcatgcggcaaggcgatgacgttcagcgcgccttcttccttggcagccgattccgcaccacacttacctcagcacgccctcaatcaatcgcgtgatgagttcggtgtagctcactccggtggcatcccaagccttgggatacatagaaatcggcgtgaagccgggcatggtgttgatttcgttgac

SEQ ID NO: 510 - DNA, 2719 bp, Unknown
  R48_24m  MAG No. k141_47102
ctgaacaacggcgagaccatcaagcgcgtgttcgaggccgtcgaaaccgtggccaacgccggcggcgtgccgctcatcatgagctactggaacctcgtgtaccactacggcgtcgagcgcttcgcccgcgacttcgagaacgtcggcggcgccggtctcatcaccccggaccttatcccggacgaggcgggggagtggatcgaagcctccgaccgccatggactcgaccgcatcttcctggtctccccggactcgtccaccgagcgcctcgaaaccgtggcccgcaacgcgcgcggcttcgtgtacgcggccgcccgcatgggcgtcaccggcgaacgcgccaccatcgacgcttcgcccgaactcctcgtggaacgtacccgtcaggccgatgccgagaacgtgtgcgtgggcatcggcgtgtccaccgccgaacagggcgccaaggtcggctcctacgcggatggcgtcatcgtcggctccgcgctcgtgcacaccctgctcgcggacgacaacaagaccgcacgcgacccgaaggaaggcttgaagctgctcgccgccaagagcgaggaactggccgaaggcatccacaacgcacgctaagacctgccgcccctagaatcagggcgtattcggcacctgcttccgtcatggattgccgcatgcgccctggtaaagggattatccgccatcgaagccatcgaggaaaagcttggaccctgaggctcgacacatatgaaacgagtacgctgccaaagcgtgaggcgttcctcgagtcccggtttccatgcggtagtatggcaggcggcattagcgaatacgagtaagtgaggcacgatgaatctggcctatatcccctcgccgaccttctctaaattccaggtcggcccgtttaccatccacatgtatgcaatctgcatcctgattggcatctgcgtggctgtgtggatcctcgccacgcgctggaagcgctacggcggcaccttcgaccagattctcgacaccacgctcgtcaccgtgccctgcgctctggtgggcgcacgcctctaccactgcatcaccacgccggccgactacttcccgcccaccggcaacctgatcaacatcctcaaggtgtgggaaggcggcatggccatcttcggcggtatctccgtgggcacgctggtggcgttcctatggtgccgccacaagcattacccgttcgcgatcttcgccgacgccatcgcccccgcgctgcccgtggcccaggccatcggccgactcggcaactggttcaaccaggaactctacgggtggcccaccaccctgccttggggtctgaaactcaacgacgcggacgccatcggcaaatccgaaatctgctattccggcgctgagtgccccgactacaaaaccaccctgttccaccccacattcctgtatgagatgatctggaacctcatcggcgccgcgatcatcatctaccttggccataagctcgccgaccgccttagggctggccagcagttcgccatgtacctgatgtggtacggactgggccgcacctggatcgaaaacgtgcgcatcaactactccacagtgattctggggttgcgcaccaacgtctggaccgccatcatcgtcttcgtgatcggctgcatcctgttcgtcgtgctctaccagcatggccctgactccaaggtacaggcccggcaacttgcggcggtcaccgccgacgaactcgaacgccagagcatcgaagaagaacgactgcgccagaagaaatcccagcgcggcaatatgcaataagtaacactggaaagaacagcgtccaaacagcacgaaacacggggctccaagtcccattgcacagataaggtaggaaaccatgagcaatatcgcaatcgcacccagcatcctgtccgctgatttctgcaacctcgaacgtgacctcaaggccatctccaatgccgatttggttcacgtcgacgtgatggatcatcatttcgtgccgaacctgacccttggcgagcccatcgttggccgcatctgcgaggtcaccgaccttcccgtcgacgtgcacctgatgatcgaggatccggatcgttgggcccccgaatacgccaagctcggtgccgcttcggtctccttccacatgggtgccacccatgccccggtacgtctggcacgccagctgcgcgaaatgggctgcaaggcgagcttcgccgtgcgcccggccgaaccggtcgagccgattttcgacatcctcgatgagttcgacatggtgctcatcatgaccgtggagcccggcttcggcggccagaagttcctcgacaaccagatggccaaggttcgccgtctacgcgacgaaatcacccgtcgcggactgaagacccgcattcaggtcgacggtggcgtgagccccaagaccgcgcacatcgtggccgaagccggcgccgacgtgctcgtggccggttccgccgtatatggcgctgagaaccccgcccaggccgtcgatgacatccgcgccaaggccgaggccgcgtttaaggcctgagccgcagcgcgcccattacctcagcagaagcaacaaagaaaagataatcatgaagacgtttgaatccctgttcgccgaactgtccgaaaaggccaagatccgtcccgaaggctccctgactgtcgatgagctcgacaagggcacccacttcatcggcaagaagatcatcgaagaggccggcga

SEQ ID NO: 511 - DNA, 7784 bp, Unknown
  R48_24m  MAG No. k141_48091
atgggcctgttcgcacttcgcggagtcagagggattcgaaccccgggaatacggttctggtgggttgtccggatatctgttttgcgacgcattcctgggaatgtgtttctagtgggttgcttgggggtctgttttgcgaaactttcctgggaatgtgtcgctagaaataaccgaaataaccgaggacggtcggtctccgcttgtggtaagcggagtcggaggtacgccattgtccgtccgcctccaaaccgccattttagcgggtgaacgagtgcggcacctcggggaaaaggctaacaaacgaaagaagaatgtccactaagtgagacttttgcgtggtgttcgtgaatggtgattgaagattaaccggtttatgtcgcttgtccaatcgcttgcccatcgccttcctccccgcagtgtttgactgagatgggcggtatcctagagagagaagaagagttccgaagggtgggcaaagatgagccatatcgctgggcaggggcaacatcgctccaactcgacacgaaccaaccgtgcggcgctgattatcgtgttcgtgatcacgctcgccgttacgctgggcatcggcgcatggttcgcaacccatcgcacggacggcaatggccccgcacgcgccggagtgtcggacgtcgcgttgaataaagcgaagaacacgcccaaaccggtgaccgaacatcacggcaattcaccggattgcccggatacggactgcatcgccatgctggtcaacggcgatttgttgttccatgagggattgtggagccatttccaaggcccgaaccccaacgccacggatggcaccgccttcaacttcgacccgctgttcgcgccgatgaagcagtacattcaggcttcggacatcgccgtgtgcgaattcgaaaccccgatcgcccagcgcggcggcccatatgccgcgtacccgatcttcaacattccgccggaagtggcggatgccgcccgcaacgtgggatacaacgcctgcacacacgccaccaaccattcctgggatcagggggcggatggcatcgcccgtctgtgggacacgcttgaggccgatggcatcgcccagaccggctcgtacaaaaccgaagccgactccaccaaaccgttagtcatcgattccccgaccggcggcggcaagctgggtctggtcaccggcacggtctccctcaacggcatgaccgccgacgaggactggcaggtggatcgtctgcgcgaagacggcgacccgaatcacggcagcgacatccagcgcgcggtagacaaggccaacaaggcccgcgagcaaggtgccgatgtggtggccatcgccatgcactcggtgcaggaataccttgattacgccgattcctggcagatttcggaagcccatgagcttgccgacactggtgccttcgacgttatctacggtgccggctgccattgtgcgcagcccatcgagaactataacggcacgtggattgtctacggtctgggcaacaccgtcaccgagtcggcgaacacgccggaaaccttggtcaacaaccagggtgtgaccgcacgcatccagttcgccggcaagaagggcgtcaaggggtcgtggcgcgtcaaccgcatcgactgggtgcccaccgccaacgtgcatcaaggcaactaccaatggtgcccgatatccagcgaccatcccataggcacatgttgggacgaagcctacgacgctcagatacgccaacgcatctgggatgtcatctattcgatgggcgcggaccagaacgtcgtcaaggaatggaacatcacgcaggagcaggcggcaaagcaatagttgctcggcttggtctcaaggaggggaagccgcaaggtgacgcttttcccgtcggcctcctaatgtggagcccatgaccgagatttacgaaacccaaagcgaacgcaccgatctgcccctcgtcgtgatgccgtccgtgctcgacgcgatgatcgagcccatcaaggcccagttccccgcgctccacgacgttgcccgcgtgcgtatgttcgaggaattcacgtccgacgaggcgaccatagccgagcgtctgaaggatgccgacgccctgctggtgggtggctaccacatttcggatgatctgctgcacgccatcagcgagcaggggcacgtcaagtgcatcgtgttctgcggtaccggcgtcgccagctacatcaatctcgataaggcgcgcgagctgaagatccgcgtctgcaacgccgaacattatggcgatcacgccgtggccgagcacaccttcgccctcctgttcgagctcatccgccgcgttggccaactcgataaggatgtcaaggccggcaactgggcgtgggccggcggcgatggactgcaactcgccggccgtcgcatgggcatcatcggactgggcggcatcggcgccaccgtggccggcatcgcccgtgccttcggcatggaggtcgccgcatggaattcgcatgtgccgcccgagcatttcgaacgctccggcgccactccggtcgacgatctcaacgagctcatcgaaaccagcgacgtcatctccgtccatctgccgctcaacaacgccactcgcggcatcgtcaccgccgagaaccttgcgcatgtgaagcccggcaccctgttcatcaataccgcccgctccgaagtcatcgaatccggtgcgctgcttgcccgactgcaaaagggcgatgttcccgccgcactcgacgtgttcgaccacgagccgctgaccgccgacgacgccatctgccatgtgcccggcatcgtcctgaccccgcacgtcggctggcgtaccgacggcgcgttcaaggagctcacccgccagatgatcgcctgcctgaccgcctacttcgccggcgaggactataacgtcgtcgtctccgaacgctgatagtcctgtctagcttcgcgctcaatcgaacacccagtcagccgaccaccggaacacgcttatgcagacgattctcaacacgtccgacgatcccgcccacgattcgctcgtcgaaaaaaagtccgaattcatcggcgacgctgcccatgtcgatacgctcgacgaggcgctcgcgttcgtggccgcgatccgtgagcagcatccgaaagcccgacacgtggcgtatgccgccgtgtgcggaggcgcggatgggcgactgtccgaacgcatgagcgatgacggcgagccgtccggtaccgccggcaagccgattctcgacgtactcaagcagtccggcaccaccgattgcgtggttgccgtcaccagatatttcggtggcattctgctgggctccggtggtctggtccgcgcgtactcatccgccgcatcattggcgatgaaagccgcccgcgccgcccgcatcatgaccgccaagcgataccgggtccgtctcgaatacccgcagctggcccgattccagcagatcctggcgcagctcggtggcagtcaggaggatgaatcgtatgcggtgaacgtcgaactgaccgcggtggtgccgcaagatgattgcgtgcgattcgaggagcgtgtgcgggaagcgttcaatgccgcggtggtaccggacccgattgacgtggtcaacattccgattccgttcgcgtgacgcctgtatgactaagctgggcatcatgaccgacgagaacaccaccagccagcggacccagcccaccgaggccgcaaccgagactgcaaccgacacgggcgcccagcagcgggaccaaggcgcgcaggccgcagccgagtccgccgctccggtggatttcgaaccgctgaccgctacatacgaacgtctgcgtcattccaccgacccggccgaactgtccgaattcgcccgtcggccgttgcctgaccgtgccgatcaggcggcgttctcccgcgccaccgcacttttggaggctgtggccggcaacccgcacaccccggtggccgatcgcgtgttcctcgccgacaccatgccgttcccgaacgtattggtcaaactctccgaagaccccgaaccgtccgtgcgccaagccgtggccgccaacggggatgacaagaattggctggtcggccgcctgaccaaggatccggtacctgcggtccgggatacggcgttgaaaaacaagcgcaccagctggaagatgcggcttgagggtgcgcaggaccccactgcggatgcggagacattggatttcttgggcgtacttggcaccgaatccgaagagggagcaccggcagtgctttcctcgatggtccgccgtgccgtggcgctgaaccccaatacgtccgaagcgatgcttgccaaattggccaacgacccctcggccgaggtgcggcacgccgtggaaagccgccgctaagcacactattgctgtgttttgccgtgcaaatttggccggcaatcaccctctatccaccattgtgagcgctcacatctcactatgtgagggtaaaaagtacataatttggcggaatcacggcattttgcttacggtgtggcgcaatcaaacggcgttagactggggctatgagtgagattaccgagagtgaagagcgtctggcccgtccgttgattcgactggccaagttggtcggtgtcggcacgagttatgtgggcatgagccatgactaccacgagatagacgatgacgtcctgatcgaggtgctggcagcgctgggcatcgacgcctccagcgagaacgcccaactcatcgccatccgacgcattctgaacgagcgttactcccgattggtggcacccaccgtgctgcatatcgccggtagcgaggaccgggtgctggtgaacaccggcattctggacgtgccttcggcgagcatcacgctggagaacggcgagccatatcagggcaccgttgaagttggtcctggagatggatcccaggcctacgacttggatggcacgttcatttcgaatgcggctgtggtcattcccgccgatctgccgattggctaccatacgctgcacgtcaaggtcgccgaccgtgtgcaagacgccactttgatcagtgcacctgatcgcgtcgatctgcttgacccgatgaagggcggcagtctgtggggctggatggcccagctgtactcgattcgctcctccaactcctggggcgtgggcgattacgaggatctgaagaccatgctggtggacgccaagcagaagaccggtgccgacttcgtgctcatcaatccggtacatgccgccgagccggtgtccccgctcaccccgtcgccgtatctgccggtaagccgtcgcctgatcaacttcacgtacatccgccccgaggcgatcgccgaatatgccacgctcagcgcgggcgacaagaacgccgtcgacggactgcatgccgacaccgaaccgctgaacggtgattcccagctcatcgaccgtgacgccatgtggcgcagcaagatgcacgccctgtggattatcttcaaggccggccgtaccgccgaacgccaaagcgcgttcgaccaattcaaggcggactgcggttccgacttggaggcgtatgccacgtggtgcctgtgctacgacaagtggggagcacccaacggcgaggagagcaactgggagcgcaagttcaaccgcaactccccggaaatcgccaatctgcgcaagcagtacccggacactttggacttctaccgctggctggaatggattgccgccgagcagctgtcctccgcccagcaggcagccaaggacgccggcatgcatatcggcatcatgtccgatatggccgtcggcgtgcacccctccggcgctgacgtgtggtggaatcccgagcgcttcgccaagggagccacggtcggtgcaccgccggacatgttcaaccagcaaggccagaactggagccagccgccgctgagcccgatcaatctggaggccaccggctacgagacctaccgcaatatggtgcatggcatgttcgcccgtgccggtgcggtgcgcatcgaccacattctcggcctgttccgcctgtggtggattcccgagaaccggtcggctatggatggcgcttatgtgtactacgactcagacatcatgctgggcgttctggccatcgaggcctctcgcgccggcggcgtggtcgtaggtgaggacctcggcgtggtgccggaccatgtggccgattccctgtcgagccacggtattctcggttgcgccgttgaatggttcgagcagtgcgacggcgtgttccgcgccccctcccagtggcgtccgtacgcattggcctccgtgaatacgcacgatttgccgccgaccgccggttacctggaatacgagcacgtcaagattcgtgagcgtctgggcttgctgaccggcccggctgaggaattcgaagcctccgcaaaggccgagcaggatgcgatgctggtcatgctggtcgagcagggctatcttgatgccgacttcgccgaacatcgtgaggatcacgaggcggatatcatcgacgcgctgtaccgcgcactgaagggttcgccgtgcaagctgctcgccgcctcgatcaccgacgcggtgggggagaagcgcgcgcagaaccagccgggcaccaacaacgaatacccgaactggcgcatcccgctggccgacgccaagggcaacgtggtaccgctcgaaaccctcttcgacacccccggcgtccaacgcttcgcccaaatcttcaattcctgacccactttacctccctctgacgagccgagtcgttaagcggacagtccagtggactgtccgtagacgaggcctgaacgaagcgatagctgagagaaggcagggaattgcctcaccgtaggcgagtcggttagccgaagtgggtggaagagaaaccataaataggggaagagaagccataaacccaatggagtgtccccagttgccctatgtcaagcccggcgatatactagtggattgttgtgtttccctaaggggtccttcaaagcgctatcccactcgccatcgaggactttcagggagcccacggataatgaggttcgatgcctcttggatgcggccctgaccaagccacgccaagcagctgagacccggaacacaatatagaaaaggtaatccagtgaaaactttcactccgaagccagctgatctgactcatgactggtatgtcatcgacgccaccgacgtggtgctcggccgtctcgccacccaggctgcaatcctgctgcgcggcaagaacaagccgacctacgctccgcacgccgattccggcaaccacgtgatcatcatcaatgccgacaagattgctctgactggcaacaagatgggcaaggaactctactcgcactccggtcgtcccggtggtctgcgtcgtgactcctacgccgagctgctcgagaagaaccccgagcgcatcatcaagaacgctgtcaagggcatgctgccgaagaaccgtctggccaaggtgcagctcgaccgtctgcgtgtcttccgcggcgccgagcacccgcacaccccgcagaagccccaggtcttcgagatcgcccaggtctcgcagcaggccaagtgaaacctgagaggagataagaatcatggctgaaaacaccaacgactcccaggttgtcgagaccgaagaggagctcaccaactacaccaccgagaccaacgctggcgctggcaccggcacctccgcgatcgagccgggctacggcaccggtcgccgcaaggaggctgtcgcccgtgtccgtctggttccgggtgacggcaagtggaccatcaacggccgcactctggaggagtacttcccctccaagctgctg

SEQ ID NO: 512 - DNA, 20322 bp, Unknown
  R48_24m  MAG No. k141_48228
cgttcatctggtcgagcagcatctgactggagacgatgcctccacccagaccggtcgcggccagcgtgtctttggcatactgctcttcggcggcacgacgtgcgtcggcggcggactggcgggccaccgtcttgggatcggggcccagcatatccatcgcttcgtcgagcagcggaatatcggagcgggtcagcggggagcccttggggcgggcaagtgccgcgatgtcgttgtcggtcagccaaccagccagagacttcagacgttcgggatgggcgaacagctgatcgatgagccatggggcggtcatcggcagccagcacaggttcagggtcttgcgaacctgctcgttcatacgtagcagcgacatcgcgcggttcagctccgcctgatccggcgtgtaatcaagctgttcggcataacggttctgcatgctggtcagcatcgaacggataaaggtctcgcgggccttgttatgaggttgtcgggtgcgcttcgcgtccgcctgcgcctgctcgatatcagtggccagcattggtacctgaatgccgctaatggttactgtcggcagagcagcgggaacacgcacgcgtgcggcgatggcattggccactacggaggtcatgcgtcgatcgcccttgagcttggctgcataaggggagtcgaccgccgtggcggtgatgccgggaatcagatcgctgatggtgcgtgagaccacgccggtctcgcccaaggaaggtagcacctgatcgatgtagtgcaggaacgccgagctggggccaacaaccagcacgccggaacgttccagcgtgcgccggtgcgtgtacagcaggtaggcggcgcgatggagcgccacggccgtcttgccggtgccggggccgccctgcaccaccacggcgcgattcatgtcggagcggatgatgcggtcctgctcggcctgaatggtggccacgatatcggtcatcttgccggtgcggcgtgagctcaacgaagccagcagcgcaccctcgccggtcaatgtgccggcggaagacgcctggccgacctggtctgaatgcacgtcaagcacctcatcctcaacgcccacgacttcgcggaaactcaaggtgatatgcctgcgcatcacgatgtcgccgtgattggaaggggtcgcctcatagaaaggacgtgcggcttcggcacgccagtcggtcagaatcggctcatggtccgggctcgacaggccgatgcggccgatgtaatgacggtcgccgttcttggcatcgagacggccaaacaccagccgatcctcaacgctgcgcaattgcgtgaggcggttttcgtacattgtggcaaaggagtctcgttcgctgcgttgcgtgggggatccgtgggagccggcggcgcgtacggtgtccaggcgttgccacatttcggctcgcagatcatccaatcgtccgtaggcgcgatcgacggcctgctgctcttcatgcagctgggaggcgtaactcgacatgctgttctcttcgttccatttccgtggggcagaaaaacttaaggcattcaaatttaccgcacaccccctacgtcagtgatgcggacaactcggaataggtgaattcagcgtgaattcaccatgctgctcggtcggtggggtgcgcgacgtggattggatgtgcggagcgtccattcgtgcgacagtcgtggccgacacgcgcaatccatcggtaattgccctaaaagggtgagcaaatcgtgcatgagtggggagaaatggggaatcgtggggtagagtagtgagccagttggccgaagtgtatcccacgtaacgatgaaggaggtggagccatggttgccgatcagacgattcgcgacgctgatgccaacgcacaaggctccaccactatggccgatctcatggctggtctgccgccattgcttctcggcacatatacgccgaagatcgatgccaagggccgtatagcgcttccggccaaattccgctcccagctggggcagggcctggtcatggcccgaggccaggaacggtgcgtgtacctgctgccgttcgacgaatttcgacgtatcgcctcgcagattcagcgtgtgtcggtgggaaacaaagccgcccgcgaatacctgcgtgtgttcctttccggtgccgtcgaccagcagccggacaagcagggccgcgtgctggtgccgcagatgctgcgcgattacgccaatctgggttccgacgtcgtggtgatcggcgttggcacccgtgccgaactgtggaataaggacacgtgggagtcctacctcgccgagaaggaagagggatattccgatattgctgacgatgtgttgccggaggtggaattctgatggttgatgtggcgaatattcatctgccggtattgcttgacgattgcgtgaacctgatggcacctgccctggaacatgagaacgccatcgcagtggattgcaccctgggccttgccggccattccatcgccttcctcaaggccgcgcctcaggctcggctcatcggcattgaccgtgacagcgaagcgctggggctggccgctgaacgcatggaacgggaggggctcgccgatcgattcatcccagtgcatgccgccttcgatcagcttgatcaggtgttgacggaccgaggcatagaacgtgtggacgccgtattcatggatctgggattatccagcctgcagatcgacgaaaccgatcgtggcttctcctattcgcatgatgcgccgctggatatgcgcatggacgtcagccagccgttgacggccgaacggattcttgccacctatgatgcggcggaactggtccgcatattcaaggaatacggtgaagagcgtttctcgcgtcagatcgcccgcgccatcgtggcgcatcgagacaaggagccgtttaccaccaccgcacagctcaaccgtctggtcgatgaagtggtgccgcaagcccaccgcccggcgggcaatcccgccaaacgcgtcttccaggcgttgcgcattgaagtcaacggcgaattggacaagctcgcctccacattgccgcaagccgcgaaccgactgcatgtcgggggacgactggtggtggagtcctatcattcgctcgaagacaaaaccgtcaaatcgttcatggcacaagggctgcgagtggatgttccggctggcctgcctgtcataccgccggatgcccaaccgtttttcacggatctcacgcgaggtgccatcaaggccgacgaacatgaaatcgcagccaacccgagatcggcttcggtgcggttgcgggcggtggaagtcagccgtgatattccgtcacgatggaggaaacgctttacgcaaaccgcgcagggcctgaatgacatcaagatacaaggctccgcgtctccgggcagagccaaaaacatagcacgaattcgtacaaggaggggataacagcatatggcaaccgcacgtaacattcgattgaacgcggctccggcctcgaaccggccgcacaccaagcatcagtcctcctcccgacctgagctgcgggtagtctccaacccgcgtggagacgagcggggcaatgtcgtcggacgggtcatcgaatggaccagaacaagaagcgcaccgctggtgcacgtggccatcgcagtgatcttcctcgtcggcaccttgttcggcgcgctgatgctgcgtacccagatggtgcagaactcgtttgaggcggcacagatcgaaaccaacatcaacagacttacccaagatatcgaagacgatcaggccaaactcgatcaattggtcgcgaacctgcccgacaaggccagcgacatgggcatggtcccgcagcagggatcagtgtccatcgacttaagcggataccagtccaacaaaggcggaacccagtgaacaccattcgtcgcatcgtagagttcgccaaggtcaagaccttcgcgttcaaatgcattgccatcggcgccgcattggcgttggtggcgtcggcatgcgtgatccagctggcctccacccagctcatcggcggccgtcaaaccgcacaagcggccacggctaaccgcaccctgaccgtgacgttgagcgccaagcgtgggcgtatcctcgacgccaacggctccgtgctcgctcaaagcgtggagcgttatactatcgtcgccaatccggaggctgcacaggagttcgagccgattacttgcaatgacaacacccgtgattactgccacgaaattgacggcaaacccgtgggcgctaccggagcgtcggccgtgggccgactgctggccaaagtcttggatatgaacgccatggaactgggagctgatctgtccggtaccgggcagtatgtgattctgaagaaagacgtgaccccacaggtcaagcgcagcatcgaggcgttgcacctgggcggtattgtctggggtgagctgagcagtgaacgactgtatgcggatggcgatctcatgggcgcgctgcttggcggcgtgaacgacaacggcgatggcgtcgccggcatcgagcaggtcgagaacaagacgcttaccggaaccgatggccatgaaacctaccagcgtggtaatggcggcgaagagattcccggcaccatgaccgaatcggtggcggccaaaaatggcgacgatgtcaccctgaccattgaccgtgatgtgcaatggtatgtcaaaaaggccttgaaggaggccgagtccaagtatggtgcagcgtgggcgatcgccgtggtgcaggatgtccagagcggggagattctcgcactggccgatagcgatgaagtacaggctggtaccgttgcggcgaagatgagcccgtctcgggccgtgtccgaaaccttcgagcctggttcggtgggcaaggtcatctccatgtccggctatctgcagacgggactgcataagatgagcgatcaattgtcggtcccggaccacatcacacagaagggccagacctacaaggactcattcgaccatggcactgagcgctggacgctcgccggtattctgcagaactcatcgaacgtcggcatgattatggccggggagaactatccggatgagcaacgctacgagtacctgaccaaattcggcatcggacaaccgaccggactgaacctgcccggtgaatcgagcggtctgctcaccagcagcccttcggcatgggatctgcgtacgcgcaacaccatcctgtttggtcagggctacaccgtcaacgccctgcagctcaacaacgtggtagccaccatcgcgaacaagggcgtcaagcagcagcagtcgatcatcagatcaaccaccgatgccaatggcaagaccactgagaccaagaagggcgaagccacccgcgtggtggatgaaaaggtcgcatcggacatgatgaatgcgatggaatcagtggcggagagctacaacaagttcatcaaggtcgatggttaccgcatggccgccaagtccggtaccgcagaggtgcagggttcggatggcgcgctctcgtccattctctccgattattccgtggtgattcccgcggacaacccgcgctatgcggtcaccgtggtgctgaaggatccgaatggtgtgttcggcggtctgacggccggccctgtttccgcacagatttgtgagttccttatgcagaaatacgaggtgcctgtctccagtccacgaaaaaatgctattccagtcacgtggtaaggatcaggggagaaaggcgatagcccatgagtgcagtgagcgaatccatcgcccagcgggtgaccttgggaatgctggtcgaacggtacggttttgaagtcgatccacccttcgccaccaatgtcaccattacctcactcagcgatgccgtggataccgtgattcccggctcgctgttcatctgcacgcatgagcaggaacccgatgtgctgcatgccgcgcaggcaggtgcctatgcggcgttgctgccacgcgcgtccaaagggcagatcgccaatgccgatataccgttgctctacggcgatttcgacgatcgcgtactcggcgatctggccagcggcctggccggcggaccatccaacgccatggcggtgttcgcggtgaccggtgcggatgagcaggccgttgacgcaggcgtgtcccagctctccgaattcctgcacatgctgggcaatccggtggcggtaatcaccgcatccgggtccacgtcgatgacacgtaccatgaacctgaactatcctctgggcatcctcgatatgcagcgcgcgctgtccgtgtgcgccgaagacggtgtggcggccgtgatcatcgccatggatgaccgcacattggccgagcatgcgttggaatcggtgaacgtggatgtgctgggcacggaagatgtcaacgcaagcgcaagcttgaacgaattgaagacacgctacgcattcgttgcggaacatgacatgtccatgacctcgtcgacacccgaatcggatgaaatggctgcggattcaccggcaatgtacgaccgcgtccgactcgggcacatgtccttggccatcgccatggtactggccgccggcgtgaggaaaaacaacatacgcagtgccctgcatgtggccaacaatctcaattaagtccgtggatgcgggacgaagcgtaatcgtaaaggagtttgaaacaccatggttccgatgagtgtggaggagatcgccaaggccgtcgatggtcgattgatcggagacgccgattccgagtctcgagccaccaatacggtcagcgactcgcggcaggccggccccggatcggtgtttgtggccatccgaggcgagcgtgtcgatgggcatgactttgtggcgaaaaccgctgaacagggagccacggtggccatcgtcgaccatgaggtggagtccgatggcctgccgcagatcgtagtgaaagacacggtcgacgcccttggcgagctcgcccgacacaacatcgttcgccgccgcgagctggacggcgacttcgacatcatcggattgaccggttcggtgggcaagaccaccaccaaggatctgctctcctccctgcttgccaccgtaggcccgaccgtggctccggtgggatcgttcaacaatgagatcggcctgccgctcactgcgttgcgggtcgatgagcacacccggttcttcgtggctgagatgggtgccagccatatcggcgaaatcgcgcgactgacccgtatcgcaccgccaaacacggcaatcgtattgaaggtcggcgtcgctcaccttggagaattcggctcccgcgaacgcatcgcacaggcaaaaagcgaaatcgtgcagggactgcttcccggaggcaccgcggtactgaacgccgatgacgaacacgtggttcccatggccggcctggccagcggcgatgtgctgtggttcggcttggggtcgtcgcaggagcccgaggtacgggccattgatgtcactgccgaccggtccgatcatgctgaattcacgttggtcgatgcggacggcaaccatacgccggtgcatctgggcattcctggacgtcacaacgtgatgaacgcgttggccgccgcaaccgtggcgatgcgttacggtatggcacccgaaacggtggcgcggattctggcctcgcagcacaccatcagccctcatcgcatggcattgtccacggtgaatcgcgaggggacttccttcacactgatcgatgattccttcaatgccaatcccgactccatgaaagccggcctgaacgggttgaaggcttggaactcaaatgacggcaaggagccgttccgcgtggcgctgctgggtgccatgctggaactcggcgccgatgaaacggcattgcacacctcgatcggcacgtatgcggccgaattgggcatcaacgcgatcatcgcggtcggttccgcccaagaccagcatctcgatgcactggcacaggctctggcggacggtgcccgtcagagcccatccgcgtcggtggattgcgtacacgacatcgatgcggccgaacagctggtcgtcgacttggcgcgcaaccatcccgacgctgtggtactgctcaagggatcgcacgcgtcaggcctgagcgctttggctgaacgctgggcaaagaactgacccgataaccaccccaagaaaccgacaagaaagagaagctgcacgtgattgctctgatcattggaatgctggtgtcgctcatcgtcaccctggtcggcaccccgctgctgattcggctggtccacaagctgcactatggccagtacatccgccaggatgggccgcagtcgcatctggtcaagcgcggcacccccacgttgggcggcgtggtcatcaacttcgcgattctgctcggttgggcatcctccgcactgtaccgatacctgcgttcggacgacgtgccctcctggtccgcggtgctcgtactgttcgccatgctgtcgatgggtctgctgggctttatcgacgacttcgccaaggtgcgtaagaagcagaacgaaggcctatcggtgaccggcaagttcattggccagttcatcttcgccaccatctacgcggtgctggcgctgctgattcccaccaaatcgggtttccccagtgcgcaggcgggcatcagcttcatcgaacggccgttcttcaacttcgacttcgccggtcgaaccgtggccatcatcctgttcgtcatctgggtgaacttcctgatgaccgcatggaccaacgcagtgaatctgacggatgggcttgacggtctggcggcaggttcgtcgatgatcgccttcaccggttttggcatcatcgcattctgggaaagctaccacatcaagggcggcagccatggcggatattcctatgccgtgtccgatcctctcgatctgaccgtcatcgccgtatgcgcggccgtcgcctgcttcggcttcctgtggtacaactcgaaccccgcatcgattttcatgggtgataccggttccctggccttgggcggtctgttcgcagccctgtccatcgccacgcacaccgaattcctggcggtggttctgggtggactgtacgtcatggaagccatgagcgacgtcatccaggtcgggtacttcaagatgacccacaaacgtgtattcaaaatggcgccgatccaccatcatttcgaactgaagggttggaccgaaaccaaggtggtggtgcggttctggatgatcgaactcatcttcgtgctgctcgccctgacgattttctacggcgactgggtcacccgctccggcctgctgttcagctagcggaaatctgggtggattatgctcacccacggaattcctatatcaggaggaacaatgcaagtagcggataagacagtggcgatcgccggactgggggtatccggcacctcgttggcggaggtattgagggaacgcggcgcccacgtgattggcgtcgacgagaggaagcccgaggctgatctccgctcctttgatgacgtggactgggaccacgtggactacgtcatgtcgtccccagtgttcaacccccgtaccccatttgtgctggaagcccaacgccgtggcatccccgtgatgagcgaggtggaattcgcatggcaactgcgtgtgaataacgagcgcaccggtactccggctccatggatcggcatcaccggcaccaacggcaaaacctccaccaccgagatgacctcggaaatgctcaccgcctgcggactcgacgcgccgaccgccggcaatatcgcctccggagacatgagcatgagcctgtctcgttgcgccaccaatcctcagcacgacgtactgtgcgtggaactgagctccttccaattgcacttcaccgattcgctggcacttgactgcgcggcgatcaccaatatcgccgacgatcacctcgactggcatggcgggcgagagaattacgccgccgacaaatccaaggtgttccacaacgccaaacacgccatcgtctacaatgcgcaggacgccaaagtcagcgaactggcggccgaggcccaaaccgccgaaggatgccgcaaggtgggattcacgctcgaggccccccaggccggtcagatcggcattgaaggtggctggattgtggacaggagcggcgtggccggcggcgcagtgggggagccggtcagactggccgccatcaccgatttcacgcatctggcagagccggacggctcactgtacccgcatctggtggccgatgcattgacggcattggcgttggtgctgggacttggcgctgatcgcgataccgcgctgaaggcgcttacctcgttcaagccgggcggccatcgcatcgaaaccgtggctgaggccgtagtcgagggcggctctgttcgtttcgtggacgattccaaagccaccaacggccatgcggcacgcgcctcgctgtccagcttcccggccaagtctgtgatctggattgccggaggtctggccaagggcagtcgattcgaggacctggtcaaggaccaggcacataccatcaaagcggccgtcatcatcggcaaagaccagcagccgatggtcgaagcgtttgccagccaagctccggacatcccggtgaccatcatcgatcccgaagacaacgataccgtcatggatcgtgccgtcgaagcctgcggcacgtatgccgccgccggcgacattgtgcttatggctccggcctgcgcctccatggaccagttcaagtcctatgcggatcgaggcaatcgattcgccgccgcagccaagacgtggagcgaggtgcatggcctccactgatatccataagcgtaaggcatacagagcccctgacaagcccgcactcgaaatcaccgactacacgggttggcgaagcttgctcaacccgctatggtgctaccacggattccgcatggccgtggtggggctgacatgcttcggcctgatcatggtgttctccagctccacggtcaccatggccgcactgggcaagtcgccgttccttcagcttctgaaccagggcgcgttttgcctgatcggcttggtgctgggcttcgtggcattgacgatgccggtgacgttctggaaacggaccggcgtgttctttgtggtgggtgcctgcctgttgcaggcgctgacctttactccgctgggtctcgacgtctacggcaacaaaggttggctgaacctcggcttcaccactatccagccggccgaattcatgaagttcgcgatatgcatatggctgccctcgtcgttgcatgcctgcagcaagatgtaccacaagaagggaatcaaagcatatgccgcgccgttggtgttgtatgcgataggcgtggcgctggtgatgggcggcaaggacctcggcacggccatgattctggtcttcatcggaggcgtggccttcctgatcgtcggattccccagtaaatggatgggagtcggcgtattgggcgcggtggttatggtcggtgcattggcggtttccagcccgaaccgcatgcgtcgtattctggccacatatggcgattgctcggccgctgacgcgcagagcgtatgctaccagtccattcacgccaagtacgccatcgcctccggaggctttctgggattgggcatcggcaattcgcgagagaaatggaattacctgccggccgcccataacgatttcattttcgcgatcatcggcgaggagaccggattcgtcggttgcgccatcgtattgctgttcttcgcgattctcgcctggtgcatgatcgtcatcgcattgcaggtcaccgatcgttatgttgccatggtgctgatgtgcgtcgccatttggatcgtgggccaggccatggtcaacatcggcgtggtcgtgggtgtgttcccggtattgggcgtgcctatgccgttcgtctccgcaggtggctcatccatgattatgtgcttgacggcggccggactggttgtgggacttatgcgctctcaaccgcagataaaacagtcgcgtcagagcgcgtaagtagactcggtaatcatgaatcaaggcacaccacatatcgttcttgctggcggcggtaccgccggacatgtcaatccgctgctcgcggtcgccggagcgattcgcgacatcgaacccacggcacaggtcaccgtcatcggcactgcggtgggtttggagaaggatttggtgcctgaggccggctacgagctcgacaccatcgaaaaagtgccgttcccgcgtcgccctaacctgtacatgcttcgcttcccggcaaaatggaagcgagaaaccgccaaggtgcgctccattcttgaaacgcggcatgcggatgtcgtagccggattcggcgggtatgcttccgcccccgtctacgccaccgcacacaagatgggcattccgattgccatccatgagcagaatgcgcgtgccggcatggccaataaactgggcgctcgttgggccgatttcatcggtaccgtgtacgaaggcaccggtctcaaaccgcgtgccggagccgacgtcgagcgtgtcggtctgccgttgcgcccgaccatcgcctccctgaccaaacgcatcggtgacgatcgtgccgccgtacgccgtgaatcggccgcgcagcttggcgtcgatccgaaccgtccgctggtgctggtcactggcggatcgctgggagcgcaaagcctgaaccgcgccatcgcctcctccgccgcagacctgttggcccacgcacaaatcatccacttgaccgggcgaggcaaaatcagcgaagtacgcgaactggtcacggcctcggccggcgcggacgtgcttaccggcatcggccccgaatcggccggacaaggtgactaccataccgccgaatatctggaacgaatcgatctggccttcgcctgtgccgacttggtgatttgccgcgccggagccggatcggtatccgagctggctgcactgggtctgccggccatttacgtgccgctgccaatcggcaacggcgagcagcgtttcaatgccgagccagtggtgaacgccggcggcggccttctggtcgcagacaaggacctgaccccgcagtgggtgcatgagcatgtgcccgatctgctcgccgatcacgaacgacttgccgaattcggccgcaaggcatgggaatacggcatcagaaacgctgccgaaatcatggcccggcacgttctgcaattagccgaaccatccaaatagtattcagatatcatcccgtgcgcgatacagaccaatcccgtcccgcaacacgagatacggtcataatatagggtgctggaatccccaaaggagttttgaattgtctcaagatcagcccatcgtgcttgaccccacgtatgcctcgttcgatgctgcggcccgccccgcggatctcggcgccacccatttcatcggtatcggcggcgccggtatgagcgttctggccgaaatgctgcacgccgaaggagtcgcggtggacggctccgatcgcgcacacagcgccaaaaccgaccgacttgaaacgctgggcatcaccgttgaattcgggcagcgagccgaaaatgtcgcccaggccgagaccgtggtctactccagcgccatcaaaccggacaatccggaaatcgtcgcagcacacgcggcgggcaagcgtattgtgcatcgcagtgacatcctcgccctgctcatgaacggcaaacgagccgtcaccgtggccggagcgcatggcaaaaccaccaccagctccatgctgtcccacattctggtgaacgccggtgctgatccaagctacgccatcggcggctttatccaaggcccggacggcaccacgctggacggtggacacgcgggcaaaggcgatattctggtggccgaagccgacgaatcggacggcagcttcgccaaataccatccgaccatcgccattatcaccaactgtgaagccgatcatctcgaccattacggcgacgaagcccactaccgtgccgcgttcgttgcccacgccggccgggccaccggtcacgtgatcatcagtatcgacgatcccgacggacttgccgtgctggaggccatgcccgccgacgtgaaatcccataccgttgcctacggcactaccgcgcgtgaatccctgcccgatttgggcggtgccgcgtatgtctggatcgcttcggaaagcgagaccgcaggcagcggcgtcgaacagctcaccctgcatctgccggccgcggtgacggcgggggagccggtgtctcagagcgttgccctgaaggttcctggcgtgcacaatgcgcgcaatgcggccgccgccatcagcgctgccgtgctgctgggcgtgagccccgcagacgcggccaaggcggccggcacattcctcggtgcggcacgccgcttccaggtgcgcggcacggtcaagcaggtcactgtagtggacgattacgcccaccatcccaccgaaatcgcggccctgctggatgcggcccgacgccggtaccccgattcgaccattcgtgtgatcttccagccacacctgttctcccgcaccaagttcttcgcgcaccagttcgccgaatccttggccaaagccgatgacgtcattatcaccggcatcttcccggcccgtgaaaagcagaccgatttcccggacatcagcccctccaccatcgtggacgcggctgagggactcaaggacgcttccgcaggcacgtggattcagccggtcgaggatatgtgcctggccgccaagatgatggccatgcgtgcccaccacggcgacgtgatcttcaccgtgggcgcgggcgacatcactgacatggatcaggtgctgctcaccgcacttgaggcccatcgggaaagctgcgagtgatgtccgggcgcacggtcagatccgggggcaatgacaacggctcacgtcgttcgtccggaagtccccgcaagccgcgcaccatcggttcacgcggaaacacgggtcactcgtcgaagtctcgcgctccccggtccgtgtcttccgggcatgagatcgacgagccggagatcatcgacgatgtgacggtagccaagggccaggccggtgccttcgtcgatgcacgacggctgcacagcgaggattacgttgccgaaacgctgcaccagaccaccggctccctaggagtcgtatcacgcccgaaagtggtgaatttcaccgaacgcgccaaagaacgcaagcgtgcgaacgtacgtgtcgttgcgttacgcgtgttgattgctgtcgtcagcgtggctgtagtgacggggctaacgtggctgctgctcttctcgtcggtgtttcgtctggaaaccagcgagatcggcgtatccggtgccaacgaatgggtgagcgcgcagaccatccatgccatcgccgataagcaggctggaaagtcgttgttcctggtctccacccatgaggtcacagagcaactcaaatccattcccggcgtcagcgaggccaaggtctccaaacagttccccaagtcgatgagcgtggaagtcaaggcgcaacggcctgcggccatgctgaaaagaggcgataccctgaccgcggtggattcccaggcgcgtgtgttgaactcggtgaagaacgccaacgtggatggcatcccggtgatcgaggtcaaggatatagacgccagtctcaagaaccgttcggtgaaggaggcgctggcgattctgggcgcattgccggaatcgatgcgtaagtccattaccaaggtcaccgctgagacgcaggattcggtgaccaccacgcttaacgacggtgaccgcgtaatcatttggggagactcctcgcaactgaagctgaagctggcggaagtcgaggaaatcgacaagaacatcaccgctggcacggctggctttgccggcaaacatcagattgatgtttccgcatcccagaagcccatcatcaagtgacggcgattcagttggttccgttggttccggggcggcgttcgctccgttggtcctgctgacaacgttggtcccgtcaatgccggggcgatgttcgctgccggcgatttgcgcgagtagcgccatagggtgtatgctgaaaagtccggctgaaaagccggaagtttgataactcaagattgggggcgatcggtttcgacggtgacctgttcgctgcagggaagcgtgccgagaacgccgggtccgctcgtggatgaccccggcaaaagaataagtgctaaatctaaccgcactgagttcgctctcgctgcctgattttagtcaggattaaccagtgagcagccgctccgttcactcctcctcgtctttgggaggatgctgagcgtcgtttagaagacttgctgatgcagttgagcctcagggctgcatcgggactttaactgcggatatgctcgccatcagttgtctgcgacatcgatgggggcagaaaaatcgccaacttggccagcagactacgcacgtagaagactgtgggctcggtcatcggaccggggttcaattccccgcgcctccaccaatccgtttcggcggaaacaagccgcttggccttgcgggagtagggctgagcggcttttcttattcccgccgattccctcggtttcacgggataatgtgggcaaaatgtgggcaaaaatcgagcccgcgaagccctctgccacaacgcgagaacggccccgaccggcaagtaggccgactcgggttgagtcgtctgcgatgccggacggggccgaactgtgcgtggtggtcatgcggcgaggtcgaggcgctgtttgatggcgctgacgccgatgagcgcgccggcgaggatgccgagcgcgttgagcgtggtcactatcgcgtccacgtgagtccagccccatgcggggccgaccgtactgacgaacagggcgagtgcgggcaggacgatgaggcccaaccatttgaggatgtcgtagacgcggctggggattgcgcggttggcttcgatccgacgacctgcggttttggagaccgccgctctaccagctgagctacgcgcataggcggtcatgccggttgattgccatggcacatgaccattgggtggatatgagtaaagcccctgaaccggttgattcagaggctttcacactaatcctgatacggagtatgccacgggggggattcaccctactcccgcttgtgttttgttttttcaggcggcttggatggtgaggcgtccgccgagggcgtggattaccttggcgatggtctggaagctggggttgccgtccttgctgaggctcttgtagaggctttcgcgccccacgcccgcgtccttggcgatctgggtcatgccccgggccttggcgacgttgccgagcgcggcctgcatgagtgcggggtcgtcgtattcggctatggcgttgaggtaggcgatgatgtcctgttcgttttcgaggtattcgctggtgtcgtagtcggtgaattcggtgctcattgtcgttgttccttgtagtcgttgaggatgtcgtgggcttgtctgatgtcggtctgctgggtgcttttgtcgccgcctgcgagcagcagcatgagcacgttgccctgcatggcgaagtagacgcggtatccggccccggtgtggaaccgcatctcgctgaccgggcctcccgcgggtttgatgtcgccgaatggcctgcctgcgagcttgcaggcatcgagccgggcttggatggaggccttcgctttgtggtccctgagtttcttgaaccacttgcggtattcggcggattgcttgatttccatacctctattgtatcctacagactacatcatgtcaagccgaatggccgctggagcccatagccaacgcaagaatctcccgtatgttgaactcccagtagccgtcatcgacgggtctcgagctggggagtttgccccggttgagccagttgctgatccgcttgcggctgacctcgtacccgtagtttcccttgagccattggctcatgcctgccggtgtcttggtcaggtgtattgcctcggcctcggcttggctttgctcgcgcagctcctgcacgttgatgggattgccgcacctgcacaggcgcagcgcctcgcccttcgcggccatcacttcgcgtctgcattcggggcagacgccgattatcctgcgggtgcgcggcctgcggtcaaccttggcagagcgtccatggtgcctcgacctgctggctgccgcagtattggcatggttcggtggtgatgactgcacacgttgtactgtagggaaccatgaaagtcgtattgcaacgagtatccgaagcgtccgtggacgtggtcaatgaattgggcacgctggatcccacgttcgagccgcagcagattggcccgggattcatgattctggtgggcgtcaccgatgaggacggcgacaagcagatcgcctggctggcccataagattctgaatctcagggtgttcgaggatgcgcagggcaagatgaaccgttcgatccaggacatcggcggggagattctctccatctcgcagttcacgctgttcgccgacgtgcacaagggcaatcgcccgagcttcatcaaggccggcaagcccgagcatgccgatttcatgtggatcaagttcgacgaggcgttgcgctccgggggagtgccggtgaaggaaggtcgtttcggtgcgcatatgcgggtcggactggtcaatgacgggccggtgaccatcgtcatcgacaccgagcgtgacatgcctgacggaacacgctgaattgcgatagtaatttgacatcatatcccgttccctccaatatgttactaaagcgctttagtcttctgcgggcgagggcgcatgtcgatatgtttcccatgaacgggcagcacaatgatgtggccgcacaagcggcagagataaggggagtgaacagcagatgttcctgaaacctgaacagcaactggagcggtgcaagcgcatagtgcgccagcgcgtggaccctcatatccacccatcgatcgcacagcttgcggtggagtcctttgacattcccggagagccgatgcccactgacgagttcttcgagaagctcaatcgaggtgacatcgacttcaagccgtttacgctcggcggtgaatggggcaccacatggggcacagtctggttccgcctgaccggtaccgtgccggccggctacccgaaaggcaagccgctggagctcatcctcgacctcggctggtacccgcactcctgcggcggccatatcgagggcctcgtctaccgtgccgacggcaccgccatcaaagccgtacacccgctcaactattgggtgccgttcatggatgctgagggcaacgcgcaagtgccggtcgccgaagacggcagcttcaccctgtacctcgaagccgccagcaacccgctgctgctcggcgtgcctccgttcattgagaccgaactgggcgaccatgccaccggcaagccggacgagccgtacgtattcaagtccgccgatctggccgaattcgatgaacgctacgagaactactccgtcgatctcgacgtggtgagctccctgatggaattcgccgacaaacagtcgccgcgctactggcaactcgccaaagcattgcagcgttcgctgaacgcctacgacgagcgcaaccccgaatccgtggaagccgcgcgcgcagcactcgccggcgtactggccaagccggccaatgcctcggccatgaacgtcagcgccatcggccacgcgcatatcgactccgcatggctgtggccggtgcgcgagacccgccgcaaggtggcccgcaccgtatccaacgcattggcgctgatggacgccgaccccgacttcaaatacgcgatgagctccgcccagcagtacgcctggctggaagaggatcatccggacatcttcaagcgcatgaagcggcgcatcgaagaaggccggttcatcccggtcggcggcatgtgggtggaagccgatggcatgttgcccgccggtgagtcactgatccgccagattgcatatggccgcaaatacttcaaggaacatctcggtgtggagcccaagggcgtatggctgccggacagcttcggctacaccggcgcatggccgcagatcgcccgccgtgccgggtacgaatggttcctcacgcagaagatctcgtggaacgataccaccaagttcccgcaccactcgttcatgtgggaaggcaccgacggctcgcgcatcttcacccacttcccaccggcggatacttatgccgcttggtgcaaggttcaggaactcgactacgccgagaagaacttccaggacaaggatctctccgaccgctcgcttctgctcttcggtttcggtgatggcggtggcggccccacgcgcaacatgatggagcacctgcaccgctacgagaacctcgaaggcgtctccaaggtgagcatcgaagagccgaa

SEQ ID NO: 513 - DNA, 6906 bp, Unknown
  R48_24m  MAG No. k141_48384
acttcggcggcatgctcgtaaaggcgcgggatacggttgcgcaggcaggtgaagatctcgtagctgatggtgtcggcggcgcgggcccaatcgtcggcggtaggctcaacgtaatcctcgccgcgtcccgggccgaacagttcgaccgtgtcgccctcgtgaacgccgagttcggcggcggatccgtgcaggtccacgatgaactggtccatgcacacgcggccgcacacgcggtagagcttcggaccttcagtggtcatgatgcgcaccgggccgcccggcttctccacgtgcttggcaccttccatatcgaaaccggaagcggagcggtggatgccatcggcgtagcccagcggcacaatagcggtcgaggtgttgtccggggtcaggtaggtgcggccataagagatgccatggccggcctccacatccttgaccgtgccgagctgcgcctgcaggcgcatggccggggtcagatgccagtcgcgcggggtgcccatcgcgggatcgggctcgtagccgtacaggccgatgccggggcgggtaagttcgaagtgaatctccgggcggtccaaagtggccgccgtgttggccaggtgacggatctccggcggaatgccggcctgttccatgcggcgcgtgaagtccttgaatgtttcgatctggcggtcggtggaggacacgaattcgggcacatcgggcgaatcggccacggcgagatggctccactgacccacaatatgcaacacgccctctttggcgagcggcacgagtttggcgagcgcggcgtcgaatccggccggcgtgaaaccgttgcgaccgaagccggaatcgaccttgacgtgtacgcgggcgggcttgccgagcttgcgtgcggcggcggccacggcatcgatgccgggcagggagccgaccgatacgtcgatatcggcagcgatcagctcatcgaatggcgcttcggtgccgttgtagacccaagtcagaatgcggcaacggtcggggccgatgccgagtttgcgcagcagcagtgcttcatgcgattgcgcggtgccgagccatgtcgcgccgccggcgagcgcggccagtgcggcgggcagcagtccgtggccgtatgcgtcggccttgaccacgcccatcaccgccgtgccggagttcgggccgccgaccacggagaccaggtgggccatgttgtcgcgcatggttttgaggttcacgatggcctgtgcggggtattggcggcgggtggccgcatagttggccttgccctgctcggacgagaatgcgatttcgggtgctgcgttcatgctcataggcacctattgttgcgcaggaatgtgacgtgtggtcacaatcgtttgttttcgcccggcagtcgtacactaatgaccgatatgcggtttctcggaagccgcctttgattcccggcgttgaggcgtgccgggatcccggaaatccgtccggtctagccccatatcttaagtttcatgagagaagaacatggatctgtttcgtaagaaaagcgtggatcagcttgtcgccgaatccactcccctgaagcgcacgatgcgcaccttcgatctgacgatgctcggtatcggcgcgatcatcggcaccggtatcttcgtgctcaccggcaagggcgcgctcaccgccggcccggccctgtccgtatcgttcctgctggccgccgtctgctgcggtttcgccggcctgtgctacgccgagttcgccgccatggcaccggtgtccggctcggcctactcctatgcctatctggcgttcggcgagctcatcgccttcgtgatcggctgggatctgattctggagtatgctctgcaggcggccaccgtgtccgccggctggtcgggatacttcaacaagttgttggaaggcttcggactgcatctgccggtcgagctgaccgccgcctacggcaccaacccggacgtcaccacctacttcaacctgcccggtttcgtcatcgtgctgatcatcacgtgggtgctctcgatcggcatcaaccagaccaagcgcaccaatgacgtgatggtgctcatcaagctcgccatcatcgtgctgttcatcgtgtgcgccgtgtggtatgtcaagccgtccaactggcagccgttctccccgtacggcatctacactttccagcccggctccacccagccgtacggcattgtgccggccgcatccatcgtgttcttcagcttcatcggattcgacgccgtgtcctcttccgccgaggagaccatcaacccgaacaagacactgccgcgcggcatcctgctgtccctggccgtttccaccgtgctctacatcgtcatgaccatgatcatgaccggcgtggtgccctacaaggagttcgccaagtacatcgacgccccagtggccggcgtgattctggagaccggcatgaactggctcgcggtgatcgtgaacctaggcgccctcatcggcatgaccacggtgatgctcgtacagctgtacggccagtcccgtatctgctacgccatgagccgtgacggcctgttcccgaagttcttcggccacgtgcacgagaagtaccgcaccccgttcaagggcacctggttcttcggtctgctgaccgcgttcgccggcggcttcatcaacatcaacgtgctgttcgagctggtgaacatcggtacgctgtccgcgttcatcatcgtgtcggccggtattctatggatgcgcaagacccagccgaatgcgccccgcggcttccgcgcgccgggcgtgccggtcaccccgattctggccatcgtattctgcttcgtgctcatcgccggtctcaactgggagacctgggtgcgtttcgccatctggttcggtctgggcctgatcgtgtacttcggctacagccgcaagcgctccaagctcggccttgagcagaaggccggggctgacaccaaggtcgctgcgactgaggactgaggtctatcggctgaccgatagtcgatggctgctttcgtgaaaaccgtacgctgagttactttcagcgtacggtttttgcgatatgcacgagtttgaacgggcggccgacggaccgtacgtgcgcgacgacgtggaccttacctgaccagctccaccgcggaaccgaacacgctggcgacagccacactcaccactcgtggcgctgataggcgattctggtggtgtcgaccggccggtcgagcagctggatcaggccgcaacgggcgaagccggagctttcgagcacgtgctgcatggccttgttattggggtgggtgtcggcgcgcacgttgccgtagtgcttcagggcccacctgatgcagtcgcgggccgcgtggcgcaccagaccggatgcggcgatgcggtggatggtcacataggtgtcgttgtccagccaggcgccgtcgattttggcgtaggtcggatccttgcccgggcacagggcgaactgggccagaatgcgttcgtggccattgcaggtgtcgaccagcagcatcgtacgctggttggcgatgtcgtcttcaatcaccgattcacgcggaaattcgttgccccactgggtggggttgccgttggcggccatcaacgcgcgtgcgcgtgcgtagattttctgcatctgcggcagatcgcgcatggtggcgtggcggaaacggcggcctgtcgccttgtttgcagcgttcgactgagtcacttctcacctctccgacatgccgggttgccggcacggtgaccggcgactaactgacggccaacctaccatgccgtaggcacaagaaatcccgtccgcgttgcatgacggacactaataaacaatggcttccgtccgcaggagccggacagtccagccgagttgaggacagccaccctcagtcggcttcgcccccggctcccgccagcgggagccgaatcagaattgaatcgaatcagacgaatcagacgaccttgcgctcgaacgggtcggagctgatgccttcctcaaggatctgcttggcccattccttggcggcgaacaggctgtggtcgcgatagttgccgcagctcttctcggtggtggcgggcacgtcatcccatgtggccttgtatgcgatgaactccaacgattccttcaacgccttggccacatcctcggtggagtgggtgccccaggtcagcaggtggaagccggtgcggcagccgaacggcgagcagtcgatgtagccgggaatgcgttcacgcagcagcacggcgatggtgtgttcgatggtgtgcaggccgccggtggggatggcctgctcgttcggctgggtcaggcgcagatcgtaattggagatcacgtcgccgtgagggcccgtttcggtgtcgatgtaacgcacgtacggcgccttgaccttggtgtgatcaagctggaatgattcgacgacgggcttttcggccttgtcttctgccatgctgttgcctttctacttgctgagtgttcggtcatgaagtatcgaacagtcatcgtagtcgcgccagcccaagaacgcccgcaaatactccgcggttcgctataggagattgttatgacgcactcccggcattgaacgaggcgatggtttgcatgaagcgctggccgtagaggtcgagcttgtgttgaccgacgccgttgaccgccagaaattgcgcgttggtaaccggcttgatgcgggccatgtcgcgcaaggtcttgtcggagaacacgatgtacggcggcttgccgatttcctgggcgatggtgcgtcgcagttcgcgtagcttctggaacagcgattcctcgtcatcgtccgggatatacgagcccagcgcatcgccgggaacattggcggaatcggcagtatcagccactcccccgctccgaccggaaccggccgccgccgacttgcgttccacccgtttgatctcatagtggaagtcgggagcggcggtttcggccgcccgcgcaccgaacatgacgattggcatacgcccttcggcgattgacaggtacccgtccgtggccatctggctcaacacgtcgcgcacgcgagcctcgttcacgtccttgagcatgccgaaggtgggcatccgctccgggttcagccatgccagatcctgtgcccgcgaaccgcgcaggatcttgacgatcttgccggaaccgacgcgctgccccacgtcatgcacgcaacggctgatcgcctgcgccacgcgggtcacgtcgatggtctcgaacgtgctttcgcagttcgagcaggcaccgcatctgccggactgcgaagagtccgccgcaatgtcttcgcccgccgtggaaccagcattcgacgacaattcctgaccgaaataccgggtcatataccggtgcaggcagtcggtggtgcggcagtagccgaccataccgtccagcagccggcgcttggactggcgaacgatctcctgctcttcgggagtcaatcgctcgttctcataatcgttatccagcaaccgacgccgggtgacgatgtctgactcattccacagcagcgtgcatcggctgggctcgccgtcacggcccgcgcggccggcctcctgatagtaggcctcaatggattcgggcagattgtggtggatgacgtaacgcacgttggacttatcgatgcccatgccgaaggcgttggtggccacgaccaccggcaccttgtcggtgatgaagtcgcgctgggccacctcacgcgcgtccggcgacatgccgccatggtaggcgacggccggatgccccatctggttcagcgtgtcggcgagcgcttcggtggtcttgcgggtggcgcagtagacgatgccggattcgtccggatggtcggccacataccgcgccacccatgcggccttgtatttggtctccagtttgaccacatcaaaatacaggttcggccggtcgaatccggtgacggtgacggccggattccgcaatcccagcagtcccacgatgtcccggcgcacccgttcggtggcggtggcggtgaacgcacccaccggtggacgctgcggcagcccggcgatgaaatcgccgatacctaagtacgacgagcggaagtcctgaccccactgggaaacgcagtgggcttcgtccacggcgatcagcgagatcggcgtacgggcggcaaagtcgcggaatcgcccggtttccaagcgttccggggccacgtacagcagtttgatctgcccggcggcggcttgggcgaacaccatcgcctgctcgtcgggagtttgagtggtgttgatgaacgcggccggcagaccgaggtcgttcagcgcatcgacctggtcgcgcatcagggaaatcaagggagatacgaccagagtcacacccgggctgagcgcggcgggaatctggtagcacacggacttgcctgcgccggtgggcatcacgcccaagacatcgcgtccggcaagcaaagcctcgacaattccttgctgtccgggcctaaacgagtcatagccgaagtatcgtgtgagcgcctccagcgccgcctgatgtgctgtcataaacgaccagtgtaggccgaccgcggatggatttcatcgtataacggaatacctcgtaacgatgtacgtagcccttccgtattattatgcgtcaagaaacgttattcccggcatatcacacgatatgccgctttgagagaactaagacggggcattttatggccaacgatacattttccttctcctctcctgacgatcaggagacggcggtgctgcagcctgtggccgccgatgggctgttcgcagccgcggcttcaggtaccgccacgccacagcaaagcgacaatggcaccaataaccatgccgaccatacagcctatgtgggtgaacatgttatggcatctaccaccgctaaatcacatggcaaggccgcacggattgccatcataaccatatttgcagtgttgcttgccg

SEQ ID NO: 514 - DNA, 17678 bp, Unknown
  R48_24m  MAG No. k141_48765
atcggccacggcgccctcgccgagaaggctctcgtgccggtgctgccgagccgtgaagagttcccctacgccatccgccaggtctccgaggccatcggttccaacggttccacttcgatgggttccgtgtgcgcctccacgctgagccttttggctgccggcgtgccgctgaaggccccggttgccggcatcgccatgggcctcgtgtccggcgacgttgatggcaagcacatcttcaagaccctcaccgatatcctgggtgccgaggatgccttcggcgacatggacttcaaggtggccggtacttccgagttcatcactgccctgcagctcgacaccaagctcgacggcatccccgccgacatcctggccgccgctttgcagcaggccaaggaagcccgcgccacgattctcgaggtcatcaacgagtgcattgacggcccggccgagatgagcgagttcgctccgcgcatcatcaccaccaccgttccggtcgagaagatcggcgaggtcatcggcccgaagggcaagatgatcaaccagattcaggaagataccggcgctgaaatcgccatcgaggatgacggtaccgtcttcatctcctccgagggtggcgaggccgctaagaaggccaagtccatcatcgattccatcgccaacccgcacgtgcccgaggccggcgaaacctacaacggcaaggtcgtcaagaccacgtcgttcggcgctttcgtgaacctcacccccggcaccgacggcctgctgcacatctcccagatccgcaacctggccaacggcgagcgtattgacgccgtcgaagacgtgctcaaggaaggcgacaccgttgaggtgatcgttcagggtgtcgatgatcgcggcaagatctccctggccatccctggtttcgaggatcaggagaacaacgcccgaccgagccgtggcgatcgcgatgaccgccgtggcggccgtggccgtggtgaccgtgacgatcgccgtggcggccgtggccgtcgttccgatcgcgatgaccgtgacttcgacgatcgtgacgaccgtccgcgtcgccgtcgctccgatgacttcgaggatgattacgacgaccgtccgcgtcgccgtcgctccgatgaccgtgacttcgatcgcgatgatcgcgatgatgatcgtccgcgtcgccgtcgttctgccgaccgtgacttcgacgatcgcgatgaccgtgatgctcgcgactcccgtgatgatgatcgtccgcgtcgccgtcgctcttccgatcgcgatgaccgtggcgatcgtgatgaccgccgtggcggtttccgtggcggccgtggccgtggctcggaccgcaacccgcgctatgccaccgacgacaactacgacgactaccgcgccgaccgcgaagagcgcactgagcgcccgcgtcgccgcgtccgtcgcgactttgatccgttcgaggactaaagccctctcacggatcggtcgcggcatagccgcccccctcacctacgggaagcccgcagggcttcccgcttaacggttcggcattcgaggactgatcgttctctagcttctctcgggtgagaagagcttaatcgcaaaccaaaaggcttctataccgtttcattcggtatagaagccttttggtttttcggcttcttcgcgctacatatttcgatgttgaatagggcactcgtgctgctgccatgtacattcagttgtcagttgacaactattctcatgcatcaagaatggcggaaaacagccattaagatgattggagccacgctaaaaagcgttgacaactgacaacagtttgtacacggcaccgcatggcacctatcctgttgctcacgaccggatctattctctcgtctgttgttatgcccaacagcaaaatccgcttgccgtgccgcgccatgtccgagtcatggccagccgttgattgaatggcggatgatcatcgaaggtactcatgggcgttgatcactgtggcaacaacaaaggccgggcccttgtgagagcccggcctttatgccgtatggcggcggattaatccttaaaggctaatccgttgtcaatcagcgttacagaatcgccatgcacacgaagtccagaatgaacagcgcggacacgatccagagtatcggatggacctccttggccttgcccttgcaggtcttcacgatgcagtacatgatgaagccgccggcgatgccgtaggagatggagtaggagaaggccatgaacacggctgcgaagaacgccgggatggcttcggcgatgtcgtcccacttgacttccttcagggaagcggccatcatgcagccgacgatcaccagcacgccggcggttgcggcggacggcacggcggagacgaccggggccaggaacgcggacagggcgaagcagatcgccacaaccacggaggtcaggccggtgcggccgcctgcggcgatgccggcggaagactcgacgtaggtggtggtgttcgaggtgccgcagatagcgccaatggaggtggcgatggagtcggcgaacagggccttgtccatcttggaggagaagccgtggccgttctccagagccttctcatcctcggcggagaagatgccggtgcggcggccggtgccgatgaaagtgcccagggtgtcgaacgtatcggacatggagaaggcgaagatggtcacgatgaccagaggcagcttggagacgtcggagaacagcgccgggaagccctcagcggagaagatcgcgccgaaggtctgcggcagctgggagaaggtttcgctgatggactgcgagttggaccaggtggtaacgccgaacgggatgccgatcacggtggtgatggcgatggccagcagcatgccgcccttaaccttcatcacggtgaacacaatggccagtacgaggccgatcaggaagacccacagcaccttgtcgttgaagtcggccagactcggggtcgccgccacggcgcctcccttggccgcggctttcgggtcgccgggggtgaacttgatcagtccgacgttcagcatgcccacataggccacgaacaggccgatgccgccgccgatggcgtgttgcagggactccgggatggccatgatgatcatcttgcggatcttggtgacggtgatgaggatgttgatcaggccgcacaggaacaccatgcacatggtctgctgccagctgaagccgaggccgaagcacacggtgtaggtgaagaacgcgttgaggcccatgccggcggcctgggcgtacggcacattggcgaacaggcccatgactagggtgccgatgatggccgcgatgatggtggccaggaacacgccgccccacggcatacccgtctgcgacaggatctgcgggttgacgacgatgatgtaggccatcgcgaagaacgtggtcaggccggccagaatctcagtcgagacggtcgtgccgttttccttcaaatggaagaacttctccatttactctctacttccttggttttatgcggggctgcgcaccgcgcgcataatgctgcggctggccccggcgagaattgcgactcgccctgatcggcctgcccaacgcgcgtcaggtgttgcgcacccaatcagaaccgtggccgattatagcttgtggaggtaacgtgaacgggtccgggagtagactgactgccagaataattcggaacaactcagggacacgcagggcacacccgtggaaggaaggcgcgcgatgaaaccggccgtcgaagtcagcatcacctcttggaagaagaatgtcgtcaagcccggtcaggagtacggccgcgtactgctgatgcctggcaccggctacaactgcgaccgtccgctgctctactggtcggcccaggctctggtcgaggccggctggcgaatcgaccgcatgaacgtacgcaacgcttccgacgacctgtccacggtgattccggtcctcaatcaggcgattgacggctggatggccgccgcgcgcgagtccggcgcgggtaaagccggtgattccggggatggcgttgccgccgatgattctgctaccgtgctggccgatggcgcagctggctcgccgaaccgtgattccgacaccccgtccggccctcgcctgttgctgatcggcaagtcgctgacgacgatgacctacccacatgtggcctcacactacggtctgccgttcgtgctgctgaccccggtgctacatcacgccgacttcgatccatccgcccgggtgattccggtgccggctgtcggcgatgatatcgtcgccgaatccgaggctccgagcgtggccgaagcaagggcgatcatccgcgcagaactgtccgaccagtcgcacgccgccagctcccgatactccggcccggcaccgctgatctgcgccggcaccgccgacccgttctacgatcgagcccgcgccaacgcgctcaccccgcacgtgcacgaatacccggatgccaaccattcgatcgaggtgcccggccactggcgtcgctcgctcgactatctgaaggaagtcaccgcgtccgtagcccagtacgccgccacgttgtaatgccttgcgacacgcccgaattctgcaatgtcgctgaccatccgtaatctaatcatccgtaaaccacagaccgttggttgaagtgcgcgcgagtgcatttccgaagtttggttcgccaagccagcgcaggttgagagatataagcccgtcaagggccggcgaaggtcgcttcgcgagattatattgctctgcctgtgcgcagggcttttttgttgcccggccgaaagttccgaactccaagtcaacggccgacttaggaaggaacgccatgaagaggcccgaaaaggaagcggtagtcgctcagcttacggaagaattccgtaacgctgacgccgtctacctgaccgagtaccgcgggcttaccgttccgcagatttccgatctgcgtgaaaagctaggccgcgatacttcctacaccgtggcaaagaacacgctggcacgcatcgccgccaaggaagcgggcatcgagggtctcgacgagattctctccggcccgaccgccatcaccttcgtgaagggcgacttcatcgaggctgcgaaggtcatccgtgacttcgccaaggacaacaaggctcttgtcatcaagggtgccgccgctgacggcactgtctacgatgccgagggcgccaagaagctggcagacctcaagtcccgcccgcagctgcttgccgaattcgccggcgacatcaaggcatcgatggccaaggccgcgtacctgttcaacgccctgcctaccaaggctgtgcgtacgatcgacgccctgcgcgagaagcaggagaaggctgcctgatttacgccctcacggcatgaatcagtcgcttcgataatttaaacaataaggtttattaggcagcggatctaccacttcgtccgccgccaagattgaaaggaagccataatggctaagtacaccaacgatgagctgctggaagccttcggcgagatgaccctggtcgagctctccgagttcgtgaaggccttcgaggagaagttcgacgtcgaggctgccgctccggttgccgctgttgccgctgttgctggcgctgctgctccggctgaggaagagaaggatgagttcgacgtcatcctctccgccgtcggcgacaagaagatccaggtcatcaaggctgtccgcgccatcacctccctcggcctggccgaggccaaggctctcgtcgacggcgctccgaaggccgtcctcgagaaggccaagaaggaagatgccgagaaggccaaggctcagctggaagaggctggtgcctccgtcgagctcaagtgatttgtgcggcataagccgcaatcacagcttttcgaggaaccccgcacctgtgtttcaggctgcggggtttccgcatactgagtagactagttgacgagggcgaggcggagaacgcgatccggcgtggaatcacaaagctggcaatgagcgaaagttgtcaattctgtgcccagtaatccgccaaaagccggtaaaagatgacacaatggcacgtagtgtggtcaaatagtgtgtccaggaaggcggtcacggtgagcgagtggacggtgaagatcaacggtgtcgaccggatcagcgtcaagccgggggagtgcgtggaaatcggccgtaagccgttacgcccccttgccgatgatggcaacacccgccttgacgtcgccgatcagaccaaatcgatgtccaaacggcacgccatgttcacggtaaaaagcaatggtacggcttcggtccgcgatcttggatcgaccaatggatcgtatgtggtgcgggaaaatggtgatttgttgcgcttgccggccaatgtcgagttcctgttgccgacgtctcccatgcgcatgcagttcggtgatgtgcctgcggacttcattcgtatcgacgatccagtggcaaagccactcgaccttaaggtgcctgatttgtttggctatgcggttcacgaagcaccgcaggagccggatgcggcggatatgtctgtcgacgatattcttgatttgcgggccggcgagccgaccgccatcttcagcgcggataatgttcgacgcaaggtcgacgagcttgaacttggctcgctgaatatcacgcagccagtgacgaaaaacgatgagccggccataccccgtgacctgttcgcggatgcgttggcccagcatgccgagcaggagaccgaacgcaaaaaccagcaggccatggactccgtggtactgccgaagcagcagaccgaacctgagtcgacgactgtaacgcccgcatccaagcacagcaggatctccggtattgtcccggtagatgccatcgcccatgccgttgttaagcacgctcccagcacaagcgagccggcagtggcgtcggcggcggttgttgaatccgatgtggtggctggcgcaagcaagtcagccgaaaacgttcagtccgctccgaataccgacgattctcagccggtggacgctgttgcacagcattctgaaggcactcagtccgaagccgcccagtctgaaaacactcagtctgagaccgcccagccgacaaccacccagcctgaaaccgctcaaccggcaaccgacgcacccgaggatcagcagctggcgaccgaaaccgaaaccgcccagcagtcggtctccgaagcgtatgaagcgtctgatatctactccacgggcgtacacactccggtcttcgagcccggctcggtgttcgagcgtgtggccaagggcgagctgaaagcacaggagccggcagtcgaagtcgatggcctgacctctgacgaggcaaaaaccacgcaagatttcaacgttcagttcgaagtcgcccgtcatcccgaattactggcgttcctcgccatgaatccgtacctgtacgacgacatgtattcttggctcgccgcccgtggcgaggccgatattgacgaagccctgtctcacaacaagggctatcaggaataccgcgaagcggttggaaagtgagtcgagagatgacccagagccagactcagaaccagaatctcacggaaggtctgaatcgcatccgtcgctggcgtgaccaataccgcagcatgcagccgccatcgccgctcgaggatgtgaatcaactggccgcgaagctggagatgacccatgcccatccctccggcatcgcccagctgttcgcttccggccatgttcggttggattcgttgttccgtgacacgggtgtgcttaaggccgccgaacgccatatcgggcgcgtactggatgaccaggccgccaagcgcaggatttccggcgtggcggagttgtcgctcgtggtcggtgtggccacgtggaggggcaacgcgctgccggtgctgttgtacccggtgagcgtcacgatcgaggatgatggcttgtcgaccaccattcgattcaccggtcgcgtgaccctgaacgccgcgttcgtcaatgcattgcgtgagcagggggtgttcctggatgaggattccctgtttgacggtgccagctatgacagtggcactcccgaaacttccgcgatgttcgcccgtatttcgtccgaagcatcggagcgtatctccggcttcgccatcgagcgccagattgtgctcggatgcttcatggacccctcgtcgcagatgatcagcgaaagccgacagttcatcgaccagctggagaatggccccaccggcaatgtgctgttggacgcgcttgccggcgacaaatccgcccgcaccgcgctcaaagatgccaatattccgcaatacagtcctttcgacgtagacccgcatgccgagtacgaagtcggcgatgtggacaatacggtgcgatatgccgcgtcacttgctgccaatggccatagcatcgtggtcgacggcaccttcccgaagggcaccgcggagcaggctgtggccatcgcatcgcgctgcctgatgaatggtcgttccgtgctgtacgtgcccggcgtggccgagcagaagcgtctgttcatccagacggcctccgccaatgagatgaaggcgcaggtactggatgtatccgatgaacacgccaacgccgcgcttgataagcagctgattgccgcagtcggattccagcccggagtcgccacccagcgattcgaccagctggccgacgaactcgtgggcgtgcgctcgcgcttgacccgctatctgggcgacctgcacgggggcaacgataagtggaatgtgtccgcatacgagaccattcagaacctggcccgtatctccgtgctcccgacacaccccgccacccacgttcgacttgacgagtcaagtgccctgagcatcgccaacgatattgacacatggatcagcaagatggaacgtgccggcgagctcggcgaatacaccatcggcccggaagacaccgcatggtacaaggcgtccatcaccactgaagaacaagcggtaaccgcttaccagcgcgtggacgatttgctgcgtcgcttcctgcccgccacccgtgagcaggtggcacgcaccgtgcagacctgcggattcccggttcctcccaccactcgcgagtgggagcgtcaggttacggttttgaagaatctgcgacgagtgcttgacgtgttccagccagagattttcgagcgagacatcagctccatgatcgaggccaccaagccgaagagccagcgcaaggccgagggcacgtcgatgggattctgggagcgccgccgccacgtcaaggaagccaaggatctgctgcgcgtcggcgcgcaggtcgaggacttgcacgaagcgttgaaggtagtcgccaagcaaggggagcagtggcatcagttcgtgcctcacggcggttggccggtgctgcccagcaagctcgacgagatcatctccacccaagaggcgctggtcagcaatatgaccgcgctggataccgtgctttccaccacacccgctggtggcaatctggaaaccgccgatttcgagaaggtggaagcacgcctgaaagcactgctggatgatcgcaaggcactggacaccttgccggagcgttgcctgctggagcaggaattcgcttctgccggtctgaacgagttggtcgccgatctcaacgctcgccgggtgggcgtggagcaggtgcgtggcgaagtgcagctggcatggtggaccaccgtgttcgaggacattgtgcgttcttccgccatcatctccaaccaggatggtgccgcgctgcagaccgcatccgaccgcttcgcacaggtcgatgtggagcacgtgcgctccatcggaccgatggtgtcgcaggaatccatgcgccgcctgtgcgacatgctgttctcccgcactcaggaagccaaccagatacacaccgtgctggcagggcgcgccagtgtgtcgctgagcaggattcgccgtgatcatccggagattctggccgcggccaagccgattctggtggccgcaccgggtacgctcgccgcactcaccgagccgggtgtgctggctgatgtggcgattctcgatgcgtgcgcgcacattcccgctatcgagttgctgtccatcatcggccgcgtgcagcaggtggtggtgatcgcccactgcgcgacggtaaccagcgaaagcgtcaagcagctgatcgacacgttgcctcatatcgaggtggatgctgccccgtctcgccgtgcgccgcgcctgtccgcattccttgaatccgagggatatggtcctgttcgctatgatgtggccaccgagccggctgccggtgaggtgcgattccaccgtgtggaagcgagcggtgtgccggttatgtcttctggtctggtggaatccagccagtcggagattgatgaagtggtgcgtctgattacgcaacgtgccgccggttttgctgtggttccttccagctatcgacttgtggtcgtgatgttgaccgacgcattccgcacacgcttgggtgccgaattgaagtcgttggcaggcaaatccaaggcgatgggccgattcctgcgccatgtgcggctggtttccttgcgtgacgtggccggaggtcgtgccactgacgtgattctgtcgatgtgctatgcgaaaaccacgcacggacgtctgcttcagcagttcggtccgctcgaaagcacaggcggtcgcggactgttgctggatgccctggcattggcggaccacagcttggatattgtgtcggcctttggttccgaagatttggatgaagaacgactgcaccagtccggtcctcggttcctgaagaccatgttgacgtgggccgaacagcttgacgaccgtccggtgcttccgttgcgtgatgcggcaggcggcaacgtgctgttcgacgatatcgccgacaggttgcgcgcgcgaggactgaacgctgctgttgattatggattcgacaagggcgtgaagattccgctcgtggtgggattgaaggacaagccgtttgccttggccgtgcagaccgatgacgcgaactttatgtccgtgcaatccacgcgcaggcgtcatcgtttgtcggcacaggatctcatttccttgggctggaatgtgatgaccgtctggagtgtcgccgccttcgtgaaccccgataaggaagtcgaccgtatcgtcagccgtatcggcgagatctaccgcgaggttgaataatcatggcggaatactcggctacacggcgcacaccgcgcaagcacaagcgcgtggtgatgaaaggcactgagcagtttgacgctgacggcgtcaaactcgagcccggagacatgcagaccgaccaacaacggcaatccgacgacgacaaacgcatcctcggcgaactgcctccacactgggctgttttcaacgagcgcgagtaggagttggggcgcactctgtgcgctctgatgttgtgttttccgcagccgtacggctgcggaaaacacaacatcggccgaaggccgattccgcttcctaccgcacaacggccataatcgctccggcctgttgcagctccataaccttggccgcggcctccggcggcattgcgaacgacaccagccggtcgttgcttcccaatgcgccagtcgtatccggtttgtcgacattcatcaccgtggcgttctcggccagcgtgcaatcggcaccttcgcaaccgacggcggaaaccagtctcacctgatcgccggccaatacatcgtcgacgctactggccaagcggacttcaatcaccgtagtgccggtcggtgctacgggcgcatctctggccatatgcgtggaaatgggatcggctgcttcgatatcgatttgcgccaccttgcccaccacatcctcaatattgcacgcccaagatgggcctatcgcagataccggcatatcagccaactgaacgtcggcggccagaataatgtcaccccgtcgaatcgagcgagcggccaccaccatcggctcggtctccaccacggccaatacggcttcaagcccaaacaacactgcgagtcccacgcacaacgcagcagtgagtcggcgcaaggcatccgccatgcgccgtcgccgcaatgagccgcgcgcaggcggcttaataaacgaaaaggtcaccatgcaaccatggtgacctgaagtttttcgtaagcgcaagctgaatcgacctatgtggttctagcttgccaagttatccacaacgcttcaaacccgtgcaacagacagtgcccgtagtgccaatatccgcggcataccgccgtcgacaccgtcgtttacagaggaaaaacggggagccgaccttacttgccggatttgtcggtgcggtagaatccgtgacccttgaactcaatcggcacggcggaatacaccttgcgcacctgctcctgcgagcacttggggcacacggtaatcgggtcgtcattgaacgactgctgttcggtgaagtcatagccgcagttcttgcaacggtaatgataggtaggcaacggattcctccaacaaagtcatatttctcgcgcatggcgtgcaacaccatgccgtgcaaccgttcatatcctagtcgccgccctgacacattggcgttacggtcttactagccagcctgcttttgccactctggttccatcggccagtgtgcgtggctggttggtcagtctggcttgcgccgagtatcttggccggccggtcaactcagccggcccgattcgccaagccgccggtatccccccggcgtcagcactccgtcggccggcacatcatgtggttcggccggcaaatcggtgtccaacacctcccacggccagcacaccgcaatcagggggcacgcgggcttgcgtcgagccaaggcccggtcataccagccggctccacgccccagacgattgccttgcgggtccactgccaaagccggggcgatgaccagatcggccttctccaacgcttcgggcggtagaactgcgccagttggctcatcgggtctgtgatggacggtgctgggagagctgcagctaccggcattgttcgcgccacccactgcatccatcgagcgcaaggattccaatgaatccagcacactccagccaatttccaacccagatcccaatcgtggcaccaacacgtggcagccatgagccaacagccatcgcaacagtggccgggtttcgatttccgaacccatcgacacatatgccgccactgtggaaccatcctgaatcatgtgtgccgggaaccgtcgcaccagcaattcaccggccgctccacattcttccgctggaatgcgcttgcgccgagacagtatatggtggcgcagcgtcgctttatccatcttttctgttttctccgtgccgctgtggtcgctgccgatattcatgccattgtccgcttcgctcataccgcacaatctagtgtttccaccgtaaaacgaaagtggccgaggcgaaggcgcaagcccttcatatggctacaataaaggccgtgtcagttttccagtcgattaaagaggcgttcaagctggaccaccagatccgtccgccgcgcctcacccatcccggtttcccgataatcctgcgccccctgaccatggacgatgaggacggctggaacgaagtgcgctggcgcaacaacgactggctggcgccttgggaatccggcgacccgatgcatggcggctccatcaccttcaatcaatgggtgcagcgacagcgccgtaatgagcagcatggcgtcggcgtgattttcgccatcgaataccagatgcgtatcgtcggccagatttcgttgggagccatcgcgtatggtgccatgcgtaccggcgtggttggctattgggtcgatcaacggtacgccggccacggattcgcgccgatggcactggccatgcttgccgattgggcactcggagacccattcgggcccgcgttgcatcggctggaaatcgccattctgccggataatgcgcgttctttggctgtggtgcgtaaggtcggagcccatcatgagggactgcgcgagcggtatatgtatgtaaatggccagtggcgcgatcacgtaacgtttgcgctgttggctgaagatatgaggcaagggttcgccgccagactcgccgccgccggttccagataagcgtcgaccggaagaattccgctccgacacgcccgggcggaaagccccagttcgtcggtacgtctcctattcttgactctatgggttatgagtcactgagcactgtcgtcgtgctggtgattgtggcgattattatcgttgtatggctgcccgtacgtacggccaacggcatgaaacgtgtggacgagcatcggcaggatcgttattcgccttctctgcatatcgttgatgcagagaacggcagacgattcggagacatcaagccgcataaggcgaaaggggcagcaatgccagcatcaacaccgtcagcgaggctgacacctgagcacatcgcccatgtgcgggaactgcgccgcgcggccatccgccgccggcagattctcgccgtatgcctgcttgccataaccgtgttggtgtttgccgtatcgttccccctgcatttcagcccgctgcttgctcttattccgttcgtgctgttactgctggtgctggtgctgggagccaatgcctcacgccaggcccggcaatgggagcgcaaggtggtccgctacgagcggacccatagcggtacgggctggtccaagaaaccgtctgccgagtccaaggacagcaagcgtgtgaacaaggccgaaccggttgcggccgtaactgcgcctgccaaggagctttccgagcatgttgaggatgctgccaccgaggtcatggaacagcggcagattcgccgcgcgttacgcgatgccgagattgagcaggccaaggccaaggcgttgcgtcagtccgccgccgcatatcaggccgcggcggagcacgccaaacagtctgagaagtctgatactgcacagtccgccgccgataagcctgccgccgaaccgtctgctatggtcgatgaatccgctgaccgtaagtccgctgccgaaaccagtgaatcttccgccgcgcccgatgcctccgctcgcacggataagtcgactaagtcggataagtccgtcgcccctcgagttgaaccatcgcttacggtgcgtgacgagcgtgatgagcgcgacgatgccgctgccgacgctacgtcggaactggccagcgtacgccctgcccgagcactggatgtcttcgatatggccacctcgcaggatctcatctccttcactttgggcggggaacataacgccgacaacgctccggaaagcttggagatcaagtcgacccgtcaggtgtccaaggcggaacctgtcgaacccgcagtggcggaaaagttgattgacgaggcccgagccgtcaaggccgcggacgatgccaaggccgccgatgcgggcaaggctgtcagtgccggaaacgctgtagacactgagtcggagcagcgcgatgatgccgatacgaacgccgctacggacgccgatgacgaggctgcaaacgccgcccagcgagccgcattccacgaatccgaggagcgtgccgacgtcgaagcgccagcggcgaccaccgattcgttgggcgcaggcctggactccattcttgcccgccgcggcaactgagcgttgcgattcgccgattttctctcacagcgttagcactcgagttggcagagtgctaataatcgcgctacgatgtgtcctagcgcaaagggacaacgcaagtgatcgtcagcctcttgaggcgttctggcgcggcattatcgaactacaagtagatacgaggtgacccacagtgtcgattaagctcacaccgttggaagacaagatcatcgtcaagcaggccgaggcccagacccagaccgcttccggtctgtatattccggacaacgccaaggagaagccgcagcagggtgaagtcctggccgttggcccgggccgtcgtgacgacaagggcgagcgcatcccgatggatgtcaaggtcggcgacaaggtgttgtactccaagtacggcggcaccgaagtccactacgagggtgaggactacctcatcgtcggcgcgcgcgacattctcgccatcctcggctgattagtcgcctagcgaacttcaacaaccccgactgttcccacgaacagtcggggttttctcttgtcaggcggaaaggggctcccctcagagaggggagccgaaaaccgctcccgccaaacgcccagccatgcctgctatgcataaaggtgcatgcgcgcagcgtagttgagttcggcgttgcaccgcatctacactgggtaacggattggggtccctatggaagaggctcagtcggcgacttggccgagcggcttaagacattttgcacaagacggcagtaggtcgacggtatgttgtttttttttccgtgtcgcaggttcgtggtgtcgtcgctgtgccaatggttgtctctctaccgacgctgagtgccgtggcatgaggccagcgtcggcagtgggccacgaaatggcgatgtgccgatgctgagccgcgttggcgtcgttatagggccagtttttggaccattgccgacggcaaatcggcgttttgtgtcggcgacggtccaaaaactggcggtctgccgacgataagtgccgtcatcgtcggcagaccgccaggtattgtccctgtgccgacgtaaaaagccctgccatcgtcgtcaccgagccatcttgtgactcactgacggcggcagcagggcggaagaggccgaaatcatgcgcgcggtgcggtctcacacctcgaatccggcctccaccagcgcgtgatcgatgtcgcgaatcaaatcgtccgtatcctccagacccacggccagacggaagaagccgcggtggaactcaggcgggtacaggtactggcgctcgtcatcctcaccgaggaacacgatcagcgattagtcatggccgagcgagacggcagacgtaatcacattgagcttggaaacgaatcggttgtgcccgtcgtggtcggtgtcgaggccgaacgacagcacgccgccgaacccggagtccgggcgggccagctggctggccgccacctcgtggtgcaggtgcgattccagaccggggtacgccacgaaacgcaccacatccagcgattcgagatgcttggcaatcgccaaggccgaggcgtcgtaggacagcgcgtaggtgttcgccagcgtgatggggcgacggatcgcgccggtttcggcgtcgaccccgttgccgaggtgaatggccagcgtgccgaatccgagcggctggtcgtcgaatgattgtccgtgatgtacaagatcagaagccatgcgcccagcatgccggcatgcgctgtgccgccgcaagcaggcgacgccactcgaaaaccgcgccattgcaaggttctggaacaccatataagaaaaatgattggtagaagtgcggggtgcagccttggtcggggctgtttgcagggccgaagcggaccctgaaaccacgctgtgagacacgccgataaaaccgcagaattccgcggtaaaacaaggttcgcgtagaggtcgatttgcgtacttggaaaatatgtggttatatagccaagttgcctgttgaggtcaaacaccgcggcgggaaacagactggcggatttcccaagcggtcaaagggagctgactgtaaatcagccgcttcgtgcttcagtggttcgaatccactatccgccacg

SEQ ID NO: 515 - DNA, 11683 bp, Unknown
  R48_24m  MAG No. k141_49136
aggaccaatccgacggccagcggcaccaaggccagcagaaacagcggtttttccatggcatctcatctcgaatgctgtggttcagatttttcgatgttcggtttttctgcgcttactgacaagagccatggagcagcatgccgatacgcacagattcactatgcaggtcgccgccggcagtagccgtatgaacggctgactgtagaaatcgaggacatctggatccatagatcctgagtatatttcaaaaaccggatatgatgcgagagccggcgccgaactcacgaggaacagtatccaaatgacgggcaatctcaggatggatactgttcggcctttccgatggacttctttcgagaacatgaaaagagcccaagaggtcactgcgattaatgcacccgcgcaatacaacagaccagagaactcgctacgcatgattccgtcctcacttcagtcgcaggtaatttggcttatcgatcttctggctggttcgagattaccatacctgacatggcagtcgaattgcccgttgtctattggcagagcatccgactgttaatcggacggtcgctggttcaagcccagccgcaggagccagacaaaaacccggaacttcggttccgggtttttgttacccgccccccgaaactcctttatcaaggaatcatccataagggatgccgcagcagacggtctccaaggcactacaccgtgctcatccccatggacgacggcaactggcacgtcaccgtgtactgtcccgcctcgctggacggcccactgctcgacaaggattccaacgaattcgacacggacgacgtgaaacccggcgacaagtcgtacacagttgccaatccattccacctggatcacgcacccggaacagacggtttcatcttcggccctgacaccctccgacaatagcgatggactaaccattcaaccgcacgcgtaggaggagcgcattccaaccatgaatgaatgacatatagccgtcaagggcttgcggacatcgtgtccgcaagcccttgacgtctcaatccaacgaaatatcgacttttacccgtttgtcggattcaggctttcgcgcaagtccggcgatgaggagggccaccagcagggggatcgtcgtcagtgtaccccaggaaatcgagaacgtgtcggcgatgtagccgcacagcggggtgacgaccgcgttctccgtgggatcgctcgtattgatggccttcaccgcggtcgcgcggatcgaatcgtcaatgctctcgtgcaagctgctggagatcgtgttcgccacgtacatctgcgcgcaggagaacacgaagaacgccaggatcctcaccgccggcatcggcgtggccgcaagcaccaccgccgacacgatgagcacgaggatcgcaatgtcgccggaacgtggatgcagccgcagcatacccagacgactgccgacgatctgcgcgatattagtgaacactaggccggcgaactgccaccagatcccggtctggtggcccatcagcagcagctgccagaacgtcagcaccgacaacgtacccagattgaacaccaccatattccatatctccggcttccgcagcagcacggccgcggccgccacggtctgcctgacatgatccaacaccgtcagcgaggtcccggactcgcccggctcggcggatccatcggattcgacggacgcctcggcctgccgttccgtcgtcccgctcccatccgtcgctgcggccttggtgcgcgacccggccctcatcagaccgagaagcgggatgatcgccaatacgtagaacaccgtcgcgcccagccagatcagctgggagtcaagcaggaacagcacggcaccgaccgcaccgccgcatatcgtgcacacaccgatcatcgccgacagtcttgacaccaaggtcttcatacccagcgagggatcgtgcttgctggcgtattcgatgtacagcgaggacgccgcgccgctttcgaccgcggccccgatgccggccagcacgttggccaggcacagcacggcgaagttcgtggaccagaacagcatcaatatgaatcccgcgacgcggcacaacacgccgatgatcagcgtccgttcccgggaccaccggtcgaacagcacggacgtgggcagctcgctggccgattcgctgacgtcgaacaccacattgacgatggagatcagcagcaccgacaggcccacatcatgataggccaccatatagtagaccgaaaaacatccggcaccaagataaataagcgcattatacaaacaggcaaaccgaaccatcaatcattcccttacataaacaaagaaccggtatacgtgggactgtctctcgaagtgtgtaactggccttaactggccggtcgtgtggccggtcggaaaggctggtggacgatgtctgctgggacaatgggaaacatgacaccgacgaagaagccggacgcggaaaaacgcaacgccgagcgggaggcagcgctcacattcgtgcgcatggccaaggaaaaaggactggacctgacagggcccgacggactgctcaaacagttcaccaaaagcgtgctggagacggccttggacgaggagatgaccgagcacctgggccgcgccaagcacaagaaatccaaggacggcagggccgcgaacacgcgcaacggcaccaccgccaagaccgtggtcaccgattcggtaggtccggtcgggatcgaggtgccgcgagaccgcgatggctcgttcgagccggtcgtcgtcaggaaacggcagcggcggctgcccggggtgggcgaggtggtgctgtccctgtatgccaggggcctgaccaccggcgagatcagcgcccacttccaggagatctacggggcggacgtgtccagggagaccgtcagtcgcatcaccgagcgggtcgtggccgagaaggacgaatggtgctcgcgtcccctggatcgtgtgtacgcggccgtgttcatcgacgcgaccgtcgtcaaggtgcgcgacgggcaggtcgccaaccgcgcgttctacgtggccgttggcgtggatctggagggcgaccgcgacgtgctgggcatctgggcgtcgcccgccgcggagggcgcgcgctattggctgtcggtgctcaccgagctgaagaaccggggcgtggacgatgtgttcttcctgatctgcgacgggctcaaaggcctgcccgacgcggtgggcgcggtatggcctctggccatcgtgcagacctgcgtggtgcatctgctgcgcaacacgttccgccacgcgtcgaagaaggactgggacgccatcaaacgcgatgtcaaacccatctacaccgcggcggcggcccgcgacgcgatgctggacaagtgggaggcgagatatcccgcgatccgcaggctgtggatggacgcgtgggaacggttcataccgttcctggactatgacgtggagatccggcgcgtgatctgcacgaccaacgccatcgaatcgctcaacgcgagattcaagcgctccatccgcgcccgcggccacttccccgacgagcaggccgcgctcaagtgcatgtacctgaccgtccgctcgctggaccccaccggcaagggacggatacgatggagcgcgcgctggaagcccgcgctcaacgcctttgccatcaccttcgccgaccgctggccaagcgagggaacacaacaatgaaaacgccagttacacacttaacgagacaggcccgcgtctgggccggtggccggcgatccgctggtgccgctggtgccggtgctggttgaagtcgattccgacggatctttttgcgtcgagccggtgccggtgccgttcgaaccggtctggctgccgccgacgccttggctggtcgggtcttcggtggtcggattctttgaggtgccggtgccgttcgaaccgttggcggtgccgtcggttttcgaatccgaggcgccggcgccggtcgaacctgaggtgccgttggcgtcgaagtcggtggagggggcgtcggttttcgaatccttgctggttcccttcgaatcatcgccggtgcccgtctggggcagagcgttgttctgatcgggggtgcccgttcgcgtgccggtgtcgttgcgcgcgggcgtggtcgtggtgggggatacgagattgtccgtgccgcgtccctgcgtggccagcatcacgacgccggccgtcaccgccacggcgagcaggccggacaccaaggtgacgatcatggcggtgtgcttcgaagcgcggaagcgggacttgcgcagctcatcgaccgagtacgtcctgccgttcgcccggctgaacacgatttcacgcggtctgcgtgtggaggaagcatcatcggcggtcacgcccgtcgccgtatcgggctcgtcccgaacgtcggtccggctgccggccgttcggggggtgccgccatcggcatcgccgttctcggcgtccttcgtgatcccgctgccggaggacgaggccgattggagtttttcgccggaggcggtgagcacgttctggtagatcttggtggccacggcggagacgacgtaactggccgccgctccgatcaccgaaccgccgatgccgatcttcgatgcgagcaggaacgaggtgacggcggcaagggtgcccgccacgatggatgagagggagattccttcaaaaaacttcttcacaatgcacgaccgtagggtgtcgggctgacaggttgcctgagactcgatggaagcggggcgaggcctacacgagaccttcaaaatcggccttcgtacaggtccgacacgccctgcggcgcacacacgtgcgtttcgcgtcgccgcaggccgcgggacatcgtcaattacgatgcagcgactgcccggtcggtctgatcaccgacatcagtacggcggcgaaaatcaaagcgaaacccaccagcgaagtccacatgattgtctcgccccagaacagcgcggagaacgtgacggcgaacagactttccgtacacatgatgattgacgcctgcgaggcaggcacgtgagccagaccgatgttctgcatgatctgggcactcatcgtggcgccgaggaacagatagagcacgctggccactactgagggtgccagccagctggcgttcggcatgggttcggtgaacaacgcgccgatgatgaacaatacgccggcaacgccgaactgcacaaaagtgacggcgatagggtcgaagcgtttggtgtagacaccaaggcaggtcagattgaacgagaagatgacggcggttgcgatggtcagccagtcgccggcgctcagagacagcgaaccgcccggcttcagcgagacgaagccgacgccgatcagacagatcacgccggcgaccagattgatggccttcgggcgggtttccgaaatgatccacgtggcgaacggggtgagtacgcagtaggcggccgtcaggaacgcgctgcggcccggttcaatggtctgcaggccgatggtctgggtgaccatcgtgccccagtaggtcagacccaccacgagcgccggcacaatgatcttcggcgtcagatacggcacgatgtgcttatggaacaaggccagcatgcacaggcaggcgcctatcatgcgcagacccatcagccattggggcggaatcgcctccatggcgaatttggcgagcagataactgccaccccataatgcggcgcagcccagcaacatgagtcgggcgagattcgggggaaagctgcgggaccagcggctgcgcagcttgctgaaacgttcgaccaaacccatggtgcacctcaggacagttaggaaaacttgtggctctctcggctcacagattacgggaactaccggccaaaatcgaccggtcgatgggcgtcgggtgtgtgacaggtgtgtggctggtgcgcggccggggcgcggcaccgccaagcaggtaagaaccggatgaaagctgtgcgaaggtgaggttactcacagcgaacatccgggctagtcgcgctcgaaaccggtactctggaaagagtaaaaaaatacgttgtccatagcaatcatgaaaggattcgacatggcagtcattactccggaaatcaaggaattcatcaagaacaacctcggttggatcaccaccgtctccaaggacggcgaactggacctcggcccgaagatgtccctgttcgtgctggacgacacgcacatcgcctaccacgagcgcaccgccggccagcactacgagaacctcaagaacggctctccgctggtcatcgccttcgccaacctcgagaagaagcagggctaccgcttccgcggcaacgtggtgctgcacgttgacgacgacatctacaacgagcaggtcaagatcgccgaggaaaagggcaccaagaagccggccgtgattccggttctcgaagtcaccgagatccagaaccttgcctccggtccgaccgccggcaagaccatcgccaaggactgattagctgacgtattggtggcttcctcgtcagagggagccactttttcgcttttcagtgcgcagtactaggtgatggcctttgaggtcggtggtggcgaagaggtaggtgttgccgccgtccttgagtttgagttttttgcgtagctgggccacggttagggggaaattgcgtacggagatgttggcgtgcgtgagaccggccaatagctgcttcagttctctcttgttcatggtggcgatggattcgatgacgaatgatctgcctggaaaatcggcaataggttcggccgccacgaacaggtggctattcgggctgatgtgatgcacggcgaagcgctgttcgagaacagcaaagcacccggccttcatgattgaggcgttgggttcgtaaaggtacttccaatgcgaggaatcgaagccgttcgcgctttcctcagccgggagatcctcggtattacaggtattgcatgcaactaaggcagaatcgctgataggggtgtgattgtcgctattatcgccggccttgtacgacagcacctgcccgtcattgacgcataccacgagcggtgaggcgcaacggccgcgccccaacaccagcaacaattccttgcattcattaccggtggagacgatatgcacctcgtgcaccgcgccggcgaaatccgtaatggtcttatgccagtcgagcatgggggagagcttgaccatgaccgtcggtgccttggccagcagcgtatccttcagggtcagcacatccggcgtgcaatcggcaatcgcgtaggtacgcgagccatgatcgtcacggcgggccggatcgaggaagatcatggagactcggccaagcgtatcaagcactgctgttgaatcatcattgatgacttcggcgtggccaaggccgagtatcgggaaattatggcgagcgataccacataaaatggattgttgttccacatatatggcatggtcaaacactcgggacatgtaagaaaagtcgacgccgaaaccgccggtcagatcgactagggatgtcggggaatcgtcgtcgactgcttccttggccaacaatcgctgtgctaaccgggctttgtattgagccgtgaactggctggaacattgttccattgggacttgcggcgggaaaatcagcccatcatgggacgcccagtcaggtagcttgagtgaagcgcgctgccagccggcaatctgctccagcgcgaacggcacatccacgtcgccatcatgtttggcgtgcaaggccacatcacgcacatcttcacggcggtgtttggcgatgaacgcccaagtcgactcagaaatctccatgccgccattctaggggttgtgctgagatgagtatgaaaaaaccgcaagagaacgaggtggcgaaaaccgatgatcgatgaagtgatgatgctgcgccatggccgtacgcaatacaatctcgaacatcgcttgcaaggccagatcgatgtgccgctcgacatcgtaggccaatggcaggtcgaccagaccggattcgcgctcgcttcacggtactactgggccaaggtgaaccggcttgccgagcatcccgaagccatcgcccagcccggccctgacgccgccgaacgcactgatacgcgacagttcgaggaggcccccgccgccggccggcgcatggtggtgatgacctccgacctgttccgtgcccaacagaccgcacacgccttcgccgatattttgggattgccggtcacctgtgaccaacgactgcgtgaacgcagcttcggcgagtgggaaggcatgacccgcgccgaaatcaaagccgtggcagccgacgactacgcctcttggaaacagcacactgggggcgaaaccaagcatggtgtggaaagccgtgccgccgtgggccagcgaggtgccgatgccgtgcgcgcactggtcaccgactccgcctattcagacagcatgcccaccacgctgatgctcgtcacccatggctcatggattaccgccaccatctccaacctgctcgaactcgacccggacggcatgaacgcactcggcggcatgcgcaacgcctgctggtgccggctcaaagtgcgccacagcgtcaacggcacccccaccgaacagcccctgtgggagttggaggaatacaacaaggctcccgccatcgccgacagcgccgactgggagaacgggccgaccgatctgcgaggaccgcacatgccgagttggcagccaatcgtctggtgacggtcgctatgcgaaaccccgctcgcaaattcgaacggtgggtctagactaatctcggtttggaaccgtacagcgatagaacagtaggaaagcgcggaaggcgggtgaggcgacatgctgagaatcttcagctcaatcaatggccaggtggagcaaatcgagaaaccggaaaacggctcctggttatgtttgagcgaacccactgatgtggagctcgccaccgtcgcctcgcagaccggcatcgacctggccgacctgcgcgcccctttggatgacgaggaacgttcacgtgtggacgtcgaagacgattacacgatgatcatcgtcgacatccccaccgtggaggagcgtggcggacgcgactggtacgagaccatcccgctgtcgatcatcgtcaccgaaaacctcatcatcaccgtctgcatgcaggacacgcccgtgctccacccattcatggaaggcacgatccgaggcttcaacaccttcatgcgttcgcgcttcatcctgcagatcctgtaccgcaacgccacgatgtacctgcgttacctgcgcatcatcgaccgcgaaagcgacaagcttgaactgaagctgcgccactccatgcaaaaccgcgagatcgtgatgctcatggagctgagcaagaccttggtgtacttcaccacatcgctgaaatcgaacgagatcgtgatggagaaactcaccaccctgcagcgcatcaagcagtatccggacgatgaggatctgctcgacgacgtcatcaccgaaaacaagcaggccatcgagatggccaacatctacagcggcgttcttgcgaacatgaccgacgccttcgcctcgatcgtgtccaacaacctgaacaacgtgatgcgcatcttcaccatcatctccatcaccctgtccatcccgacgctgattttctcgatgtacggcatgaacttcgacggcggcatgatgggcatgccgttcaccgacaagccttggggcttcctgctcatcatcgtgatctccatggtgctttccggtgtggttgcctggttcctcacacgttcgcgcatgttcaagtaaggcgtttgacggttatgcaccactggtcatcgttcgtcagccgtagcatgctccgcgcccgccgcccgatgcggcgcggatttcgctcccggctgatggcaggattcgccgcggcctttggcgtgatattgccattatctggtctggccggttgcggccaaattcaagtcaccaccgtctccggagcgccggagggacccaccatcgccattggggtcgcagccgacgaaccatcggtgggagcatggcatgacggcacataccagggcttcgacatcaccatcgccaaatacgtggccgccaaactcggctatgcgaacaagcagatcgtcttcaagcaggttcgccccgaaaaccggcgctccatgctggacaatggacaggtcgacatggtcgtcgcctcttggcctatcaccgatgggtccagcgcgatcgttgattttgccggaccatacctcacgaccagcgtcggtttgctggtcaggtcggatgagcgtggccgattcaccaatgacgcaggttcggtgggcgacgtaggcgacggcacggtgtgcgcagtgaaaggtgacgagacagtcggcatcttccgcggcaaccacccgcaggctcggattcaggagcgtagcagttatgcgcagtgcgtcacggccgtgcaagtagggtcggcggatgccatagcctccgatatggcggtgctttccggtcttcaagcggccaacgggccccagtatatggacgtgattgcggacaagggcgaggtcagttatggcatcgccgtgagtcaaggcaccagccaattggcgcagaaaatcgcggaagcattggaagacatggttgaggatggcagctggacggccgccaaggatacgttcacaagccaaacaaagctcatggtttcgctgaacggtgaccccaaagccatcgtctcggatgctgaataacgattgacgacgtgtccagttgcgaggctaccttgctgatttatgagtgacaacgagaagagcacgcaaaccgaagagcccaacttccgctacaacgccgcactggcgcaggacatcgaaaacaagtggcagaagatctgggatgagcaaggcaccttctgggccgccaacgtcaacggcgatttgaaggacggcaagggccgtaacgccgaaggccgcgccgcctacttcgccatggacatgttcccctacccctccggcaagggtctgcatgtgggccacccgctgggttatctggcctccgatgtgacgagccgctaccaccgcatgaagggcgagaacgtcctgcacgccatgggctatgacgccttcggcctgcccgcggaacagtacgcagtccagaccggccagcatcctcgcgtgaccaccgaggcgaacatcgccaacatgagccgccagctgcaccgcatgggcctgagcttcgacaaccgccgcacgttcgccaccatcgaccccggctacgtgcgttggacccaatggatcttctcgcgcatctacgattcctggtacgacgaggacgccaccaacccgtccggctccaagggctccgcgcgccccatcgccgagctcgtcgccaaattcgagtccggcgaaaaggccattccgggccacgagtccgatggcaagcagtggtccgacctcactgacgccgagcagcaggatatcttgaacgacttccgcctggcctacatctccaagtccccggtcaactggtgcccgggtctgggcaccgtgctggccaacgaggaggtcaccgccgaaggcaagtccgagcgtggcaacttcccggtcttccagcgtgagctacgccagtggtccatgcgcatcaccaagtacggccaccgtctgatcgccgacctcgacggcatcgattggcctgagaaggtcaagctcatgcagcgcaactggatcggtgaatcccat

SEQ ID NO: 516 - DNA, 17074 bp, Unknown
  R48_24m  MAG No. k141_49682
gctggcgctggcgcggcgggtgccggcgatcaggccgacgcgatggccgcgatgagcgaacagcagctcgccgacagtttcgactcgtatatcgccacggcttcgaacgacgtgcttgtcgcgatctacgaccagtacgtgtcgaccggcacctacgacgacaacctcgccgcattcggcgtggtgagtcgtgacgcgcccagctcgatcaacgtctacgccgacagcttcgaagacaaggaccacatcgccgacgcgattaccgactacaacaacaccgtctcgaagaaagacaagatcacctacacggattatgtggggctcatgatgagctcggtgaccaccatcgtcaacgtgatttcctacgtgcttatcgcgttcgtgtccgtctcgttgattgtttcctcgatcatgatcggcatcatcacctacatttcggtgctggagcgcaccaaggaaatcggcatcctacgcgcaatgggtgcctcgaagcacaacgtgtcccaggtgttcaatgcggagaccggcatcatcggcctatgctccggcctgttgggcgtgggcttgaccgtgctgctcgatattccgatcaacgccgtgttgcatcacttcatcggcaatgcggacgtcaatgccgccctgccggtgaccggcggcgtggtgctggtgatcctaagcgtggtgctcacgctgatcggcggcctgattccctcgcgcaaggcagccaagcaagacccggccaccgcactgcgcaccgagtaagcgcatcggcatagtacgagacgagatccataaacctcggaacactggaatgcccgctgcaaaacggtgttccgaggcgagcccggcgagtacattaggataggcgagcaggtattcccggcaaagggggcgagggcaacgatggacgactggcgagacatccgcgataaagacagcgcattccgtcaaggaacgctgcctatggcgggaacgtatgtcgttgcacccccagcgaacccggatgttgataaggtagacagtatgcctaccgatttgcttggacgtgaatacgaaaccttccccgcacccgaaccgctgcaacagcacggtccggcgcgtgtcattgccatgtgcaaccagaagggcggcgtaggtaagaccaccagctccatcaatatcgccggtgcgttggcccagtatggccgccgcgtgcttatcgtcgatttcgatccgcagggcgccgccactgtgggactgggcgtcaacgcgaataccgtggagaacacgatttacaccgcgctgttcgatatttccgtggacccacatgatgtggtgcagcacaccgcattcgagaacatcgatgtgattccggcgaacatcgatttgtccgccgccgaggtccaactggtcacagaagtgggccgggagcagatcctgaacagtgtgctgcgcaagctcaagtcggaatacgatctcatcatcgtcgactgccagccatcgctcggcctgctcaccgtgaacgcgcttgccgcagctgatggcgtgatcattcccgtggccgccgaattcttcgccttgcgtggcgtggccctacttatgcagtccatcgaaaaagtgcagtcccgcatcaatcccgcattggaagtggatggcgtgctcatcaccatgtacaccaagacactgcactgcgaagaggtctgccagcgcatttacgaggcgttcagcgaaaaggtgttccacacgttcatctcccgctccatcaaactgcccgattccacggttgccgccgcgcccgtggtggtttatgcccctgagcacaagacatcaaaggaataccgtgaggtggcacgtgagctcattgctcgcggcatcgtggcgtaacgattgtttcgataaacgatgaatgagacttccctttctcggctcccctctctgagggaagctggctcgcgtagcgagattgaggggaactccgcggaagccgaaatcagcacggaggaatcctccacctccggcttccaagtcaacctcgaagtctattccggtccgttcgatgccttgctcggcatgatcgccaacaacaaactcgagctgaccgaagtttccctctcctcgatcaccgaggaattcctgacatacgtgcgcgggctcgacttcacgaaaaacatggatgaggccagcgcctttctcgacatcgcctctattctggtcgaggccaaaagcgtggcgattctgcccggcggcgaagacaaccagtacgacgagcaaagtctcgaggcgctgcgcgaacgcgatttgctgttcgcccgactcctccaataccgcgcctacaagcaggccgccggtgatttccgggcgcgtatcgccgccaatgccggccgattcccgcatccggcggccatggacgagggcattgccgccatgttgcctgagctggtatggacgctgaccccgctcgaactcgcccaactggccgcccaggtcatcgccaacgcgcccgcctccgaagtatcgatccaccagctgcacgtgccgctggtcgatctgcgggcccaatcgctggtggtgcgcgaccggctgattgcagcactggaatccaagggcgaccagtcgatgtcgttcagcgaattgacccgggactgcacttctcgtattgaggtggtggctcggttcatggccgtgctcgtgttcttcaaacaaggtgtgctgcagtatcagcaagatggtccgtttgccgaactgcacctgaggtgggtatccggcgtagacgaaacgatgaacgacgtgaacatttccgaaggcgattttgcgtaaggacggcgactggtgactgaacggattgacgcaacgaatgcaaccgaacacatggcggatacggaatcgacggctggatccgcaaaggccgaggtgaggggagtggaggagacgcgccccgaatacgtggatttcacggtagacgattttcccggcgggctgcccgcatgtctggaagcgattctgatggtcgccgaccagccgcagaccgccaccgagctggcccgcattttggcattggaccgcaacacagtcgaaggggcattgcaagccctgcacgatgactatgagggcgatgaatcccgtggcatccgcccgcgcggcttcgaactacgccgcaccgctcgtggctggcagttcgccagtcgcgccgcgttcgagccggtcgtctcatcattcgtcaccgacggccagactgcgagactcagtcaggccgcactggaggcgcttgccatcgtggcctatcgccagcccgtcacccgagcccaagtggccgcgatccgcggtgtcaactccgatggcgtgattcgctcgctcacggtacgcggccttatcaaggaagacggcgtggaccccgaatcccgcgcagcccttttggtcacctccgaatccttcctcgaccaaatgggcctgaagagtctcgacgaactaccctccctagcgccgttcctcccgtccgtcgccgaaatgacacagtcgaaatcgggggatacggacgtgatttcgtagcgattggggcccgctacctgaccaatattcgtgcgctagaccatccaatatgtgatttatggtcattgtgactataagtagtgctatgctctcaatgcggggagaacaaccggtatggaaagaggcatggcatgggattcggcaatgtgtccgagcgccgcagcgcaccgccacaggtcggcgtgtcagtggtgattctggcactcggcccgaaaggcgataccggcaacagtgccgccgattccggcaacgccgcgaactcggcccattcccgtctctggctgcccctggtcaagcgcgtccgtcagccgttcctgggctgctgggcgttgcccggcggcgacctgcgctccgatcggtcgttggaacagtccgcctacgcggccctcgaatcgaccacagacctgcacccgcgatacctcgaacagctgtacacctttggaggcccgacccggtcccatggcggattgcccatggtatccgtcgtgtactgggcgctcgtcggccagaccgaggccgcgggcttcgaggacggtgacaacgtacgatggttccccgaagacgaactgcccgagctggcgttcgaccatcgccagatcatcgactacgcgctgctccgcctgcgctccaaaatcgaatactccgacgtggccacccgactgctcggccccacgttcaccctgcgccaactgcacggcgtctatgaggcgattggcggcgaaaccctcgacttggcgaacttccgccgcaaaatgcttgcctcgggcgatcttgaagacaccggggagaaggtgcgcgaaggccgccaacgaccggccaccgtctaccgctacatccccaaacgacctgtcgagaatggcacgccccacgaatccgatggcgacgacatcgtggaactgtccagacaaggtgagcgtgaagaagctctcgacgcgctgatcccatccgcgcgcatctgatttttcccgccgacccgcttcgggccggcatcacagacgtatataggaaaggaaccgctatgaccgcactatccactgcgccgtccgttgacgagatcatcgccaagctgggcgcgcaaagcacctgcgatgcaggactgacccaggacccatggcacttcgacaccaccacacccagctacggtcccggtgcctcgatgctcgaccgtctgcccgccaacgcgccgcgccagcaggtgctgccggacgaataccgcaaggcctccgacgaggagctgcagcagcgcatcaccgacgccaagcagcgtcttggctccaaactgttgattctgggccacttctaccagcgtgacgagatcatcaagcacgccgatttcgtgggcgactccttccagctggccaagaacgccaccgaacgcccggacgccgaccacatcgtgttctgcggcgtgcacttcatggccgaaaccgccgacatcctctccacgcccgaacagagcgtgaccctgcccaacctgtccgcaggctgctcgatggccgatatggccaacatcgaccaggtccaggaatgctgggaccagctcggcgagatctgcggcacccagccggactccgatggcttgcagcagatcatcccggtcacctacatgaactcatccgccgcgctgaaggcgttctgcggacgcaacggcggcatcgtatgcacctcgtccaatgcgcacgccgtgctggaatgggcgttcgcccgcggcaagcgcgtgctgttcttcccggaccagcatctgggccgcaacaccgcccgcgcgatgggcattccgctgagcgagatgccgctgtgggacccgttcaaggcacagggcggcgccgccgatccggccgactacgtccgcgccaagatgattctgtggaagggcttctgctccgtgcaccagcgcttcaccgtcgaacaggtcgaacgtgcccgcaaggcatacccgggcgtcaaggtgatcgtgcaccccgagtgctcgatgcaggtggtcgacgccgccgacggcactggctccaccgcgtacatcgtcaaggagatcgccaacgcacccgccggatccgccatcgccgtgggcaccgaaatcaacctggtgaaccgtctggccgcgcagtacccggacaagaccgtgttctgcttggaccccgtggtctgcccctgctccacgatgtaccgcatccacccggcttacctggcttgggctttggagaacctcgaagccggcaacgtggtcaatcgcatcaccgtggacgaagacaccgcccgcgaagccaaggtggcactggagcgcatgctgcgcgttcacccgtgacatgcttctagctcccctccctgaggggagctgtcaccgtaggtgactgaggggagcagatgacgcaaaaacagaggaaagcaacacaatgagcaacactgaaatcgtcgtcgtgggcgcaggcgtcgccggactgtccgcggcactggccgtggccggcaccggacacgacgtgaccttggtaaccaaggccgaactggtggaatcgaacacctatcatgcgcagggcggcatcgccgcggccattttctccgacgacgacccgaagctgcacgccgccgacaccatggccgcgggccatggcctgtgcgacccgaaggccgtggacatcctcacccgtgagggtgcggagcgcgtccgcgagttcgccgcggccggcgtccacttcgaccgcgacgcgcagggacgcatgctgcgcggcctggaagcggctcattcgcgcgcccgcgtggtgcatgccgggggagacgccaccggcaaagtgctcgaactggacgtctccgccatggtgcgcaagaacccgcgcatccacatcatcgagaacgcattcctcaaagacctcatcgtgcgggacggccacatcgccggcgtccgcctgctgatcgacgggcaggacaaggatctggccgccgaccgggtgatcttggccgccggtggagcaggccgtatgtacccatacaccaccaatccgccggtcgccaccgcggacggcctcgccgccgcatggcgtgcgggcgcccaggtcgccgatctggagttctaccagttccatcccaccgccatggccgtgggcgagcacttcctcgtctccgaagccgtgcgcggcgaaggcgcggtgctgctggacgaacacggccaccggtacatgaaggacatcgatccgcgcgccgaactcgcaccgcgcgacgtcgtggcccgcgagaacttccgcgtgatgcaggcgcaaggcggcaagcccgtgatgctcgacgtgtcgccgatgacccgcgagaaccccgacctggccagcttcctggcccaccgattcccgaccatcgacgcctatacgcgttcgcttggcttcgactggagcaaggagccgatcccggtggcgcccgccgcgcactactacatgggaggcattcgcaccgatctgaacgcccggacctccatccccggcctgtacgcggccggcgaatgcgctcgtaccggtgtcatgggctccaaccgccttgcctccaactcgctgctcgaaggacttgtctacggacgccgcgccggtcttgccgccgtcgcggacggtgacgacgcggtctgggcacccgaaccgttcctgaactccgccaccggtgccgtgttcgaccatgcgccgatcgcgctggccgctcctgccgctacggctgctgctgacgataccgccgccgacaaggtgtgggaccgtacccgcatccagaacaccatgtggcatggcgtcggcgtgctgcgcgacgaggccggactgaaaaccgccatcgccgaactcggtcaaggcctcgccgccgcaaacgcccaggctgatataaacgccgatggcgctgcaagtagcgttgaggctttggagaaccgcaacatgctcaccgtaggctatgtggccgccaccgccgcgctcgcccgcaccgagtcgagaggcgcccacgcccgcaccgactacagcgagccagtcgacaactgggcccactccgtcgcctacatcaaggactgacccatgctcacatcacacatcatccgcgtcgccgtcgaagcggcgctcgccgaagacgcgccctacggcgacatcacctgcgagaccaccatccccgcggacgaaaccggctcggcccacctcaccgcgcgcgaaaacggcgtgatgagcggcatcgacgtgttcgccgcagccttcgccgcgcagaacccggccgtcaccgtcaccgccgccatcaaggacggcgaacgattccagcgtggccaggtactcgtcaccgtggaaggtccggtacgcgacctgctcaccgccgagcgcatcgccctcaacttcacccagcgcatgagcggcatcgccaccatgaccgccgccttcgtggacgcggtgaacgccatctacggcgacgactatgacggacccgtcacccggccacgccgctatgagcgcacccgcatcgtcgatacgcgcaaaaccacgcccggcctgcgcccgttcgagaaatacgccgtggtctgtggcggtggccacaaccatcgctacggactgtccgacgcggtcatgatgaaggacaaccatctggcggcgctcgccgcgcgcggcaccgacctggccggcgcgatccgccacgtgcgcgaacaggtgggccacaccacgcatatcgaagtggaagtcgaccgccttgaccagattcccgccgtgctcgccggcggagcggacaccatcatgctggacaatttctcgctcgacgacacccgtcgcggcgtggagctcatcgacggcaaggccatcgtggaagccagtggcaacatgagcctggagcgagtgccagccgtggccgccaccggcgtggacgtgatctccgtgggcgcgctcacccactcggtgcgcagcatcgaccttggattggattggaactagtcatggccgatacccccaacgcatccggtgaacccggtgaactgtacctggacgccgccgccaccgaaccagtgagcccggcagtcatcgaggccatgaccccgttcctgactgaggcctacgccaatccggccagtgtgcaccagcccggtaaaaccgcggcccgcgcgctggacgcggcccgcgcatcattcgccgcggcgttgggcgcccggccggatgacgtgatcttcacctcaggcggcaccgaatcggacaatctggccatcaaaggcatcgccatggcgcgcatgcgcaagctgggcttgcggccggtctacggactcgacgaaaccgatggcgaacagctggcaagcagccgcccgcgcattatcatttccgctatcgagcacccggccgtggcccaatcggcggcatggctgcacgaatggttcggtttcgaagtcgtgcgcattcccgtggatgcgcaagcacatctcgatctcgacgcacttgaacgcgagcttgacggcgaggccggcgaacgtaccacgctggtctccaccatgctggccaacaacgaggtcggcaccgtggaacccgtggaggaactggtccgcatcgcccacgcgcacggcgtgcccatccatgtggacgccgtacaggccgccggccagattccgattcgttttcgtgactgggatgtggacgccctgtccgtatccggacacaaattcggcacgcccaaaggactgggcgcactgctggtacgcggccgcacacccatcgaaccggtgctgtccggcggagggcaggaacgcggcctgcgctccggcacacagaacgtggccggcgccgtggcgcttgccatcggactcaacgaatcgaatgcgcgcatgcaggcgcagtgccgtgagttggtcgcgtcccgagacatgctcatcgatgcggttcgccgggtcgtgccccgcgtcgacctgaccggcgaccccgtgcgccgtctgcccggtcacgcctccttcatcttccccggcgtcaccggggaagcgctgctcgtcgacctggacgcgcgtggcatcgctgcctcatccggctcggcctgcgccatcgggcgccacgagattcctgccacgttgctggcgatgggcctcgaaccgtccatcgccaaatcggcattacgcatgaccttccgcaagccgctgacccgcgaacaagtcgaacgcatcagcttggccatcgaagagtcctacaccgacctgacccgacactaaatctgacgccacttaccagaaaggaaacgacgtgagcaccaccactccagcgcaacccgcgcagctcacccgcaacgagcgcctcgaccggctgcccttcaacaaggcgcaccgtaaactcctcgtcgcctccggcatcggctgggcattcgacgccatggacgtcggcctcgtttccttcgtggtcgccgccatcgcagccgacccgcacttcaacctcaccccgaccgaaaagtcgtgggtgctgtccatcggcttcgtcggcatggccatcggcgcggcggtgggcggcttcatcgccgaccgcgtgggccgcaaaaccgtgttcaccgccacgctgatcatcttcggcatcgccaacggcgccatggcgctgtcctggtcgctcggcatgctgctcggcgcccgactgatcatcggactgggcttgggcgcggaactaccggtcgcctccacgctggtctccgagttttcgccgaccaaacagcgcggccgcatgaccgtgctgctggaatcgttctgggccgtcggctggatcatcgccgccataatcggctacttcgtgatcccgaacaccggtgactggggctggcgctgggcgctggccatcggcgcgctgccactgctctacgcgattgtcacccgtgtgcacatcccagaatccgtgcgattcctcgaagccaagggtcgcgaagacgaagccgaaaaggccgtgcgctacttcgaggaagccgggggagtggccccggtaacctctcccaagggcaagccgctgccgaagattaagacgcgcgagctgttcggctccaagtacctggcccgcaccatcgccatctgggccacgtggttcttcgtgaacttctcctactacggcgcgttcacatggatgccgtcgctgctcgccgaccagttcggctccctgaccaagtcattcggctacacgctcgccatctccatcgcccagctgcccggttacttcctggccgcatggctcgtggaggtctggggccgccgcaagacgctgagcatcttcctggccgtctccgccgtggccgccttcgcgttttcgcaggccggatcagcggccctcgtgctcgtgttcggcatgctgctgtccgcctccaacctcggtgcgtggggcgtgttgtacgccgtgaccccggaaatctacccgacccgcctgcgtggcgcggccgccggtgccgccgccgcggtgggccgcatcgccgccatcatcgcgccgctcctcatgccgtggttcctgaccctgtccggcggcaacaaggccgtggccttcatcatcttcgccgccgccttcatcctcgcctgcatagcagccctctgcttgcccgagcgcaaaggcctcaatctcgaagactgattacacttcagccttcgctactaaagtggcccacaccaatgtgtgggccactttttgtcttatagctcccgaatgacacggcaagggttgccgtatgtcactgatcaatcgagggaacgacgggtgagattgcgcggtggttttgtgaccagccacgccaccagcagtccggttaccactacgccgaatgccagcgccgcctgcaatccccagatcggcacggtttccagccaatgaccgtccacaccgatcctgcggttccatgccacatgcagccatcccaacgccacgccggataccacgcccactggcgcgccggccagcagaatcaccgcagcctgcgtcaggccgtaacgtctgaggaatcggggtggcgcgcccacggcgaccatcgtggccatgtcgcgctgggcctgcgtgcgggccagcagcagtgaaacgagcgtggccatcagtgccagcaatgccaacaggccaatgggcaccaatgccatattgtcaccccacggcaggcgattcccgtcagtgctcgtggatgccagcggcagattttcgattgcataagctgaggccttctttacggtaacgggggagttgccaccggcgaagtctagatactcacccagatactgcaattgtttgatgccgagcgcctgtgctgttgccgggctcatcaccagcgggtacgcgccgcgcacgtagatggccttgcgcttctcgatatgtgtggcctgagattcgtttgcaattgccggattcggcgaaatggccacacgcaccatacctcccgcgtcgattgtgccggcatcgccgaccaccacaccgcccgcatcaagcacctgtgccgcctcatccgcgttcgggaagccggacaaacgcatcgcattgccatccataatgagattcacgccgcggaaactcggcagtatattcgaatacgttggctgatgggatcggtctatcggcacacaacgtatcggaacgtttggatacagggccgaagcggcatcctggcccacccatgtggacgtgtccggttgctcttggatcgttgggttatcacaagtgtgaccggccgggagcaatgcagcggcatacatgtagccgtgttcggcgttcaacttgtcggaatcgacttcggtcgtatcattgagctttgaccatcgcttgacatcctcggtgtacaccgggtaatgagcgcgtatcggcgtctctttgccaagccggtgtatcgcatccgacaccacagcacggtcgaactcattgctgacatgcacgtcggccccaatggccatccccgacggtccatacgtcatcgtcatcgtggaatttcgctggtccgccaccatggagccggtgattaccagtgtgtacgaggcgatgcacatggtaatcagcaccgcgcatgccgccggaacgaaccgtcgatgatgctcggctgcatccctgagtgccaggcgtgcgccgatgttcagttgggaacccgctttgccgcaccaccgtgcaaaagtgcgaatcgacaacgcaagccctatgacagccaacaaaatcgtggcaacaagcagagccatatgcgtttcggttccggccggaaccgcgcccggattgtgatcggccagcgtgggtaatggcaatgtcagactgagcgcggcgcatacgatggcggccaagaccagaatcggaccaaccgcaacacggagcagtctcaaaggattacggcgaagcttcgtatccacgccattcgcggattcaccgtagccgatttcctctcttgtcgggcgatccttcaacgcatcgactggatgcatacgcgccacatgccgagccggcgcaatcgtcgcggcaaatccaatgatgattgccgtgacaatacccatcggcagcgagccccacgagaatccgtgcaggatctccagcggcgtggatccacgcaatgcgcctatcgcagggccggccgccaaggtaagcgcgaatcccaatgccgagcccagcacgccaccgatggcgccgataacgagaccttgcgaggaaatgattcgactgaggtcacgtggtgcagcaccggatgcggccgcgagcccaagcacacgacgtgactgatctgccgacaccgtaaacgcgggcgtgaccagaaacagtaccagcaacatacccaccagcatggtgatgaccacagtgaccatgtggttcaacatggtagccgcatcgatctgcatcgggtagagctgcgatgcgggcggatagccgtcagtcagcacatggcgggaaatgacgatggcctgcaacaggttcatgctgcgggtgtgcgcccacgtgaccggctctggaccgaccaccaaataatggccatccacgccgacgccatcagattccaatatggctgacatccagccttccaagccccatgccgcggcttcggattcatcggtcagcccgctgactgtccaagcacgctgagtgtcggccaccgcctcgccgatgcgcccgtccaggctcatccagccatcgaacggcggagcgacgaacgtcaccgtgctaccgagagaagcgccgagattatccgccaatgtgcggctgatgacaatctgcgtattattctgcggcgccgaacccttgaccagcttcggcaacattcgttgcaatgcctcaggtgaagcctcggtcatggtcgcggtggaggccgcgttcagatcaatgtcgttcccgcttttcacgtcgatcccagccttggtctgttcgccgggttgcaacgcggtgccggtgatggcgatgagttcgggcgactgccaatacgggagcagccgatcctgttgcggcagaatcttcgcaagctcggcggccgaggccggctgctgggagggatcgtcctgccacgtgccgccgctttcgggtgactgccggaacggttggccggtgcggggcctggcggtggcggtgatgaccgcctgcgtatcagccgggattgtcgccagcgcacgcgatctggtgggcggtatggtggtggtcataccgatggaggccaccattgcggcgattggcagcattaccagcagcaaggacagtagggtgcgggccttgtgccgtagtgcgtcgcgccagccgagtcgcagcgcggcccgataccggttgcaacgtgcgccaaggcttggcctagcggcatggggaatttgggcagagcgaccgacggtggcattggcaagattattgagggctgcgcgtgccatcatgctcccctttcctcaaggttgagcaaatcatccatattgctggagccggtttcatcgatgatacggccgtccttcaaaaacaccgtgcggtcggcccaggcggcgaagcgaggctcatgagtgaccagcagtacggccgcgccgcgatctgcgcgggtgcgcaacacttcgagaatcgtcatgccggcattggaatccagagctccggtcggctcgtcggccagtagtagacggcgtgggccgaccagtgcgcgggcaatcgccacacgttgcgcctggccgccggacatgtcttcaggtcggcgatcagccatatcggctactcccacttcattgagggattgcatcgcggcctcacgtgccttgcggggattccagccatccaattccaaggggaacgacacgttctcggctgcgctcagggaaggcagcagattgaaatcctgaaacacgtagcctatcgatttgcggcggatggccgcgcgttcggccactgacagtgtggccagatcgcggccttcgaccagcacgtgcccctgcgtgggcacatcgagcccgcccgcaagattgagcaaagtggatttgccggaaccactggggcccatgatggccacgaattcacccgggcgaagcgtgagattggcgtgactgagcgcggtgacacgacgtgcatctttgccgtgaacgcgagtgacgtcgtgtaactccagcgcgcatggggaagattgcgggagagaagaaagaacgggagaagtcatgatgtgctcctatgcactattgaatggtggcggtgagtgcggctgagcttgccgtgagaggtgtcgaaacggggtgctgcgccagttgtgctcgcagctgggtctcatccacggtatcgagccagcgcaattccgcttcagtgatgaaaatgtggtggtcgagtactagacgtgtggcgagttcggtgggcggtgtttgccggcgcagtcgggtgatgtcgtgcagcagttgctgcaaagcgtggcgttggtgttggatgagttcggaaacatcgaggccgggtatttccacggcgacggccagcttcatcaccagttcgtcgcgtccgcgttgttccggggtaataggggagcgccaccatcggtcaagctcttgggcgccggaattggtcaatcgccataatggtgcggccgctgcggtgccgacatcattggatccgctagtagtcggcgcggtctcttcaataagcccgtcgcggttcaaccgctgcagcgtagtggaaacttgccccatattgagcggccaagtcagaccgatggtgcggtcgaagtccttcttaagctgataggcgctggccgggcctcgctccaacagtgctaatagcgcttctctgattgccataccgcatcccctttgcatagacggtttgccttgggcgaaggttactgagtaactatcgttggatatcaggttactcagtaactacccatgacgatgctgtactcagggatgattcaggggagattcagggatacattcagggatgcacttggcgccccctcagttgcccacggcgacagctcccctcagggaggggagtcgagagtgtggaatacaacaagtctcgcaagccagatgacatgtgactaattctcagaaagccgggcccgttgtgtgtcaaggtgtgccagtaacatcgtgacggtttgtgtgtaggtacaggtagatatccaagagcaagtactcgagaacgcaagtaccgaacgattacgcaagaaaatcagtattaagagaggtttcgatggcggttcgtggagatatccgtaatgtggcgattgtggctcacgtcgatcacggcaagaccaccctggtcaatgccatgcttcagcagtcgcacgtgttttccgagcgtgaggaagtgccggatcgtgtgatggattccaacgatctggaacgcgagaagggcatcaccatcctcgccaagaacacggcagtggaatacaccggcccgctggctgccaagtacggccacccggagggcatcaccctcaatatcatcgatacccccggccacgccgatttcggtggcgaggtcgagcgcggtatctccatggtcgacggcgtcgtgctgctcgtggacgcctccgaaggcccgctgccgcagacccgtttcgtgctgcgtaaggcactcgaagccaagctgccggtcatcctgtgcgtgaacaaggtggaccgccctgacgcccgtatcgaagaggtcgtcggcgaaacctccgacctgctgctcggcctggccgacgacgtgcagcacgagggcatcgacctgaaccttgaccagctgctggagatgccggtcatctactgcgccgccaaggccggctacgcctccgtgaaccagcccgccgacggtggcctgccggacaacgacaaccttgagccgctgttcgaagccatcatctccaccattccggctccggaatatgaagagggtgctccgctgcaggctcacgtggccaacatcgactcctccgacttcctcggccgactcggcctggtccgtatctacaacggcacccttgagaagggcaagacctatggtctgtcccgtgtggatggctctctcgagaacttccgcgtctccgaactgctgcgcacccagggccttgaccgtatcccggtcgagtccgcaggccccggcgacattgtggccgtcgccggcgtcaacgacatcatgatcggcgagaccatcgttgaccccaacgatccgaagccgctgccgctcatccacgtcgatga

SEQ ID NO: 517 - DNA, 2564 bp, Unknown
  R48_24m  MAG No. k141_50513
accatgatcaccaccgccgtgatcgcttatatctgcattgtgctgttcgccgcgttcttcttgcgttccgctacggaattctggattcttgcgattcttgtcggcttgttccaaggtggtatccaggcgttgtcgcgctcgtattatggcaagatcatcccaaagaaccgtgccaacgaatattacggtttctacgatattttcggcaaaagtgcatctatcctcggttcgttcatggtcgcgaccgtgacgagcatcaccggcaacccctcgctaggcgttctctctattggtgttctactggttttggcattggtcttccttgttctccagaaggacccgatgaaggcttgaatcttacacaaaacgagtgtgtaacgacggtttgtgtaaggttttgtgtaacgatcggcgtttttgtgtaagtctgtgtaaccttgccatatgcggtgttgtagaagcctcacaaacggcggaatctcaatgattcccgcatcttccgccattccgggattataaaagtatgactttcgtcacattttcttgttctttgccgattttcgctggttttgctgtgccctgcgccgatatccaacccgtgagttgcgtggattgcaggccaccgaaggcggccaccacgcggcgaaggcaggtaaaaaagatgaagatcaggatgagtgccgagcaggttgcaggtctgttcgagttcgctatgccgcaggatctcgacccgacatcgatggagccgatgaaggtctcccgcgattccgccgagctgaagctcatggacggcaaaccggtcttagggtgagggtgacggccctcgaccgcgagactggccgtgagatggacgccgtgagcctgaaaatcaagagcaagccgcaggccaagatcgggcgtactttcgatctgaagctggaacgggaacaacaacccgtccgcgacggactggatgctcacggtctcggcggagcagaacggcagggagatcacggaggccgatctggtcgatgcgttcgaagactggagctggatgagacaacgggaggaaggcggccataccggctaccggcactaccagctgttcatgcaggcgacgagccggatcaggctctcgacggttcgggcgcgtcttgagaaaaggcacggcatccatgtgaattacatcgagccgagacgctattcggcggcctcctgcgtgacctacgtctcgaagaaggagacacgtcaggcggggccgttcctccacggcgatttcgatatgcacgaggatcagggcaagcgaaccgatctggaggaattgcgtgacgccgtggtgaagggcgcttcggtgaacgagatactgaacgacccggaattgagtctgaaggccgcacgcttcatgccgtggcttgagaagatggtgggggcacagcaggccgcccgtttctcgcaggaggaccgggaagtgactgtgcattatttgtggggcaaaccggggctgggcaagacgagaagtgttcttgatggcgaccggtcgcaaatttttcgtgtgacgaattatgagcatccattcgatgattactcaggccagtccacgctggttttggacgagttcgccgggcagttgccgttccagctactgttgaacgtgcttgaccggtacccttgcaagttgccgtgccgatttcataacacttgggccggatggaccaccgtgtggatcatcagcaacaagccgctcgaacggcagtaccaagacgtggagccacaggtcagggccgcccttgatcggcgaatcacgaccaacgaggagttcaagtcggacgaggagtttgtcgccatcgtggcacggaccgaagccgaggtgaacgaggatctggccttcttggaaacgctttccgcccagccggattgggacgaagagccagacggtgaggattgcctgtagccgatttttagcccgatctgcgcttgagatgatggggcgtatcaagatcggcttctactggcatcgaccggctaaggtatcgcaggttcccgtgaacctgcacgcggtttcgaggcatcgggaccataggcaaaactcgaccgcatacgacaggggtgggcacgccgcaaggcatgcccacccctgtcagtcctcggaaaccgagccaccccaccttagcggcgggacttacccaccacgaggagaccggcggccagcacggccagcagagccagtatgccggcgacaccgatcacggacgcgccggtcttggacagatcggactgctcgtcgttcttggactcggacttcttgtcatccgcagccggcttgtcattggcaggcttgttgttggacggcttgttgttggacggcttgttgttgccgccattgtccggcttgctcggttcgaccggcttcgagggaacggtctcggccttcttcaacccggcctgggcgtccgccagcgccttcacggcggcgtccacatcggcctgcgaggcgtcctgcttggctgcgacggccttcgcgtcggccagcgccttggcgaacggagtccacgagtcggcggtgtagtccttctcggccagcttgc

SEQ ID NO: 518 - DNA, 3759 bp, Unknown
  R48_24m  MAG No. k141_50975
tgtaatcaagcccacagccaatatgcgtcagggcagctagtgtttgcacttgggttctgctaggttttcatagggttaagtgtgatacaaggaaggcaggatggtgaccgaaaacacagcaccaaacgccgccgctgacgtggagatgagccagtatgtggctgatcgtacccgcgtcaacgaggacaagatcaagaaggatgacgagatcatcagccagttcggcgactacaactatggttggcatgattctgatgccgccggcgaagccgcaaaacgaggcattgatgagaacgtcgtacgcgcgatcagcgccgacaaaggcgagccgcagtggatgctcgacatgcgtctgcgtggattcaaggcgttcctcgaaaagcccatgcccgattggggtgtggatctttccggcttcaacgccgacgacttcaagtactacgtcaagccgatcgagaagcaggcgaagtcgtgggaggagctgccggacgacatccgcaacacctacgatcgccttggcatcccggaggcggagaagaaccgcctcgtctccggcgtggctgcccagtacgagtccgaggtgatctacaactccattcgtgaggacctgaagaagcagggtgtgatcttcgtcgacacggacaccgctgtgcgcgaataccctgaactcgtcaagaagtacttcggcaccgtcgtgcccccggaggacaacaagttcggcgccctcaacaccgcggcgtggtccggcggctcgttcgtatacgtgccgaagggcgtgcacgtggacatcccgttgcaggcatacttccgcatcaacaccccggccatgggtcagttcgaacgcacactgatcatcgcggacgaaggctcctacgtgcactacgtggaaggctgcaccgccccgatctggtccgaggactcgctgcacgccgccatcgtcgagatcatcgtcgagaagcatgcccgcgtgcgctacaccaccgtgcagaactggtcgaacaacgtctacaacctcgtcacccagcgtgcctacgtgcgtgagggcggcacgatggagtgggtggacggcaacatcggttccaaggccaccatgaagtacccggcctgcatcctcgccgaaccgtacgccaaggcatccaccatgtccctcggcttcgccggcaagggccagtaccaggacacgggcgcgaagatgattcacctcgccccgcacaccagctccaccatcgtcgccaagtccatctcgcgcggcggcggccgctccgcctaccgcggtctggtcaaaatcgtcaagggcgcgtacggttcgtccaactcgaccgtgtgcgatgccctgctggtcgacgacttctcccgctccgatacctacccgcacgtcgacgttcgcgaagacgacgtttcgatggcccacgaagccaccgtttccaagatctccgaagaccagctcttctacctgatgagccgaggactcacggaggaagaggcgcgaggcatgatcgtgcgcggcttcgtcgaaccgatcagccgcgagctgccgatggaatacgcgcttgaactcaacagacttgtggaacttcagatggaaggatcggtgggctgattccgatgaccgacaacacaacacccgtcaaggaaatcaagattccggtcgccgaccccaacgacccgtacgcgattccggccgccatgccgtcctccgtggaccatgccgtgcgttcgttcaacgcaggcgactacccggagcccagccgcaagcaggacgaatggcgctacacgcctatcgagcgcatcaacgagttcttcaccgtgttcaagccttccggcgaaacgcagatcgaagtctccatgattgacggctcgccgttggccgaaggcgtgaagctcagccagatcaagctcggtgagggcctgtccggcactgtgtccaagcccaacgaccgcgtctccgcagtcgaatgggaatccggccacaccgcaaccattctggaactgtccggtgagatcgcccagcccgtgctcgtcaaggtgcacggcgcgggggaggacctcgacgctttccatctggtgatcgccgccgccgacaaggctcatgcggacgtcgtcgtggaacacgacggtgacgcacgactggccgaaggcgtggaaatcaccaccggcaaggactcgcacgtctccaccacgttcgttcaggaatgggccaaaaccgccaagcatgtggccaaccaccgcatccacgtcggcgaaggcgcatccctgcgccactccgtcgtgaccttgggcggcgacatcgtccgcatccgcatggatcaggacttcggcggcgaacagggcgacctcaacatgctcggcatctacttcgtggaccccggcgagcacatcgaacaccgcacgatggtggtacacaaccaccccgactgcaagtcccgcgtggtctacaagggcgcgcttgacggcaagggcgcgcactccacttgggtgggcaacgcgctcatccagcccaccgcccccggcaccgactcctacgagctcaaccgcaacctggtcctgaccccgggtgccatcgccgattccgagccgaacctcgaaatcgaaaacggcaacatcatcggtgccggtcacgcctcttcggtgggccgcttcgacgacgaggaactgttctacctcgaatcccgcggcatccccgaaaccgacgcccgcaagctcgtggtgcgcggcttcttcggcgaactcgtcgaggagatcggcattcctgccatctccgaacatctgatgaccgtgattgaccgccgactggcccgtggcgaaaacgacgccatggcacaggtcctcgaagacaagtaagaacagcatttttaggagcacaacaatgtcaacactcgaaatcaaggacctgcacgtccacgtcgaaaccaaggaaggcatcaagccgatcctgaagggtgccaccctgaccgtccactccggcgaaacccacgccatcatgggccccaacggttccggcaagtccactctcgcctacacgttggccggccaccccaagtacgtggtcgactccggcgaggccctcctcgacggcaaggacatcctcaagatgactccggacgagcgcgccaaggccggcctgttccttgccatgcaatacccggtcgaagtaccgggcgtgtccatgaccaacttcttgcgcaccgccaagaccgaaatcgacggcgaggctcccggtattcgccagtgggccaaggacctgtccgcagccatgaagcgcctcaagatggacccgaagttcgcctcccgttccgtgaacgaaggcttctccggcggtgaaaagaagcgcgccgaagtgctgcagctcgaactgctgaagccgaagttcgccatccttgacgaaaccgactccggcttggatgtggacgccctgcgcatcgtgtccgaaggcgtgaaccgtgccaaggaagccaaccagttcggcatcctcatggtcacgcactacacccgtatcttgaagtacatcaagccggacatcgtgcacgtgttcgccgacggccacttcgtcaagaccggcggccctgagctggccgacgaactcgaagagaacggctacgaccagtacctgcccgaaggcgccgactccgagtccgcgctggcctgagtccgtgaccgtgggagtctgacatgccctattctcgacacgctccgggccactcaggccaagtctttacggtcgcgaacaggccatgtcagactcccactcgtttcgtacaa

SEQ ID NO: 519 - DNA, 23526 bp, Unknown
  R48_24m  MAG No. k141_51611
agaccgagggctagtgttcgaggtctacatccacgtcccgttctgcttgcggcgctgcggttactgcgacttcaacacctacacggctacggatcttggtgcgggggcctcgcgcggcaactatgccaatatggtcattcgtgaaatggccctgaccaagcagtggcagctcgaccacggcatcgaggagccaccggtctccaccgtgttcttcgggggtggtacacccacgattctcgccgcccgcgatctggtcgccatgctcgatgccatccgcaagatctggagcatcgcgcccgacgccgaaatcaccaccgaagccaacccggacacggtcaacgaatattacatcaatgagctcgctgccggcggcttcacccgcgtttccttcggcatgcaatctgccgtgccgcacgtgctcaaaaccctcgaccgcacgcatacgccggccaacgtggccgcaggcgttaatgccgccaataaggccggcctgcgctccagcgtggatctgatttacggcgcaccgggggagagccttgacgattggcgcacctcggtcacgaccgccatcgacctcggcgtgaaccacatctccgcctacgcactgaccgtggaacccaccacgaaaatgggtcgtcaaatcgcggccggcactctgcccaaacccaatgacgatgacgaagcagccaaatacgaaatcgccgacgacctgttcgccgccgccggcctcgaatggtatgaggtctccaactgggcccgccccggatacgagagccagcacaacctcggctattggcgcaacgtcgattgggccggtctagggccaggcgcccactcccactacaacgcggtgaccgaggctgaccacccccagtcggcttcgctgacagcccccgccagcgggggcaagtccgaagccattgcctctgcctcagctgatggacaggccaacgccgaacttggagaaaccaacgccgaactaggtatgatcaacgcgcatgggaacaactcccaagaaattcatgcccccgctggcgggggctgtccggcggatgccggactgggggtggtttctgtctcacacggtctgcgcagctgggacatcgcgcacccgcgtttgtggggcacggccatcaacgagaaccgtgtgccgtgggccgatagcgagacgatcactcccgaggaaaacctcgaagagctcatcatgctcgggctgcgcctgcacgagggccttggcctcgaccgcatcaaccgcgccatcaacgatgcaggtatgagcagcacgccccagactctccgaaccgtttcggttgaccaactcgcccccatgatcagcgaaggcctgattaccgtatccgataatcatcgagtggtgcccactcgtcgtggccggttgctcaatgactcggtaatcgaacagttcttcgattacgtcggtgtatgagtcggtggtatggtgcgcggcagtcgccattacccgttcgctagttgtggttacaccgtcagagggagcttttttgttttaccggcgggggagggaaccgcgtaggactacgtccggggcgctttgcacgtagatcaggcggttggcagtgccgccggtggcctccgcgtcatcgcggttggacaggatgctgtccacggcggcctggcccatttcggccagcggcaggtgcacggtggtcagtggtgggaacacgtcggcggagtaggggatgtcgccgaaaccggtgacgccgatttcctgacccggctcgatgccgttggtgcgcaacgcggtcatcgcaccgatggccatcacgtcgttgagcgcgatgattgaatcgatgcctttgccgtcgtacagtgcgccttcgcccggcttcagcagtccggatcgggccatttgcatgacggccgcatagccgtcggtgcggctgaacttaccgtttgccacggctttcgggtccacggtgatgcctgtctcgtccaacacttccatcacaccggccagtcgttctttggaggagcggtgtgcgtcatcgcccttgagaatcgcagggcgcgtatacccggaatcgacgataagctttgcgatggcacgcgcgccgacgtcgttcgccacgtccacggccgggaagggcaggttgcggttgagtacgaacacggcatgtccgccggacgattcgtactggatgagttccgtctgcaacgcctggcgttccggcgcgtcggtgtattcgctttcggagatgatgatgccgcgcggcctggtggatacggacttacgcaccgcctccaactcctcgtgcggggtggctgccacgccgatggtcacggagatgccgcgttcggccgccgccttgaccacgccttgcgacacggatgcgaagtagggatcggagatatcggagaccagcagcacgatgttcggtgcagtgcctttggccactgcctgagcataggcgttgggacgatagttgagcttggtggctgcttccatcaccttgacatacgattggttgcgtaccttgcgggtgctgccgttgagcacacgggatgcggtggcgatggagacctgggcttctttggcgacgtccatcaatgtcgctggcgattgcgccttatcgttctgtacagccacgatcgaatcggtccttttcttccctgaaacggaaagcatgtctaaacgcttaccgcaatgataccgcagttttgcttgcaatagtagcattgtggattggaaagcctgaattttgaacaaaaataatcacgcgaattatggaaagcgcttaccgttccgcgtgtcgtgcggtatgctcgaagcgtgacgcgatacttatgtgcccctgactccttcaaagagagcctgaccgccatggaggcggcccgggcgatggctcaggggattgagaatgccgaccacgatgccgaggtccgttgcctccccatggccgacggcggtgaaggcaccgcacgtgcgcttgtcgacgccactggcggatcgatgcacgccgtgccggtccacgacccgctcggccgacctgtcgaaggccacttcggcctgctcgccgacggcacgaccgccgtggtcgagacagccgaagccagcggactggcactgcttgaagccaaagaacgcaacccgttgatcgcctcctcctacggcaccggcgaactcatactcgccgccgtccgttccggagccaagcgcatcatcgtcgggctcggcggcagcgccaccaacgacgccggtgccggacttctgcaggccctcggcgttcgtcttctggacgggaacggcaacgaccttaagcacgggggagcggccctcgctgatctggccaccatcgacatcagcacgatggacccggctctcaagaacgtctccatcaccgccgcctgcgacgtgaccaacccgctgaccggtcccaccggcgccagcgccgtgttcggaccgcagaaaggtgcctcccaggccgacgtcgccacactggacgccgcgttggcgcacttcgcgcaggtcatcgaaagccggctcggcgtcgctgtgaacgacgtgccgggcgcgggcgccgccggcggtatcggcgccgcgctgaaaggcttccttgacgccgaattccgtccgggcatcgccatcgtcatcgaacaatccggacttgatgcggccgcgcaatgggctgacgtggtgttcaccggcgaaggctccatcgacttccagaccaagttcggcaaaaccccggccggcgtggccgaaaccgccaagcgccacggcaagcccgtgatcgccgtcgccggacacatcggcacgggcatcgacgaactgcatgaggtcggcatcgacgcggtattcggcatcgcccccggtgccgccagcctcagcgaactgctggccgacgcggccgccaacgtgacccgcaccaccgaacaagtcgtacgaaccctacaactgaagcagcttcacaagctccctctgatgggccgagccgtgaaggaaacgccggaggcgtttccaggcgagggcttgacgacagtcaacccagccgaaggctccataattgcgggacgagctgccgcggcaaagccgtgactgagggggagacttgtggcgcagccgcaaaaaatggcatcggctttcagccgatacagtcattcgtctgcttctctccctcagtcagctgcgctgacagctccctcgtcagagggagccacacaattcggaaaggaagatatgcgcaccatgctgtacaccaaggtgaccagcatgctgagcaccacgggcatcgccagcgagaaatacgccttcggaattggcgccttttcgaagagttcgttatccatttccgtcccttggtgttttcgttcttcagtcactgcgcgggatgccgttcggcgtgcatcacaggcattgtagaggcaacagtgtggacaacgggcggggggagtatctcatgatgcggtgagggcgttgatgatgacgcatcgtgtattggtggccgtgtgcatcgtatgtgaacctgtgctggcacggcgtacacacgatgggaaaagaaagaatatatggaccccgttgtcccggttattgttcagttattactgtgttgaattattgcgttattcaattattgtggtgtgccggccgattgcggcctgcgggggattgccttcgtatgtgtcgtgcaatctcatgaatgggatcgttcgctagattcagcgagcgtccttgttggcggcgttgatgatgtcggcgaacatcttggagtcggcgtagccggcgcgggcgatggcgtccataccggagagggtgaaaccgcgaatcatggaatccatgaatgacataatgtgttccttgtcttgacttgcaaagccgtgggctttgcgatgtgttgttgtttacgttatgagacgggccgtgtgtgagcggcgagtcagggaagaggctcagcgagcgttcttatcggtgtcgttgatgatgtcgagaatcatctgggagttggcgtgaccggactgggccagggaagtggcaccgtacatagccagaccgcgaatcatggaatccttgagagacatcatgtttcctttcgttggtcaaaaccttgtggctttgagttttgtttatcggtttctttctgaaaccggtttcagaataacgcagtccgatgacaaacgcaaggggactattccgctctcggcgtttctggcggaatatcgccgttctatagataccgttcggtagttaagaggctgtctagtcgactttctgacggtcttgttctgggcgcatggttttcacgaaatggcctcatgtcgcggaaatcgtacgctgagtcgtcgtaagcgtacggtcttcacgaaatggggtctcatctcgtgaagaacgtacactgagtcgttctgggcgtacggttttcacgaaatggggcctatcttcaccggattttgggcacaccggccttgagcagcttggtctcaagattgatggggcgtagcagatcctcatagaacacatggacgatttcggtgacgccctgttcccggagatgccgatcacgtctgcggtcgtactccattttcgcctggaggcttgcgcgattcttgttgctggtgtcggcgtatttggccatgccgtcgtattctgccacgatgatgcggccgtctgcgagcttccaacagaaatcgacgcgatatggcattgcgggattgtcgggattcatgaactgcacctgcagcaggggaatgccgaaagacaattcggtgatctggccacgcatcaatgattcgccgccgttttcgctcaggggatccgcgtacttcagcagcttggtcacggagacctcgtcgcagacgctttgaatcatcagcgactgcacctcttcgatggtcgtcagggactttctcagagccgaatcgtatatgggcagcgcctgtgggaatgggaatgccgcgcagtcgagcagcgttcgcgccggagtcgtcaagagaatgccattatgcttccgcgtcggaatccgattgatatagatgcggttgagacgcgcctcgtctccgccgccgatgccggacttcgaggcgatgtgcactgtgccgtcgtgcagggaatagttgtgctgcagtccgtatacgcacgccgcactcaaccccgcaaatacccactgagggtggattgcggacagcgcacgtatgacctgcaatgactgttgctctctggtcatggtgttccaaagtattcggtcggcgtacaggttcttatacggtgacaccagctccccggcatgcaggcgacgtttcagggcgcgccgttgcgcatcactggtgccatagcagcagcgacgctcctgcttcgcctgctgcagcagtgcagaaacttccttgtgttctttcatatctcgacgctaagggtgattttgattgttgcacaagctcaaccggcaaatgtgaatactatgtcacgcgaattgttggtgtggataacttgaatcgacgtcgacggctttgccgacggtcttgtcggaggcgatattagcctaggacaccttgctgcgccgccttccataccgagaacagtcatcagtgacaccgagggcatcttcaacgtatgttcttcacgaaatcagctgccatttcgtgaaaaccgtacgctcagaatgactcagtgtacgttcttcacgagatgaggccccatttcgtgaaaaccgtacgttgacgacgattcagtgtacgttcttcacgaaattagggatgatttcgcggaaaccgtacactcaccgcaactcagcgtacggttttcgcgaagttattgatttggatataggttccccgtcatgaactacaatgaatcgcggcgaaaaacggggaaccgaagtcggagcgcggctgaacggatatgggtgtgactggatgactgccatggtgatgccggttctccttgacgtacgcaacaacaacaactgacaacaacaggggagacaaggatggcgagaagtgcgggccgcacccgaccggtgatcaaggacgtggccagactggccggagtctcggcaccgaccgtctcccggtatctcaacggcaccgtcaatgtcaccgaagacaagcgtgaacgcatcgccaaggccatcaaggagctgggctatgagccgagcattgtggcgcgcgccctgtcgaaccgggagatggactccgtggtggtgttcgcggccaatccttccgccttctccacgtccgaaacgaaccatggggtcgaggccgccgcccgtaaacgtcggttcctgctcaatatcgtttctttggatgagtccgacatggactccgtcaaggctcgtgtgcgcatgggtttgtcgatcaggccggcgggcgtgatcgtctacgagtacgaccgggccggcatcgccgcactggaatacattcccaaagatatgccgatggtcgtggtgggtggcagcttcggcgacggcgaataccagatcatcaacgccgaaagggatggtggccgttggatgaccatgcatctgctggatctcggccatcgcaccgtgttccatgtggggcgcccggaaggaccgaccgataacacccgcaccaatgggtggcgtgacgcgctcaaggagcgcggcgtcacggtacctgacccaatcatcgtgcccgacgatgatttggaggagtcggtcaaggctgggcgcaccttgggccgtcgtggtgatgtgactgcgattttcgccggcaacgacgagaccgccatcgctgtgatccgaggtctaagggaggttggtcgccgcgtgcctgctgacgtgagcgtcgtaggctttgacgaccgcaacttcggtgccatgtggaatccggcgctgaccagttacacccagaacttcctggacatgggggagcggtccttccggatgctgttcgaacagattcaggccaagcgtgccggcgatgacgcgccgccctcgcaggtcgaagtggtgcaaggcaagccgtgtctgcgtgcctccgaacgcgcgtacggcgacggcgaaatcgcgtagtcgatggggcgtgcgtatcaatcgatagtgactgtagcgcattcatatcgtgacgaggagtctcccatgccgaactgtaagcgcttaccttaaatagttcgtaatgtgatttacgtcatactaatagatgttctgaatcatagtgttctgcaaggattccttgcggaaaatggctatttatcaacagttttcgaaaagtccgcatgatgggcgactgtgagcacgctttatggtaatcgctttccgtagtgttattgttacagtgtgacttttgaacaatcggtaactctgaagactcagccccagacctcgggcactatctcagcggcagacgccgcgatgcaatcggcccgcgacgaacgcatccccggcaaactcatctgcgcgatcgtggcccattcttcggcatcctgaccgaaaccgtgatgaatgtgctgttcccgcagctgatgggcgtgttccacatcagcgaggccaccatccaatggctcaccaccggctatctgctggtcgtgtcgattactgtgccgctcagcgcatggctgcgccgtcgcttccgccagcgcagcatcttcctggcggcaacgcgatgttctccacgctgcagcagttcacgggtgcggccggcaccactgtggtgggctaccgtgatctccgtgttccagtccggctcgggcaaggtgggttccgccgactatgccgccgccaccgtgaccggcgcatagattgactacgcgatcatggctgtggtcatcgttatcgttatcgttatcgtgttcgtcgccatgctccacgccctgcgtaaccggaagtagatggtaagtcgagtggcaccatgctaccgcgcaatggctgggcatggagttttggctaggaatcgttcgacaggcgttggcgcggccgctgagagcattcgcgtcgaaaggtttgccggagctcgttcggcgtggaatgggccgattcaccggtgattgttggtcaaacagccaatgctgacccttctgccaatggttagcgaggttcctatcataagcatttcggagagcgatctcgaaaaaggcgacatccttcacgaggatttgaccaaggtcaacattccactcgtataaagtaaggctgtaagcgcatcttggtggcaagcgtcaaggtatgtacggaatcgcggggcggaaagccactcctcaatccactgcggattggtaataacggatgattgtaacgcatgaatcacgaggcccccttacctcgtattgcaatgccccggtgacatgaaaaacggcggtcaacacggggcttgtacattaaggatacaggaagggtagttataagttgctgatatgccgtgttttttacgatagtcatcggcctctcccatacggcggaacaggaactgacggatgccgagatgccgtgattcggcgggaggacctgtactggcccagtccttctgctcggtagcggtaccgctacgccgactcttcccgacgctccagtgccgccgatatcagtgaatgcccagcctgatgtcggtagagttaaggctattggcttggtctcgacggtgagacttctccaatggccaatatgcactgttgcaaaggagtatgcggtatgcaaccaatcaaagccattcaatacggctgcggcaaaatggcgaagtacacgattcgctatatgcacgagaaaggcattcaaatcgtcggtgccatcgacgtgaatccggaagtcgtgggcatggatgccggtgtgtttgcaggcatcggccccatcaatgtgccgattcgcgccgatgccgaggctgtactcaacgagtgcgacgcggatatcgcggtagtcacgctattcagcttcgagaacgaaatcgccaccatgtgcgagcagtgcttggcccgcggcatcagcgtgatcaccacctgcgaggaatgcatctacccgtggaccaccgatccggccaccacgaaccgtctcgacatcatcgccaaggaagccggtgccaccatggtcggctccggcatgcaggacatctactgggtgaacatggtctccaccgtcgccgccggatgccacagcatcaagaagatcaccggtgcggtgagctacaacgtcgaggattacggcctggctttggccaaagcgcacggctgcggtctgaccgccgaggagttcgaggccgagcttgcgcatcccgaaaccgtggtgccctcgtatgtatggaattccaatgaagcgctggcccagaagcttgggcttaccatcgcatcgcagacccaggccagtgtgccgtatttcagcgatgtcgacgtgtattccgagacgatggacgagacgattccggtcggcaaatgcatcggcatgtccgccgtggtaaccaccgaaacgaatcagggcatcacgttggaaactgcctgtatcggcaaggtgtacgggccggatgatggcgatatgtgcgattggaagatcgagggtgaaccggacgtggagttccacgtggtcaagccggcgaccgtcgaacatacgtgcgccacaatcgtcaaccgcattccggacgtgctcaacgcgccagccggatatgtgacggtcgatcagctcgatgaaatttcatatctcacgtatcccgccgcgctgtacgtggcatagacccatattttcagggatgaaggccggcactcataagggtgccggccggtatcaggcggccagagtcgacgtgcgtggcatcacctggaactggatatggtcatgggtgatgtcatcgggccgttcatgccgtaggttcgactcgatcagcgtcaccatgcgatcgataaccgtacgagccattgcggggacgtctatcgccacagtgctaatgggtgggttggcgcagtcggagaaggggatgccgtcgactcccatgagccgtacgtcgtcgggcacgcggatgccatgttcggtgagttcgcggagcgcgccgatcgctatggtgtcagacatgcacaggatgccacaatcgcccgggacaggcgtcaggaccgcaagcagcatcctgctcggcatcgtcggcgacatcgccaacttcaaaagcgcggcccacctggccgcccacgccggcatcgctccggtcaccggccagtccggcaccagcatcaagaggcgagaaaccctccagacggggcaacaaacgcttatagactattgcgccttgtataaatgcgaactgccagtcaaccttaccgttgactggcagttcgcatttatcgctcccgctggcgggagctgtcatgcgaagcatgactgagggtggtccacagccgccaatccgtaacatcacccaacgcagcatttcacgatacggacgtttccgtatcgtattttcgtgtggtcaaatagacatttcgagcgaaaaagttcgaaatacccccataactggccataaaaacaattgcttgagaatcactattgacttttatggcgactcggtatatggacacgcgaaacgaaaatgacatggagcaacggtactgtgtcaacagcaatgaacgaagaggcacgattcccttacgtgcccacaagcaattgaggtgattccggtgacattcaaagccccgctcgatctcacggtccacgctccggacggtatgtatgatcccgccaacgagcatgacgcctgtggtgtgggtatggtcaccactttgaacaagcgtcctgaacgcaaaatcgtcactgacgccattgaggtactggtcaatctcgaccaccgcggtgccgtgggtgccgaggagaacacaggtgacggcgccggcattctgatgagcatgccggatgagttcatgcgtgccaccgtgcccgccgaactgcccgaagccggccactacgccgcaggcatcgccttcctcgaccgcgacatcgaaacctccggtcagcaggaacaggccatcgccaagatcgtgcgcgaggagggccttgaagttctcgcatggcgcgtggtgcccaccaacccggacggcctcggcctgcaggcccttgccgccatgccgggattcaagactctcgtggtcgcctctccggacggtgctctggccggcgtggacttggatcgcaagaccttccgcatccgcaagcgcgtcgagcatgaggtaggcgtctacttcgcttccctgtccgcccgtaccatcacgtacaagggcatgctcaccaccatgcagctcacccacttcttcgaggatctgaacgacgagcgcatgaaggccaccatcgccatcgtccactcccgcttctccaccaacaccttcccgagctggccgctggcccagccgttccgtctgctggcccacaatggcgagatcaacaccattcagggcaaccgcaactggctctccgcccgtgaaggtcgtctgagcagcgaactgctcggcgagttcgagccgctgctgcccatcaccactccgggctactccgattctggcaccttcgacgagtgcctcgaactactgcacctcgccggccgttccctgccgcacgccatctgcatgatgctgccgccggcttgggagaagaacccggatctcgatccggacgtgcgcgccttctacgagtacaacaacacgcttatcgagccgtgggatggcccggccgacatcgtcttcaccgacggcacccaggtcggcgccctgctcgaccgcaacggcttccgccccggccgctggcagctcaccgacgacggctacatcgtgctggcctccgaggccggcgtgattccggaaatcgagcaggaacacatcgtgtccaagggccgtcttgagcccggtaagatgttcctagtcgacaccgccgaaggccgcatcattcccgatgaggagatcaagaagaccctcgcttcccagcacccgtaccgcaagtgggtggaaggcaactcggtcgagatgagcgatctgccccgccgcgagcacgtgagccactccggacagtccgtccagcgccgtcagcgcgccttcggctacaccgaagaggatctgaagctgttgctcactccgatggccaacaccggtaaggaaccgctgggatccatgggtaacgatgcgcctatgcccgcactctccagccgcagccgcatgctgttcgactacttcacccagaagttcgcgcaggtcaccaacccgccgctggactgggagcgtgaggagatcgtcacctcgctcgaatccgccatcggccccgagcctaacctactggccgattccgagctgcacgccaagaagatcctcatcccgctgcccgtggtcaactctgatgagatggcccagctcaagcgccttgacaaggcccgcatcctcggcggctactatcgcccgtacgtggtcaagggcctctaccaggtcgccggcggcggcaaggccctcgaagagcgacttgacgagatctttgccgaaatcgatgaggccatcgccgacggcaagaacttcatcgtgctctccgaccgtgaatccaaccacacgtggggcccgatcccgtccctgctgctgacctccgccgtgcagcaccacctgctgcgccgccacacccgtacgcagatctccatggccgtcgaggccggcgacgtgcgcgagattcaccacgtcgcactgctgatcgcttatggtgccgcctgcgtgaacccgtacctggccttcgaatccgttgaggatttggcccgtaacggctacctcaaggtcgacgcggacaccgccgtgaagaacctcaccaaggcgctttccaccggtgtgctcaagatcatgtccaagatgggcgtctccaccatcatgagctaccgtggcgcacagctgttcgaggctgtgggcctgagccaggaagtcatcgacgaatacttcaccggcaccacctcccgtgtgggtggcgtgggccttgacgagatcgccgaagaagtggccattcgtcaccgcgtggcctacccgaaccagtggagcgcatccccgcaccgcaacctgcgcacgggcggcgactacaagtggcgtcgtaccggcgaggaccacctcaacgatcccgaggccatcttcctgctccagcagtcgacccaccgtggcgactaccagatgttcaagaagtattcgcaccacatcaacgacacgtcgaaccgactcatgaccctgcgtggcctgatgaagttcaacaacaaccgcaagccaatcgacatctccgaagtcgagccggcctccgagatcgtcaagcgcttctccaccggtgccatgagctacggttccatctcacaggaagcgcacgagacgcttgccatcgccatgaattcgattggcgcacgctccaactccggtgagggcggcgaatccgacgatcgtatcaacgacccgcagcgctacagccgcatcaagcagatcgcgtccgctcgcttcggcgtgacctccgattacctcgtgcacgccaccgacctgcagatcaagctcgcccagggcgccaagcccggtgagggtggccacctgcccggtgccaaggtcccgccgtggatcgccaaggtccgtcacgccaccccgggcgtggagcttatctccccgccgccgcaccacgacatctactccatcgaggatctgaagcagctgatcaacgatgcgaagatggccaacccgaaggcacgtatccacgtcaagctcgtttccgagttcggcgtcggcaccatcgcggccggtgtggccaagtgccatgccgacgtggtgcttatctccggctatgacggcggtacgggtgcagccccgctcaacgccatcaagcacgccggcaccccgtgggagatcggcctgtccgaaacccagcagacgctgatcctgaacggcctgcgctcccgcatcgtcgtacagtgcgacggcgagctcaagaccggtcgtgacgtggtcatcgccgccctgcttggtgccgaggaattcggcttcgctaccgcagccctgatcgtggaaggctgcgtcatgatgcgcgcctgccagaagaacacctgcccgcagggcattgccacccaggatcctgagctgcgcgctcgtttccgtggcaagcctgagcatgtggtcaacttcttcatgttcatcgctgaggaagtgcgcgagattctcgcccagctcggcttcaggactcttgaggaggccatcggccacgttgagtgcctggatcaggacgaggccatcaagcgctggaagtccggcggcatcgacctgaccaacgtgctcaagcaggctggtccggtacccggcacgatcctgcaccagaccatcgagcagaaccacgagctggagaaggcactggacaacaagctcatcgaacttgcccagccggccctcgaacacaaggaacccgtgcgcatcgaaatgccgattcgcaacgtcaaccgtacggtcggcaccatggtcggctacgagatcacccgccgttacggcgaggaaggtctgccggacgacaccatcgacatgaccctgcacggttccggaggccagtccatcggtgcgttcatcccgcgcggcgagaccatgcgcatctacggcgaagtcaacgactacgccggcaagggcctgtccggcggtcgcatgatcgtgcgcccggaagacaacgtcaccttcgacaagcacagtaacgtcatcgccggcaatgtcaccggtttcggcgccacgtccggccagatgttcgtggccggtcgcgccggcgaacgtttcggcgttcgtaacggcggtgccacgttcgtcgtcgaaggcgtgggcgaccacggttgcgagtacatgaccggcggcactgttgtggtgctcggccccaccggacgcaacttcggtgcaggcttctccggtggtaacacttatgtgcttgacctcgatatgaagaaggtcaacccgagtgccatcaagtccggtgcactgctcttcaagtcgcttgatgccgaaacctccaagctggtgtacgcactggtcaagcagcatgtcgaagagaccggttcccagttcgccgcggccctgctggaggactggaacgaaaccgtcaagcggttcacgcacgtagtgccgaagcagttcgtggccatgacgaaggccatggaagaagccaaggccaacaatgtagatttcaatgcgcccggcgcctgggaaaaggtgtacgagcaggttatggaaggagcgcgctgacatgggcgacccgagaggattcctgaaggtccgtacccgccgagagttggctgaacgccccgttgaggagcgtatcaaggactggttcgacgttcacgccgaaaccggcctgcaaccgtggacccaaacgcaggcggcccgctgcatggattgtggcaccccgttctgcatgaccggatgcccgctgggtaacctgattcccgagtggaacgacttggtccgtcagggcaagtgggaagacgcctacaaccgtctgtccatgaccaacaacttccccgaagtcaccggccgcatctgcccggccctgtgcgagcaggcctgcgtgctcggcatccaccagccgccgaccatgatcaagcttgacgagcagaccatcatcgatcaggcatgggatttggactacgtcaagccgctgccgccgcagcgtctgaccgaccagacggtcgccatcgtcggctccggccctgccggcctcgccgccgcacagcagctcacccgcgccggccacaccgtcgtcgtctacgagaaggacgacgccatcggtggtctgatgcgttacggcatcccgaacttcaagcttgagaagggtctgcttgaccgccgtgtcaagcagatggaggccgaaggcacccgcttccgcaccaacgtggaaatcggcaaggacatcacgtgggatgacctgcgtgaccgttacgacgccgtcgtagtggccatcggctcccgcgtgccgcgcgatatgaagattccgggccgcgagctcgacggcatccacttcgccctcgacttcctgcccgacgccacgcgccgtatcttcggcgtcaagccggtgcacgacatcaccgccaaggacaagcacgtcatcgtcatcggcggtggcgacaccggttccgactgcctcggcacctcgatccgtcagggtgcgaaggacgtcaccgtgctacagatcatgccgaaagagccgtcaagccgtccggacaacagcccgtggccgaccttcgcccgcacctaccagaagacctcctccatggaagagggcggcgagtacatctactccaccgactccgtgaacttcgagggcaccgaagaggagaaggccaaggtcaccattgataactcgaccaccgccgaaggcttcgtggctgatgagcgtggtcatgtcaccggcttgaaggtcgtctccgtggctcccggcgaaaatggtccgttcactcgccagcctggcactgagcgcgtgctgcccgccgatctggtcctcatctccgtgggcttcctgcacccggacaccgagaccatcctcgaccagatgcctgtcgaactcgacaagcgtggcaacatcgctcgcaatgacaagttcgccacctcccaggatggcgtgttcgtgtgcggcgatgccggccgtggccagagcctcgtggtctgggccatcgccgaaggccgctcctgcgccgcagccgtggacgagtacctctccaaggaaaagagcgagctgccggccccgatcaaggccagccagcgtccgatgatgctgcctcgctgaatactttccaaacagaaacatgaaaatcccttcttcatgaggggatttttgcgtttctgggattaattactgccttgagtcttcagtaatgtttatatttcgagaatattgcatacatggttaacatgaagctcctatggtgtctttcgtcgccaaaaagacgacgccagaatatttgggagagattcatgaacacacgtcatgtcacttcactggtcgcggccggtgcggcaatcgtcatgctgctcagcggctgcggatcgaccggtacctccaattccagcaatgcttcagattccaatatcatttccgtgtacggcagtgagccggcacacccactattccccggcaacaccactgaggccggtggcggcaaggttgtagaccagctgttcgcaggtctggtgacctacgatgcgaagggcggcatccacaacgaggtagcagacagcatcacctccagcgacaacgccacgcattacgtcatcaagctcaagagcggatggaagttcaccgacggcactccggtgaccgcgcactccttcgtaaacgcatggaattacaccgccaacagtgccaacaagcaggccagcgccagcttcttcagcacaatcgaaggctatgatgatctgcaaaagccggacgtggaccccaaggccacgctgagcggcctgaccgtcgttgacgacaacaccatcgatgtcaagctcagccagcccgactcggcattcccggtcaaggccggcagccacgcctacatgccgttgcccgaatccgcgttcaaggacccgaagaagttcggtcagcacccagtgagcaacggcccatacaagttcgtgtcctggcagcacaaccacagcatcgaaatggtgaagaaccctgactacaagggcaatcgtgtcgccaagaacgatagcctgaacttcaagatctatacctcgcccgattcggcatacgccgacctacgcggtggcaacctggacttcacgaacacgattcctgacaccgcacttacctccttccaatccgacaagtcgctgaaggcatacaacgagcccggtggcaatacgctcaccttcaccattcctgaatggctggaacacttcggccagaacgaggaaggcaacctgcgtcgtcaggccatttccatgtccatcgaccgcaagaccgtcgccgagaagatcttccacggcaccgccacgcccgccgtcgacttccttgcagccccaatcagcgcctactccaaggaactcaagggaaatgaagtactgaagtacaacccgtccaaggccaaggaactgtgggccaaggccaacgccatctccccgtggagcggtgagttcggcattgcatacaatgctgatggcactgcgaagaactgggttgaggcaatctgcaactacatcaagaacacgctggatatcgatgccaagagcatcccgatgtccacttccgacgaattcctgtccaatgtggattcgggcaagatgacctccgcataccgcagtggttggggccctgattatccatccgcggacaactatctggtacagctgtacgattccagttcggccgacggcaagggcggcaacagcggcaactacaagaaccccgagttcgatgccatgatggacaaggctctttccgccccgtccaccgaggaagccgacaagtattatcagcaaggtgaggagattctgctgcaggaccttccggctatcccgttgtggaaccagaatgccaccgcagccagcacctccgcagtctccggcgtcgcattcgactacggcggcggcccagtgttcaccgcactgaccaagaagcagtaagcagtaagtaataaacagacagcgctagccccccccgctggcgggggctgtcggcaaagccgactgggggtggtctcaaacagcagaccacccctatcttgttatatgagcgagctcccgtaagcgggagcaatcgagaacatacaggagcacattaactatggaattcaccgtatccggcactaccgtgcgattcgatgaacgaacaatgcagttcgcttttacgcgcgacggtgccgaatggaatacctgcgctgatttcaagccgaccctgcaatgcgcgcaaggcaccttcgcgttcgcggatgccacttccatcacccatgagcagcgtgaaaccggcacgggaaccggcattcgcagcatcttcaccggctttgggcacagcgcatactcctttgaaacctatgtatgggtggagcgtgcctcaggcgatgtgctcttcgaatggattccgctcaatgagcaaggcctgaacatcaccaatgtgacgtggcccgcagccatggacttcgattgcgccgatgaccatgacacgacactcatcacccatgagcaaggtgtgatgatccccaacacatggcctaccgccgtgagcaccaaagatatcgccttcgacggtcgcttcgaaacggctggcggttacatgccgtggttcgcgcagctccgcgcagacggacacgggtatatcgccatctgcgaaactccatggaatgccggttacggcatcgaccatcccagcgatggcccgtacacccatatcaatacttggtttgagccaagcctcggcacaatgaattatcgccgcgtggtacgctaccagttcctcgaccacgccgatcacacggcggtgtgcaaggcctatcgttcgtacgtcaacgaacgaggtcgcctgcgtacgctcgccgaaaaggcggcgcgcaatccctccgtgcgtgacctgattggtcgttcatgggtgcacatcggcatcaaaaccaaagtacagcccgactcgtactactacgataaggaccaccccgagaaaaacgattcattggtcacctttgcgcagcgcgaaaagcaaatgcgaacattgcacagcatgggtgcaggccgactgtacatgcacttggatggttgggcacagcccggatacgacaacgcacaccccgactatctgccggcttgtcaggaggcaggcggctgggaaggcatgaagtcgctggtcgacgcctgccatgagcaaggcgatattttcggcacgcatgaccagtaccgcgattactacttcaccgcacaaacttttgatgccaacaatgcgattcggctggcagacggtacgatgcccgaacacgcacgctgggcgggcggccaccagacctacctgtgcgccgagctcgcaccggactacgtacgccgcaatttcacccaaattgccgcgcatggcatcaagctcgactgtgcatacttggatgttttcacctgcaacgaaggcgacgaatgctcgaaccccgaacaccgcatgacccgccgcgaatgctttgaccgccgcgccgaatgcttcgaatatctgctctcgcacggcatcctctcctcgtccgaagaggtatcggactgggcagtgccaagcctgatattctgccattacgcgccatacgacttccagatgcgctcacccaacgagccgcgccaaggtgtgccggtgccgctgtataacctcgtctaccatgattgcgttatcgagccgtggatgatggagcgtgtggtggacggcgacgattacatgctgtacgccttgctcaatggcggagctccatacctgattcgcgatgccgcatacatcggcgttgacggcgacatggacgacgaacagcgcgctcgcacggaaaacgacatcgaacgctgccatacggtcgctgcattccatgagcgggtcggcatgcaggaactggttcgtcacgagttcgtggatgatgatccgctggtgcagcgttcggtattcgcggacggcactgcggtcacttgcgacttccatacgcaaacctatcgcatcaccgattgaccgcatcactgactgaaaaaacaatgacacacagtgggttccgatggactggtggcaaattgccgccgataagcgggtaatatagccaacagtgtcaccgtcgaaacaggagtagtgaaatgccgaatcgtgcagaacgccgtgcccaagccaaagcaggccgcaggggagtgccgtcgcagtatgaccagacccgtggccgtggccgttcgggaatgattgacgaatatcagctgcagcagaagtcccagcgtctgcaggacggcaccgacggcaccgaatggaagcccagcggcggtacgattgcggacaccgaaaccctgctgaccactaacccgaactacacgaatccgaagatgttcaaggcaccgcattcgctgcgtcagtggttccgtgtgggcagctggacgctgatcgccatcgcgattatcgcgttcttcgtggttatgtggctgccaagccatccgatgtggctgatcatcaccgtttccgcggtgttcattgtgggtgtgctgagcctgttctttacggctggcgattccaagcataatccgaatttggatcagaacggcacggccgtctgatttttttgcctggtaaatccggcttgaaaagcaaaacgcacgacggaagttgtgcgttttcttgtatgcggtgccctaaagtaagaagtgcttgagtttctttctgacgcacgaaggagaggcagtccgatgaaagttgatattctaacccgcgaatacccgccgcatgtgtatggcggtgccggcgtacacgccgaggagctgtccaaggttttggccgagcgcattgacgtgaccgtgcgtgcgtttgatggcaagcgcaccgaggctgatatccccgcgattcccaatgccgctaatgccaagggcagtctgaaggttgtcggatacgatacgccgtccgagcttgccgatgccaatccggcattgaagaccttcggcgtggatctgcagatcgccaacgacgttgacgccgatatcatccacgcacacacatggtacgcctgcctggccggctacctggccaagatgctgcacggtacgccgctggtcatcaccgcccactccttggaaccgttccgcccatggaagcgcgaacagctcggcggcggctacaacctgagctcctggggcgaaaaggaagcctacgagaacgccgaccgtgtaatcgccgtttccggtggcatgcgcaaggatattctgactgcttacccgaacctcgatccgaacaaggtggttgtggtgtacaacggcatcaccatggccgacttcgctaccccggcaccagacgatccgggttggaaggtgttcgagcgttaccacatcgaccgctcgaagcccaccctgctgttcgtaggccgcatcacccgtcagaagggtctgccatacctgctcaaggccctacatctgatttccaaggacattcaggtggtgctgtgcgcgggagcgcccgacaccccggaaatcgccgaagaggtcaagaccgcgttcgccaagctggatgaggagcgcggcaacatcgtctggattgaagaaatgctgccgaagcctgagctgaatgctttggaacacggctgtgatgctttcatctgcccgagtatttatgagccgctcggcatcgtgaaccttgaggccatggcctgcggtctgccggtcgtcgcatccgccaccggcggtattccggaggttgtggtcgacggtgaaaccggctatctggttccgattgaccagttgcacgacggcaccggcactcccaccgatccggacaagtttgtacacgatatggccgccgctatcgacaagatcatggctgaccccgaactcgccaagaagatgggtcaggccggctacgaacgcgcccgcgacgtgttcagctgggagaccatcgccgacaagaccgtggaagtctaccagtccgtgctcgacgagcagaagaagtaagtagcgctgca

SEQ ID NO: 520 - DNA, 5605 bp, Unknown
  R48_24m  MAG No. k141_51686
accatcgtcgaccccaacgacccgaagccgctgccgctcatccatgtggacgatccggccatctccatgaccttcggcaccaacgactccccgctggccggcaccgagggcaaggaccacaagctcaccgcccgcatgatcaaggaccgtctggaccgcgagctcatcggcaacgtctccatcaaggtgttgcccaccgaccgccccgacgcctgggaggtccagggccgtggcgagctggcgctggccgtgctcgccgagcagatgcgccgcgaaggctacgagctgaccgtcggccgcccgcaggtggtcaccaagaagatcgacggtgtggtcaacgagccgatggaaaacaccaccatcgacgtgccggaagagtacatgggtaccgtcacccagctcatggcagaccgcaagggccgcatggacggcatgaccaaccacggctccggctgggttcgtctgcagttcaccgtgccgtcccgtggtctgatcggcttccgcacggctctgctgtccgccactcgcggcaccggcatttcctcctccatctccgctggctatgctccgtgggctggtgccatcaccattcgtcagaacggttccatggtttccgatcgcaagggtatcgccaccccatacgccatgcagcgtctgcaggcccgtggcaacttcttcgtcgaaccgcagtccccggtgtacgagggtcaggtcgtgggcgtgaacaacaagcccgacgagctggatgtgaacatcacgctggccaagcacatgaccaacatgcgttcctccaccgctgacgtgctcgaaaccctgaccccgccgatcaagatgagccttgaggagtccctggacttcgccaacgaggacgagtgcgtggaagtcaccccggagtccatccgcgtgcgcaagatcatcctcggccgtgaggactggtacaagtggcgcgccaagcagcgccgccagaacgccgcccagcagggtaagtgatctggtgcgactgtagccgaccattctctctggctcccctctctgaggggagccaagtttattcctcgccaagtcatatccccacctatactgaaacgcatgactgtgaagagcactactgaactgcgtccgtggtcgtatcgccagaacgcgctggtcaaatcgttgatcacgattgcggcgggcgtggcttccgcctttgtgggcacgttcgcccaccgtatgggtgcagaactgagtattccgtatggtctggtgctggcatttctgctgatcggcctatcgacatggtgcgcccgttcgcgcatgggcgcggtcggactggccctgcacctcatcgcctcctcgctgaccgcatggggcatggcactgaccaccacatccggcaaggcggtcatcgtcgccggattccaaggcgacatgccgttcttctcccagcatgccggctacatctggctgtacggcctgatactggtccaagtcgtcctgctcattcttcccgcccgctggttcgttattcccactcattctgaatcgcgcgcgtaactatatatggcggcacatttccgcgaatgcgtcgcgtatcggcgggcgtaggggattacggccgctaccatagaaccttatggcacgcatgaaactgttttacttgggcccggaaggcaccttcacccatcaggcggcaatgacggccgccgaccagttcgccacactcggcgacttcgacctcaccgccctgcccgacgtgcccgcgatcatgcaggccgtacagtcgcgccaaggctggggcgtcatcgcatgggaaaacaacgtcgaaggctatgtggtcccgaatctcgacgcgctgatcgacgcccccgacgcggccggcttcgcccggatcagtgtggacgtggccttcaacgccttcaccgtgcgcggccacagcatctgcgactgcaccggcaaccccgtcagcgcccacccgcacggcctggcccaatgcacccggttcatcaccgaacaccatttgcagcccgaacccgcatcctccaacgccgccgcctgccgcgacctgaagcccggccgcgtggcgctcggccccagcatctgcggcgaactctacgatctcgacaccctcgccgaacatgtgcaggatttcgatggcgcgcacaccgaattccttgtcatcgccccgcgtgatgtggtccaggaattcaacgcccgcgcccaccgcaatgacgccggcgacttcgaaaccatcatcaccttcatcccgctggtcaccggccccggcgtgctcgccgacctgctggacgtcctgcgtgatgcggggctgaacatgaccagcttcatctcgcgcccgatcaaaggccacgacggaacctacagcttcatcgccacccttgacgccgccccctgggagccaagattccgcaccgcactggaagagatcgccggacacggcgactgggcaaaaaccctggccgtctacccacgccgcgaacgcccgaacccgccggtcgacgcctggatgctgcccgagggcggcgtccacatcaccaatcgcgcgtcggaaggctggcagtacgccgagggagcaaggaaggaactgctgtggtagacacagtcggaatcgtcggactcggattgattggcggctcgctcgcacgccgcctgaccgagcgcggcgtacgcgtcatcgcgtggaaccatcgctcgcacccctacgcccaggccgaagccgatggcattttctgcaagagcacgctctccgaactcatggatgccgagccggatgtggtcgtgctgtgcaatccgctcaaggcgatgccctcaatcctcgccgccctagccccgcttatgggcgaccatccgaacaccacgctcaccgacgtgggctcagtcaagggcatggtccgcgatcaggtcaaggctgccgcgctggggaagtgctacgtcggcgcccatccgatggccggcaacgaactgtccggctggcaggccgccgacccgcatctgtacgacggtgccctatgggccatcaccgtggacgagtccacggactaccgccgcttcctcgacgtcgccacgatgatcaccaaggacgtcggcaaccgcgtcatcgtcgtggacgacgagacgcatgacaaggccgcggcgatgatctcccacatgccgcatgtggtgtccaccgcgctgatcaacgaactggtcgccaacccggaccgcaacatcgccgccgcgctggctgccggctgctggagggacatgacccgcgtgtccctgaccgacccggaccgcacgcgcgcgatggtcgaggaagactcgctgaacgtcgaagtgctgctgcgccgcatggcggcacgtctgaccgatatggccgaccaactgcacgctggtgccgacggcgagcaggatgtgatgggattcttcgccgaaggcgaccccttccgccggtacaaggccgccgtgacgcgagccggcatcaccgctgcacaagctggtacggccaccgcgcagcaagccggcacaactgccgccggattcccggaacgcgagctcgccgtccccgaagccggctggcagcagaccttgctgttctccgcacgccggggagaagccatcaccggtttcatccatccgcgtcaggccatcgtccaactgcgccccgccatgtaactgcgccccgccatgcagcccgtgtgcaggttcccctcgccgcccgtcacgaagaaggctgcgcgagggggatgaagttcccgcttgttttcgtgagaagaccgtgtggctccgctgttcgaaagacccaaaggagtaaggtagtctgtaccgtttttcaggaaacgcatagaagttgatgcggcggatggctaaggggatgatgacgtatgacgttaccaaggcagattccggccggtgcccgcgtggtggtgcgcatcaccgacggcattgacccggtcgaccaccgtatgaagttccgcgactatgtggggcatgtggtttcctgggatggatacacgttggagatggtgcgtgacgccgccgccaatggttcgcgcccggcccagaacgtgaccatccatcaggaacagattgccacattgaaacccgtgccggagcggcgtaacacgccaccccggccgtaacccaaggccataaagaattcggaggagaacgagagtgtcatctacgcagttcgacggcgatatcgactccttcgtctcctatctgaagtccaaccgcggcctgtcagcgaatacgctcaaagcgtatcgcgcggatctcacggcatgcctgcatctgttcgagctgcgcggcgtgaccgatctgaacgagatcacgctggatgatctgcgcagctggatggcggtggaatcgcgcgatcacgcccgcagcagcatggcccgcaaaaccgtggccgtgcgcgggttcttcgcgtgggcctatgagcatgggctgaccaccaccgacccggccgccacactgatgactccctcgattcccagcacgctgcccgcggtgctcaccgaatcccaggccgagcaattattggatgtcgctgaacatgccgttgcaacaaaccagtacaaggacgatgggggagcggcagccgcgtccggcagcggcagcggcaagacagctgataagtcggccgataccgtacaccgcagtgaggcacccgcccgtgcagacaagcgcgacaacgcccgagtcaccgccgaatcgcagcgcaacgccgcgattctcgaactgctgtatgccaccggcatccgtgtcgccgaactggtgtcgatggatatcgccgacatcgacttctccaatcgcaccatcaaagtcaccggcaaaggcaacaagcaacgcgtggtgccgttcggactacccgcccagcgtgcgctggagacttggctggaacaggggcggccggtactggcccgtacggcaacggatgcagtcaagtcccgtgctgccaacgccctgttcctcggcgcacgaggcggccgtatcgaccaacgcatagcccgtgacatcgtgcacagagcggcccgagaggccggcgtgccggacatcagcccccatgcgttgcgtcattccgccgccacgcacatactggacggcggtgccgatttgagggaggtgcaggagatgctcgggcattcctccttgaaaactacacaacgctatacgcacgtctccatcgagcagctcaagaaccgttacggacaggcctttccgcgggcatgaccactatgtggacattggttaacaaactcagcaaagactgaacctagccggcaagaacccctgaattttacatgggtgtaacaaaaaatacactgcttgtctcccaagtgcgcaaaaatgacaggtaatcagcaacggggttggattgttcgagacatcgtgagatgcaagtctcacggtgacggggaatccagccccgtttgcatgaggcggggctgagacgtcctgcaacctaatgaataggagaaaacatatgaagaagaaagctcttgctttcgctgccatggcctgctccgtggccatgctgctgagcgcctgcggcggctctaacagcaacgctgcctccggtaacaccgctggctccaacatcatcactgcgtacaactccgaa

SEQ ID NO: 521 - DNA, 2855 bp, Unknown
  R48_24m  MAG No. k141_55328
aacgcgtccgactggtatcagataatcagtcgtctcgtctcgccaaatgcaatgcgcccgccggctggcatatcgtcgtggattggcaactgtgtgttggacagttctttagaggacgagtccttgttgtgtgaattcgttggggctccggtatccgggggtggagtggagtctttggttgtcggaccaccgcacatagtcgttgaggtcggagcgtggttgttccaggccggtgtggtggttccggtatatgagctccttcttcaggagcctgttggtggattcgaccacggcgttgtcgtacgggtcgcccttccctgacggcgatcctccgatgtcgaacacgtcgagcagcccgtcgattctcgcgttgtcgaacccgccgccccggtccgtgtggaacacctccaccccggtcagggggaagccgagcgtggcgaacgcgcccaataccaggctcgcgtcccgggcccgcccggcggaatggccggtaatgcccctgttcgccaggccggccagcaggcacacgtacgcccactcgccgccgacgcgcacgtacgtcaggccaccggccaggtgggtgcgcggctcgcagccgtcgaactcgcggccgaggatgttcgcgagcctggcctcgtcggcccgcgtcctgtgcggttcggaccgtctgcgcgcgtacgcgcccgcatgccccgccgtttcatgatgttgacgatccttcgcctggacgcggtgacgcctttcctggccaaagcggccttgatcttcctcgctctgtagcgctcatggctgtcgcgccagatcgcgtgcacgtcgcccgcgatgggatcgatccgctcggtttcggtatgcccggccatccagtaacaggtagagcgggggacgcccgctgatccgggccctctggtcaacaaatccaggacataccgctcgaaccccgcacccaaagcgcggggttcctgcgttttagcggactgcggtagcatgggaaccatgattctgcatttgcatctggttcgtcatgggcaaaccacgttcaataaatacaaccgtcttcagggatggtgcaatgcgccgcttaccgcatccggacttgccgatgccgacagggccgggcacaaacttgagggctatgattttgcgacggcatattgttccgatacctctcgcgccgaaatcacggcgaagcgaattctcgatatcaatgaggctgccggacatgcacggccagaactcacggccgatatgcatttccgcgaacaatgctacggatacttcgagggtcaggacatgtcgctggcttggaccgctgcgggtgggcctcacggcgcgaaggactactacgacatcgtagccaaatttggtctggccgcctcccgtgatttcctgaaagaggccgaccccttccatgacgcggaatccgatgaagaatactggacgcgcgtcgaaggagcattccagctcatcgccagcaaccccaatctcaaggatggcgatgatgtgcttcagatttcgcacggtaacacgctgctcagcctcggccaccgtttcggaggccccgatcttgaccttagcgaacgaccggccaacggctcggtaaccgtactcgacttcgacacgaccaaaccgttttcgcaggccgtgaccatcgtctcatacggcaaatagcgtatttcatcgtcagttgcacgggtaaataggggaggagtgctacccttatccgagtaagtgtgacctcaaggaggcaacaatgggagtcggagagatcgcaggcctgattgcggccatcgcgttcgcagtattggccggattcatgatctatccgctaattcggttgggcaagatgttcgaccagatttcgcagaccgtcaaggaatccggtgagcatgccatccccgcattggatgagggcgtgaccaccgtcaagcaggtcaacaagtcgcttgaggatgtcaacaagatttccgctgcggcctccaccaccgccaacaacgtgggtgccctgaccgatttgtatggatccttccttggcaagccggttatcaaggtcgcttcggccttctatgccttgaaggccactggccagtcgttcctggctcagaacgccaacaagaccgctcagaagggggagtgatgttcaaacgcatcttttgggtgggcgtcggtgtggccatcggcgtgatggccgtcaccaaggcacaggcctatgtcaaggccaatacgcctgacgcggcccgtcagttcctgcttggtcccgatcaagacaatgtaccgatgaagacgctcgaaggcctggtcaatgaattcaatgcgacccgtcgagcccgtgaggctgagctcaatcgtcagtacactgagcgcgccaactgacacgcgcacggccttacgcaatcctttaatccatactttccactgatagtggcgcaattgcgcccgaaacaaacctacaaggagttcatccgctcatgcgcactgcggacatcgccaagcgatacctcgattacttcgccaagcacgaccatctcgtcatgccttcggcgtcccttatttctccgaaccccaccacgctgttcaccatcgccggcatggtgccgttcattccctaccttcttggtgagcagaccccgccgaagcgccgcatgacttcgaaccagaagtgcgtgcgcacgctcgacatcgacgaggtcggcaagaccacccgccacggcaccttcttccagatgcttggcaacttctccatcggcgactacttcaaagaagaggccatccactacgcctgggagctgctgaccaccccgcagagcgagggcggttacggctttgacccggaaaagctgtgggtcaccacctttacc

SEQ ID NO: 522 - DNA, 12188 bp, Unknown
  R48_24m  MAG No. k141_55361
ctactgcgttcggcctgcgacgatgtggccagcacgctgcggcgcaaggggctagtggcgcgcacgctgacggtgaagttgcggttcgccgacctgagctatcagacccggtcttttacgatggagcggccgaccgatacggccggcgtgctgtaccccgaatgcgtgcggcagctgaaagtcatgttggggctgccagcctcggcggagtctgccactcccctgcccaaaactattcgcttggccggtatgagcacgtcttcgctcagtgaggcggcggctacggccgttcagccttcactggatgacatgctcgaagaggcctacaatgcccgcggccagacctcacaggcacgcttgcatgatgccgaggccgcgctggatgccgtacgccgcaaatttggcagcaaggccgcccagtttggggcgtgacggccctgcggcgtggcttcccgccagccgcgcgggctttccacgttggacattaacaaacaccgggcaggcaccaagcaggcaccagcctcttggcgtacgtttccccagaccaatttccccatcatctggaacaacgtacgccgagacgaagcaaacgtacggcacctcagacaagaacgaaaacagtccggaacaacatacaccgagctgaagtaagcgtacgtttccccagacaaggacgaaaaaagtctggaacaacatacgctagctcacacgcggacggccgcgccctcccaggggccaagctcacggttggcgagggagaccacggcgtgcgaggcgtcgtaggtggaaatcacgatatccggttcggtcaccccgtgctgcaccagttcggcggcgtcgcgcggcagatcgaccgttcgtccggacaggttgaccgccaccagcagcttctcgccgccgagcgtgcgagtgaatgcgtagacgtactggtcgtccgcatcgatcagttgccagtcgccggcggccaccaacgcattctcgtggcgaatggcgatcagccgcttgtagaacgtgtacacggagtctggatcgtcgaattcgcccgccgcattgatctgggtatgattccggttcaccgaaatccacggctccacggcggcgtccggcgcggtgaaccccgcataggcggaaccatcccactgcattggcgtacgcgcgttgtcacggccgcgggcggcgatgccggccatcatcgattccgcggactgcactttggcttcctcgacccgctgatggtaggcattgagggattccagatcgcggtactggtccagccgggtgaagtggacgtcggtcatgcccagctcctcgccctgatagacgtagggggtgccgcgatgcatgtgcagcatcagacccaacgccttggcggaacgtacgcggctgccctcggtggagtcgtctccccaacgggagaccacgcgcggctgatcatggttgccggtgaacaggctcgcccagccggcattcttgacggccgactgctgcttggcgaaaatacgcttgagctggggcaggtcgagcggcagcggcttccatttgacgttgtcttcgcagtcgaagtccacgtgttcgaacaggaagagcatgtccagttcgccgttggcgggattggtgatgtgctcgttgcgctgggcggtgatgccgggggcctcgcccacggtcaggaagccctcgcgcccggcgaacacctcgcgacgcatttcggccaggaattcatcctgacgagggccgtccgcacagaacgggttcgggttggagtagccctcctcccccacgggcaggtcctcaagttcggaaccgtattcgccgggcagacggccggccgaatcgatacgcttggaaatgagggtgatgacgtccatgcggaagccgtccacgccccggtcgagccaccagttcatcatgtcgtacaccgcacgacgcaccgcaggattctcccaattcaaatccggctgcttcttcgagaactgatgcagatagtacttgccgcgttccgggcaatactcccacgccgaaccgccgaaataggaaccccaccggttcggctcggcccccggctcacccggggtggttcccgggcgggccggacgccaccagtaccaatccgcatgaggatcggacttgtctttggacgcctcgaaccacgcatgctcgtccgaagtatggttgaccaccagatccatcacgatcttgagcccccgcttgtgtgcctcggccagcagctcgtccatatcctcgagcgtgccgaacagggggtcaatgtcctgatagtcggaaatatcgtagccattgtcgtcctgcggcgacctgtacaccggcgacagccatagcacgtccacgccaagatcggccagataatccaaacgcgaggtgatacccttcagatcgccgataccgtccccgttcgaatcctggaacgaacgcggatagacctgatagaccacagcattcgaccaccacggattcggcgtggtgccattggttcgaacggaatcgggaagcacgacacgctgcgcagtagtcatgattgcaacctttctaacgaatgtgacgggaatcccggagggcggcaagaaccctccaggattccacagactgatgacgggatgagacggcttacttgttcgcgcctcgcatcacgccgctgatcacccacttctgggcgaagatgtagacgatgaggatcggggccatggccatcaggtagctggcaaacgccaccggatagttggcggtgaactgcgagctgaacacgaactgcgccagcgggatcgtctgatccgcggaattggacagcaggatcaacggcaggaggaagtcgttccacgcccacagcgcggtcaggatcgcgatggtggcgttgatcgggcccatcagcgggaagatgatggtccagaagatgcgccaggtggacgcgccgtcaatgcgggccgcctcttccagcgacaccggaatcgaacggatgaagccgatggcgatgaacaggttggtgcccaggccgaagatcatatacaggatgatcaggccgaacttgttgtcgaggttccacccgcccatctgcttggccagcggcagcatgatcacggagaacggcacgaacatggctgcgatgaagaagtagtacaggaagcggaagaaccgcttgtccatgttacgggccaccgcataggccacgaacgtgttggtcagcagggtgagcacgatggcgcccacggtgatgatcgccgagttcagggccgcgcgcggatagttcaccatgttcgaggcctcggcgaagttgccccactgccagctggtgggcagggcgaacgtgccggcttcggccggggttttcagtgcggtgacgatggtgaagtagagcggcaccagaatggtcaggctcagcaccgcgaccaccgcggtcagccaccagttgatcttatggtccttgcggaacttgtttttcttgggttgtgcagcaacagcgctggtcatgatcacaccttctccttgctaccgaagaacttgagctgaatgaacgcgatgatcgcgaggacgatgaagaacatcaccgcattggcggtctggtaggcgtattcgccaccggtcaggccgccctggtagatgaggtaggtgaccgtttccgtagcggagttcggaccgccaccggtcagggcgaccacctggtcgaaggtgcctaaggcgcccttcatcgtcaggacgaggttgatggtgaagaacggtccgatcagcgggaaggtgatctgccagaacttctgccaggcgctgacgccgtcaagggcggcggcctcgtagatgtcggtgtcgatggtctgcaggccggcgaggtagatcagtgtggtgtaggccacgccctgccatacggagagcaccacgatcggcgcccatgccagcgattcggaggtgatcatcgattcggacagccaccctatgcccaacgccttgccgagttcggggatcggcatcatgaagatgtacttgaacacgtagccgaccacaagcacggccagggtgtaggggatgaagtagatggcgcggaacccgttgcggaacgcgatcttggagttgagcagcacggcgatgaacatggacagcaggttcaccagaatcgtcaccacgatggcgatgaagaacgtgaacaggtaggcgcgcccaatgcgctcatcctggaacatggccttgtagttggtcaggccgatccatttgtatttgccgtagcccttggaattggtgaaggagtacatcacgccgcgcaggaacggccagtacaggaacaccatgaacaggatcatggccggaacggtcatccagtagtatgcgggatcgaccttgcgatgggagaaagcggagacacgcttcttgcgtggtttttcggcaatggcggacatggtgaacctccttactgtacggtcctggcttggatctgatcccactgcgtctgcattgaattggtgaacgcctcaacgttgccggtggtcagcaggctttgcaggctgccggccatggtcatggacgaggggatgtagtggtcggcgaaatcagcgatgcgtccctccttgtagaagtggaggatgttctgcagagcctcgtcgccggcgtaggtgtccttgaacggggtgaagcagaactgcgattcggcgtattccttgagccggtcctcgtccatcaagaattccacgaacatgcgcgattccttgggatgcttggtggtggccgaaatggtgagcacggtgtcgtcgccggcggtgagcacctgctcgtccggatcgtcggtggcgggcagctgggcgaacttcacgttgatgtccgggttgaccatgcgcacctgcggcacgacgtaggtgcccaggggcaagatggccgccttgccgttggcgaagtcctgggtggcctgctggtaagtaacgcccggattgtcctgcgtgtactggtagaactcgacttccttttccgccacgggaccccacaggtcggcgaatgtggcggtgccgccgctgagcttcgagtattcgctgatcggcacaagtgtgccggccagggaggcgaacggcgcctgagtggtccacggttcggcgaggctgccttcgatcggcgtgatgccggcctgctggatctgcttcatcgcggcgatgaactcggaccaagtttcgggcaggttgtccgggtccagcccagcctgacgccacaggtccacgttgacgacgtagccgttggcgttgccggcgaacgggatgccgtacgcgcggtcggcgctggtgtcgtacagtttggccagatccttgagcagcttgaccatctgcgggttgatgttgtcgaggatctcgtcgtcggtgaagtcctggaagattcccgaggcggcgaattcgccgaagtaacggccgccgtccacggtgaggacatccggcaccttgttcttgacgaagcgcgtgcgcagatcggtggcggcatcggcggtgttgatgatgtcgatggtgatgttggggtgttccgcctcgaatcccttgaccagcttcttgaactggctgactgcctctaccttgtactggaagaattcgagagtgacgtttccggcggtggatgtgccacaaccggcgagtgcggccacgcatgcggcgccggcacagacggcggcgatggcgcgggatatgctgcgggtctttgccgccatacggttcgggcgtcgatcatgcccggaggacgaccagcgctcggtccaagacgatgcggacttcatctgctgcttctcctttcatttacacttcacgacttcgctactccgcgactgtcgtgatgtatacgttaacacccatatttattgatatcaaacggcataattacaggatttctgtaaacggttacattccgtcatggtatgattgtggccattatcgagcacccatgaggaaggttcgcgcgtgatacattccacgatctacgacgtagccgtcagggccggggtgtccgtggccacggtgtcacgaacattcgccaaaccggatatcgtcaccgaggccacgcgcaagaaagtgatcgaagcggccaacgaactcgacttcgccatctcccggtccgccaccgcgctgaaatcgaaacacacgttccgtatcgctatgctcaccggcgaggcgatcgccacctggttcgactccaatctgtacaaggggctgaccgaggtgctgcagacccatggctacgacgtgtccctctacggcattgcggacaccgaacagcgcatgtcgttcttcgacgagctgcccctgcgccgcaatgtcgacgcggtgatcgtggcctcgttcaacgtaaccatggaggagatctccaacctgcagggcatgggcgtgccgctgatcggcgtcaacgtgccgcacaacgaggggttcaacgccaccgtgtccatagacaacgccaagagcatgcgcatggccatcaatcacctgcatgccctggggcaccggcgtatcgcctacatctgcatcgacgtctcggaggcgccgatggaatacagtgcggactcgcgcctgcagagattcgaatcggcctgtgcggcgtatgaggatatcgaacagttgaccatagccctgccccgcaacgacttcaccgtggacgaggcgatcgcgcgcatcaccgtcatggaccagccgcccacggccctatgctgcctgagcgacgggacggcgctgcccctgctgtacaagctgcccaaagccgggatcggcgtgccgaacgacatgtccctgatcggattcgacgacagcgactatgcggccgagttcgggctgaccaccattcatcaggatccgcaggccctggggcgcaaggcagcggaaaaggcgctgtcgctgattgattccgcgacgttcggcattgacctgggcgagccgttcgagaccgcgcgcacgttcctggccatccgcaataccacggcggcgccccggcggtagtcggtgtcgtcaggcgcgggccgattgcagacgttcgcaggcggagcggatggcctcgtcggtggcggtggcggagaaacgcaggtaggcgggagcgccgtagaattcgccggggctggggatgatgccgatcttggcgagctcggccatatcggcccagcagtcgccggacttggccttgacccatacgtacagcgcgccggagggcatttgcgccgaatagccatatgccttcagcgcgtcaaccagcgcggatagacggcgacggtaacgaccccattgctcgtgcacggcggctgtgtccttcagacccgcagccatggcggcctgcaccggtccggggataatctggccgatctgcttgcggtattcggccatttccttgaccagccggtaatcgccggcaaccagagccgtacggtagccggccatattggactgcttggacagcgagtagagcaccaggatgccagctgccgaaccttcacacacatgtgaattcagggcacatggcgtggcggagagactgaatgcggtatcggaggcgggctcgttggattcggccaccggtgcggcaggcacagacgcagcagatgcagacgcggcaggcgcagaggacgcggctgtattgcggcgcaccgaacgccagtccatcaacgcatagcattcgtcggagagcaccacggcaccgatgcgacgggcagcagccacgatgtcggtcagccagtcagcggagatgacctcgccggagggattacacggcgagttgatccagatggccttgacgttcggaatattcacccaggaatcgacgtcggtcacatcatcgactttgaccacggtggcgccggcaagttgggtaccgatttcgtaagtcgggtaggagacagccggttggacgaccacatcgccttcgccaaggtgcagcaggctggccatcagcgccacggcctccttggaacccacggtgggtacggcggcagcgttgatggacttcagatccacaccgcgcagttcgcggaaccatgtatcgatagcggccttaaggtcggcgctgccggcggtgaccgggtatccatgggcgttgggggcgtctgcgccggcaaccagcgcctgctggacactgctcggcaccgggtccacgggcgagcctacggacaggtcgatcatgccacccggcacggttttggcggtggctttgaagccggcgatacgagaccagtcgtatggcgacgaatatgcgtggaagcccatgagaacccctttcttggacggtatgttcctaagatacgacgaaccctcggccgtgatagaccgagggttcaatccgaactatgcgctgtgtgcagcgcttatccgcaaatcagtttactggttctgcggcggcagcgcggcgacctgttccgggtctttgccgattgggccattggcggaagcgccgcccaaatcgccgacttcagcgaagaagttgacagcggcatccttgtaccaagcccactcgtccggcagatcatcctcatagaagatggcctcggtggggcacaccggttcgcatgcaccgcagtcgacgcactcgttggggttgatgtacagcgagcgggaaccctcgtagatgcagtcgacggggcactcgtccacgcaagccttgtccttgacatccacgcaaggctgagcgatcacatatggcatggaatcctccttaacagatactggtacgagggtacgcgcccgttgggacgctcctcgctctcagccgttaacggccttatcggtttcggcggacagcgtttcggtcaggtcgcccttgccgaggcgcgcatgccagtagccgtagccgaagtagatggcgacgccgaccacgagccacaccacgaaacgaatccaggtgagtacggacaggttgagcatcaaccagaagttggccacggcgatgaggatcggaatccacgggtcgccgggcatcttgaaggcgcgcggcaggtcggggcgcttcttgcgcataatcgggatggagatggccaccagcgtgaaggcggacagggtgccgatgttgaccatgtcggagagcacgccgatgtcgaagaaggcggccacgagcgccaccaccgcgccgacgacgatctgcagagcggccggggtgccatgcttgccggtcttggacaggccgcgcggcagcagaccatcgcggctcatggcgaagacgatacgggtcaggccgagcaacagcaccatgaccacggtggccaggcccagcacgatgccgaagctgatgatcttggcggcccagtcggcacccaccagttcgaaggcggtggccagcgaggggctgtcttgcttggcgagatcggcataggagaccatgccggtggtcaccacggccacgagcatgtacatgacgatgatgagcagcatgcccacgccgatgccgagcggcacgttcttgtgcgggttcttggtctcctcggaggcggtggccaccacgtcgaagccgatgaacgcgaagaacacgagcgccgcgcccgaaaggatgccgggaacgccgtacacggatggggtcatgccggtggcgaactgccacagcggctgggtcatcacgccggtgacggcggaggagccttccacggtggaggccggctggctcggcggaatgaacggggtgaagttggaggccttgacgtagaagaagccgacgatcaccacaaagaacacgatggcgatcttgagcacggtcatagcaccgtccacgcgggcgccgatcttggtgccgaatacgagcagcgtggtaaagaacgccacgatgatgatcggggcgatatcgatatggaaggagccgaacgccaggttggtgttggcgttccagcccatcaggcgcatgaaatcgttgaggtatacgccccaatatttggaaatcacggagccggccatcagcatttccagaatcagatcccagccgatgatccaggccatgatctcgccgaccgtggtgtaggtgaaggtgtaggcggagccggccaccggaatcatcgaagcgaattcggcgtagcacatcacggctgcgccgcacacgatgccggcgatcaggaagctgatgatcacggccgggccggcgtggaaggcggcggcctgcgcgcccaccgagaagatgccggcacccacggctacggccacgcccatgattgacagatcccaccaagtcaggttgcgcttgagcttgcggccctcttcacccgtttcggcaatggtctgttcgacggatttcgtacggaacagttgcatagtgctcttctttttctctgttgtttgcgcaccgaatgcgcacaataccgacaatcgagtatagaagagcccgtgtgtcttgtatattaataagacttagagtccgcaatatatgggatcaataccccactccatcgatcaatagcgcgattacagcacaccgacgcagaccggttcgggcaccaagtccactccgaacgcgctcttgactgcctgctgaaccgcgcgcgccaaagctgcgatatcggccgcgctcgctcccccacgattggtcaaggccagcgtgtgctgcgtggatagactggccggcgcgtccgcatcgaccttatatcccttatggcagccggcatggtcgatgagccaggcagcggacgtcttggtgccgggagtgccgtcgggcagagtcgcgtcaaacctcggcgcatcttcgggcagggccgccgcttggtcggcggtcagaatcggattcataaagaacgagccgcagctgtggcgattgtagtcgggagcaggcaggccgtcatcgccaacgggaacgccggcggcctcattgagggaggccagacgctccagatcggtcaggatattggcctcgcgcttggcggcggccatgtcgggcaaggcgtagcgagtgggatcctcaagcatgcccttggcggcacgtactgcgagcacggctttgcggatgtcggcggtggccatacggtcgcccacttcgacgccaagcgctttggcaagctgtccgtaacctaccgtgccttcggccgagtgggtcagggcaaaggtgacggagagcaccacgtaacgtggcgtcgggaagaatcggtcggccggccggccgggaccggcgtacatgctggccttcagtgcggagtatcgatagccgaatcgaagatcggcgggtgtgaggtcgcgcgttgttttggtgtctcgatcccagacttccaccgattcgaccgaagtggcgacttcctgtccgtaggcaccgatgttctgcaccacggaagcgccgactgtgccgggaatgccggacagtccctcgacgccctcgagcccgagctctacggtgaaggccacgaaatcatcccaattggcaccggcctcggcattgacatgcacggtgcgatcctcgccctctaccggtgcagcctcgtccggcacagtgatgaggcgtcgggcgtctcgaaccaccacgccgtcaaaaggcttatcggaaacaagcaggttggagccgccaccgataacgaccaagggcaggcctttggaatcggcatcctccacggcttcgatgagccccacgcgcgtggtcggctcgatgaaatgggcgatggggccgcccacgcccatggtggtgatgtctgcaaagcttgtcatgacttcctatcttagtggcgcaggtgcgatatcggggcaatcatcggctgaaacggcagaacgcccgcgaggggttcgttcagacgcgggatttctgccgtttctcacgcgatgcggatactgattccgcaccctaccactcggctctggagtcaatacgcaaaaacccggccgaatgggccgggttctgtaaagctgtgatgcttgcgatcaacgagtctcgcggtgcacggtctgcttgccgcagcgcgggcagaacttcttgagctcaagacggtcgggcgtattacgacggttcttagtcgtaatgtagttacgctccttgcactcggtgcaggccagcgtgatgcccggacggatgtcggcgctcttagccattgtcattcacctctgtgttcttaggtatagtgcgcgcccaccggttagcgggcgcgatttgtagcgaggaagaggctcgaactcttgaccttacgattatgagtcgtacgctctagccagctgagctatcccgccagagagccccgagtgagaattggactcacgacctcttccttaccaaggaagtgctctaccactgagctatcggggcgtggc

SEQ ID NO: 523 - DNA, 23742 bp, Unknown
  R48_24m  MAG No. k141_55916
cagccgcagtatggccagccgcagtatggccagcccgcacagcccgcagcgggctacggccagcagcccggctatggacaggcctaccagcagccgaatgcctacgcacagccgcaatacaccgccgctccgtatgccgccgccccggtgtggcaatcatccaagtccaagttggctgccggcctgttgggcatcttcctcggcggacttggtgtgcacaacttctatctcggcaacaccggcaaggccgtggcccagctgctgctgacgcttgtcggctggattctgctcggacttggcccaatcgcagccgccatctggggctttgttgaaggcatcatcattctgtgcagcaagcccggctcgccgtggcataaagacgccaacggctacgaactatcagactgagactgacctcgggccacgttcattgggcctctgatcaaccacgcctctgcaggtatcatctcgatgccgcagtcgtagcgggatgcgacacgccggccgtgtacatgagttcatgtacacccgatacaggcgaatcagtatcgcacgagattcaacagttcctgctgtttggcatagcgggaaacgttggtcagggcgatgcggatgatgtgttcggaagtcttttccaaatgattgccgccggccacatgcggggtgatcaggcaatgcggctcatcccacaacggactttccgccggcaacggctcaggctcagtgacgtccaatccggcaccgtggagccgtccattgtgcaaggcgtcggccaaggcctcgggatcgatggcgtcgccacgcccggcattgatcacgatggctgtggatttcagacgacccagacgatccgcattcagcagatgatgggtctgcggcgagcgcggcaccgccatcgccaccacgtccgccaatggcagcagtgcttccagccgctcgaagccatacatcttttcaatgcccttggccggcacgtccgcatgacggcgcacgccgaaggtacgcatacctacggattgggcaagctgagcgaaatgcgacccgatgtcgccgacgccgataatcagcgcgatgccaccttccgggctcaataccgggccttcatcctgccactgatgatcacgctgattggaggcataccggttgaggttcttcatcaatgcccacatggtggcgaacatgtgttccgacacgctttggccatacgcgccgctcgcattggtgaccatggtgccgcgaggcagcacacccgagcggatgtacgcatccacaccggcgctgaaggtctgcaaccattcaagacgggtgtattgagcggcctgcgagaccgggaagttgccgatgactgcggtagcttgggagcgaagctcctcgggaacagcggccgaccagaccatgtcgccgcggtgcgcttcgtcgcccacgaattcctgcggcacatcgcgggccgccttggcgaaagcgcgccgttctccttcgttgagtggcaggcagttgacaatcagcttatgcgtgttctcaatacccatggttcaccaaactaggcggcagggcggatattatcgcgtgtttcctcatgctgaaccaatgccgaacccgccccgccggaccaatgccgaacccgccccatcaaaccccaccaaaccaagggacagcccattgcgcatcgaccgtagcgtccgccccgaaccgtacactcacaggtggttttgtgattccatagcgtgcagccaaggcagtacgattgccggtttatccgcacgcacaggtacctacgccggttggtaaaccttacattccatacattgcaaccgaacgtttaggagcatgtatgcctgagcagcatattgataacgagaagattcccacacgtcttatcggcgcgattgtggctgtcggctcacttgccttcattggcattctgaccgaaaccgtgatgaccgtgcttttccccgcactgatgcgcgaattccatgtcgacacggccactgtgcaatggattaccacgatttatctgttggcggtggccgctaccatgcccatcagctcgtttttgaagcgccgattcgcactgaaaaccatttttcttgcggctgtgattctggccatcgttggctcgctgatcatgatcgtcgcccaagccttcccgctgctgattgtcgcccgcattattcagggcattggctcaggcgtggccacgccgttgatgatcaacatcattctggagcagtctcctcgttcgaagatcggccgattgatgggcgtaggatcgctggtcattaccgtggctccggccatcggcccgaccgtcggcggcgcggtgaccacagtgctgccgtggcgcgcgattttcgtcatcgccattccgctggtgctaatcgcagcatgcatcggcatgaagtgcattgagcagaagacaccgaccgaggctgcctatcttgacccgattcagcttgggtccattgttgtcgcgttggtcggtctggtgctggcgctcaaccaaggtggcgtggccatcagtgcggcggtgtccggcaagtcagccacacgctccggcattatcgccattgtcagtctgattgtgggcctcgccttgttgatcgtgttcgccatgagttccaagcgtgccttctccccgctgctgcgccttggcattctcaaggatcccgccgtactgttacacgcctgcgcatatctgctgctgccattggtcgccatcggctacggctatgtcatcaccaatgtggcacagctctcgctcggcaccacggcatttgtggccggctctctggtgctgcccggagcactggtcggcgctgtctgtgccccgcttggcggctggttctacgataagttcggcgcggtcaagccgattctgattccgatcggcatcgctattttgggcccagtgcttatgctggtgttctcgatgcagcttacgcccgtgctgctcgccggattctatttcattttcggtctgttctattccatcggcaatgcgaatgtgatgaccagtggcctgtcggaggtctctcccgagttcaagccggacggcaacgccattttcaacacgtgtcttcagtttggcggcgctgccggtaccgcactgttctccacgattctttccgtggctcaggccggcgcaggagaagaaggcaccgctgagtttgctcacgccactgccgtcggcggcacatggacgtttgccacgatgacggttatctgcctgattggctggtgctgtctggccaccgcgttccgcattcgcgcctcacgccggcgcgcctaagaccgtcagtccgcggcccgcgacgcctcccgcccggattcgtcaccgtgcagtatcgggcgaatcttggcaagacgctggctgacttcgtgttcatagccgcgatcgttgggatggtagtactcggtgccacgcagctcttcgggcatatattcctgtggcgccacggcaccgggccaatcgtgcgcatacttgtagccctcgtggttgccccactctttcataagcttggtgggggcgttcctcaaatacagcggaacagcgccgatcttgccggtatccacgtccgcgagcgcctggttaatggcgttatagctggcatttgatttgggcgcggtggccacggcaatcgtggcttcggccaaaataatacgtgcctcgggcatgccgaccagcgccacggcctgcgccgcggccacggtgacctgcaaaatctgcggggcggccatgccgacttcctcgctggcggcaatcatgatgcgacgggcgatgaagcgcggatcttcacccgctttcagcatgcgcgccagataatggatggcggcatccggatcggagccccgcatggatttgatgaatgcggaaatcacgtcgtaatggtcatcgccgtctttgtcgtagcgcacggtggcggtgtccattaccgtagccacgatttcggaggtgatgatgggtcggcgtgcgccctttttgcgggcttcgtcgccggtgaccgcgccagccgcggcctccagaatcgtgagactcttgcgtgcgtcgccaccggccatgcgcacgatatcggcgatggcttcgtccgtggctttgacctcgtccctgagaccgcggtcatcagtcagcgcgcgctgcaccagttcggtgagctgatcaggctccaatgactcaagcttgacgaccaccgaacgggagagcaacggtttgatgatggaaaagctcgggttctcggtggtggcgccgataaaggtcacgtcgcggttttcgacggcgggaagcagcgcatcctgctgggatttggagaagcgatgcacctcgtcgatgaacagtacggtttcccggccgcgtgacacgagccgttcgtgagcgcgggtgagtacgtcgcgcacgtctttgacgccggaggtcacggcggagagttcctcaaacacgcggccggattggccggccacgatggtggcgagcgtggtcttgccgacgcctggagggccgaacaggattacggagctcggcgcggtgagactgcctttgctggccggattggcgaggcggcgcagcggcgagccctggcccaacacctgcgtttggccaatcacctcgtccaaagtgcgtggacgcatgcgcaccgccaacggccgtgtcatcgactccggcgcatcagccgccccaaacaaatcgttctcactcataacgtcctatagtaccccagtgttcgaacagacgttcgagctgcaccttggcttccctcagagaggggagccaggaatcagttactcaccttgtagtcgtggaagactacttcgccggtgtcttgggtggcgtcaaggtccacgatgccttcgatggcccagtcgtggtcgccatcgggatcatcgataatctgacgcaccttccacgtatgctcgtcgttctcgtgcttgtcatccaacatgaacagttcgggcgagcgtgcttcggcgccgatgcccacgtactcgtgctagtcgtagtagtcgtcgtgcacatcttcccattcgtgcacgccgtagccccagtccttgtcgagcgcgccgagcttgtccggctggtcaaggtccataagccgcacacggcggaacatggcgtttctgatcagcacgataaggcctcgtcggtcctcgaccaccgcgttcttcttgcccggcgccgccaaggaggccgccgcctcggactggtcggcggaatcgccggcgttctcccattcatccaccagcgaggagtcgatggagcgcacgagcacgcgcagccaggagatgatgtcttcgagttgctcgtcacgtttttcgggcggcacggtacgcgccagcgtgcggtaggcgtccgagaggtagcgcaacagggtgccttcggagcgggcgatgttgtatcgggtgatgtatccggtgaagtcggaggcggtttccaccatgtcgcgcaccacggatttcggcgacagccagtagtcgttggcccacggcacatcgtggcggtactgatcgaacgcggcttcgagcatgtcttccagtggcttcggatacgtaatctcctgcagcttatccatacgctcgtcatagtcgagtccgtcggccttcatatcggccatcgccttgtctcgggcctgacgctcctgggcacgcagcacctgcttggggtcttcgagcgtggcctcggccatggagatcacgtccagcgcataggtgtcggactcggggtcgagcagttcgagcgcggccagcaggaacggggagagcggctggtcgagggcgaagtcgtccggcatatcaagggtcatgtagtagtccttgccgccgtccttgcggtcctcggtttcgatgacttcggtatcgaacagggtttggaagatctcgtcggcccgctggtgcagatgctccttctggtcgggggtctgcgcggaatcgtcgatgagatcgtcgatacgggcacgggcgtcaccgccctgcgccacttcattgagcaccatcgaatgcgtgattttcaggtgcgggaccagggtctccggttcagcgtcgatgagcttatcaaacgtgctctggttccaggtcacaaaaccttccggcgccttcttgcgcttgaccttcttgagtttcttcggatctcccccggccttggcgatggctttctggttttcgatttcatattcgggagcctcggcgatcaccagtccctcggtatcgaatcccatacggccagctcgtccggcaatctggtggaattcgcgggcgcgcaggcggcgcatcttggtgccgtcgaacttggtcagggccgtgagcaccacggagtgaatcggcacattgatgccgacgcccaatgtatcggtgccgcaaatcaccggcagcagaccctgctgggcgagctgttcgaccaggcggcggtagcgaggcagcatgccggcatgatggatgccgacaccggtgcgcagcagtcgctgcagaatcttgccgaaggctgtggtgaacttgacgcctttgatggcttctgcgatggcttggcgctgttccttgctggatacaccggtggaggcgagcgcttgcgcggtctccaatgcggcgtcctgcgaaaagtggaccacgtaaatcggggtttcgccgttgcggaaggcgagttccacggttttttccatcgggtcgagcgtgtattcgtagctcaacggcaccggtcgcggcgcgtcggcgattacatccacgtccggggtgtcgttcagatcggagagcttgtcggcgatggcgtccacattgccgagtgtggcgctcatcagcaggaactgggtctgcggcagcgtgagcagtggcacctgccacgcccagccgcgctccggatcaccgtaataatggaattcgtccatcgccacgaggcccacatcggcatgggtgccttcgcgcaaagcctgattggcgaggatttcggcggtgcagcagatgatcggcgcgtccgcgttgatgtggctgtcgccggtgatcatgccgacattgtcgcggccgaacacttcgaccaagtcgaagaatttctccgacaccagcgccttgatcggagcggtgtaataggagcggcggccagtgcatagggcggcgaagtgcatgccgagcgccaccagcgatttgcccgaaccggtcggggtattcaaaatcacatggtcgccggccaagaggtccataatggcctcttcctgatgcggccacggctcgatgcccttgacgtcttccacccagccgaagaaccgttcgtagatgtcgtcggccgtaagattccgttcgcgtccgtcgccgtcccattcgggggccagccgccccagggatccgtattccttctcgtcagtcataatgctcagtctacctagtggcctattccgacggcacgagccgccctccgtcgctatgcgacgcctcccgccagcgggcggagccatgcgaagagctgtgccatgcacttggctccgccaatgggaggatcgctcacgccaaccggcggcgcacctcgtcggggtccacctcgggttcgaggggaggccaggtcatgttcatgttcttcaaggtggtgcgcagcagttcggagaccacggctcgcgaataccagcggttatcggccggaacgaggtaccacggtgcggcggccgtgctggttttctcgaacacttcctgccaagcgaacatgtactcatcccatcggtcgcgggcctcgaggtcggagatatcgaatttccagaacttggtgggatcatccagcctcccaagaaagtgttttttctgttcttcctggcttaccacgaggaagatcttgaggatggcgcatccgctggcggccagttcacgttcgaaatcgttgatctggtcgtagcgggcacgccatacgtcttcgggataggtgccatagacgtgcggcatgaccacatcttcataatgggagcggtcgaatacggcaatccaccccggcttgggcaattcacgcttcacacgccagaggaagtcgtggtcgagctcctcggccgtaggcttgccgaagccatggtaatggatgcccatcgggtcgccttggctgaacacgtggcgcacaatgccgcccttgccggaggcatccatgccttgcagcacgatgagcagccgccgtgccgagcctttgacgccattcgcgtacatgagccgctggtatcgggcgatttcggaggagctgatcgaaatgaacttctcggcgtcctctttattgccgtcgaatccgggagtggaatcgccttcgacatcagtgacctgcatgccgtggtggaacataagacgttgagcgggcggcaacgaccatacggcgctgagcagttcactggatttcgccgcacgcgccagtcgttcaggcacgctggcactggagtcgatggtgtctatgcgatccaccgcgagctgtaataccttgtcgatccgtcgatcggttttggattcctttcccttgccgttcttgttgttctttcctgaggattttccggccgtaccccacttgccggcctcttcaggctcgttggttctgtcgtcgtccttggtcatgctcccgattgtacgtcttgtaactcaggagacctagcaacgtagcgacattcacatttcgcctgttactgcaaatctataggcatgcagtcgttcggaccgtaattgttggctttgcaccaattccaagcctcatctgtcgagtcgaagccctcaccggcaagaatcacatagtatttgtcggaattgctgctgtaggcgggccagtcacccgaccagataagcagtacgtttgaattcttgttgtgcatcgtgatgaattgcgcaagaatatcgcggtagttccaggtcttgccttcagcctccatacccttacgcttgctggacagctgtgcggtatacgtggaatagaacagctctgcggagtccttgtcgtgctcgacctgccaatccaatgccttgcttgcattattttcggcttcgtcatccgtaacgttgctgccgcttatcacgcctggatcagacgatccccagcaatatcttctttccggcagacccaccggaacgcggctgcgcagcgccaccgttgcctggcgccgtcgacaatgtcgaagtaggtgcagtcgccgtgttgaaacttgggggcagcggcatcgaacccactggcacctgctggggagcagccggtaccagcgtcgggccatccatcgactgaggacttgggcttggcgcagactgtgccatcggcgcaccgcattccgtgcagaatcggcttccctccggcatctccgttccacatacctggcacttcatactctctccgttctccctcgtccctatcggccaatcccccgtccgtttgcagtacataaagaagtggcaaacggcccgaaacatacctgagccatcaggaagacggcacgatctgctacgagaaagagatcatcaccgaccggcaaatcgtcggcatcatgctgaagcatccgaccagcgcacgcggcttcaagcgctacttgcgcgccgcatcatgacgcttgaccacgatggtgacgccacccgcagcgaacagcgtcgccagaaccacaaccaacgcaaccgaggcaccggtatcggccgtacgttcggtctgctgtggcttggtgctgccattggcattgacgctaccgctatggttgccgttatccttgtcgtccgtcccggtggacactccggtaacggcaacgggcagagcgaccgtggtcttattggtcgcaccggtcactgtcaggcttatatcaccggtcttggttccggcgggaatcgtgaccttgagctcggcggtatcgccattcgcaacctgtgcttcgccgaccatctgctcgccgatggtggcggtcagcttcgtctcgtcaggcacgcccagcgaggtgagcgtgagcttcgagaagtgcagggtgaacgagccaccggccttgaccgcaccggtcgggataccggtgacggccactgcacggcggtcgtagcgcggggcaaccggattgttgtccttgagatagtcgatccaagcatcgcggtccaccagaccggtgtccttggtgttcgtgccttgggcgaaggcgcggaagttatcgccgccctccaacaggaagctgaacgaaccgatacggtagttgcgtttcagatccaaaggctcaccgttgacggtcaccgaggtgatgtgatggccttgcgcggcatccggatcatacgtgtagctcacgttgtgggacagtccgagttgcagatacgcgcgcgatggcgtgctgccgtccgcgttcgtctgccactgctgttccagcgcttccttgaactgcgcgccggtaagcgtggtggtccacaggttgttcaggaacggcagtacagcgttggcctgggcgtaggcgatattgccgtcggcatcgagcgtgcaggcgtcattggtgccggacttgcagaattcggcacgcagaccgccggggttgaccacaccgatttcggccgcgccgcggtcctcgcctttgagcgaatcgagcagcgcatcggccaccagattgcccatggtcgattcggaggcgcggtcgtcacgcttgccgtccttgaatgcggtggtgatatccgcagacaccttgccgaccttctcgccgcccttttcatcggccaccttaagggcctggtacacgatgtccttcaccttggcgacagtcggattcgcggcggcgagcaggccatcgttgtattcggcgtaatcgttgtagtgcggatcatttttgtcggcgggctgcgaagccacctgcacggccgtgttgccggacttgtcgtaagacaccgcaccggtggccgtattgtaggtgagcaccacttggccgatgttggcggcatagctaccggtctggatgatcggccggttgttgtgcgcgggatcggtgtacgagtacttcatgtgggtgtgtgcagtgaagatcacgttcactgccgcatcggtatcgtccacgatcttcttgaacacggggctggcggccttctgctcgtcaagtgtgggcttggcggtggcgtcatcttcattggaggctgcaccctcatggtattcggccacaatcacgtcagcctcgccattggattcgtcgccgtcggtgagctgcttggccacacggttcacggcctccaccggatcgccgaattcaatgtccttgacaccaccgggagccaccaatgtgccggtttcctgagtgaccgcaccgatgatgccgaccttcacgccgttcacttcctgaatgctgtactcgggcagagccggggttgtggtgcccttcttgtacccgttggcaccgaggtaatcccattgggcattgcgcgcgccctccttgccgatcacacgatcggtaaggtcggcatagccttgatcgaactcgtggttgcccaccgccgaagccttgacgcccaaagcattgagtacatcgatggtcggctggtcctgctgtaccgaagagttgaacagcgaagcaccgatattatcgccggcggacagcagcagtgatgagtcagggtattcgcccttgagctgctcgatggtggcggcgaacggcacggtgaggttcttgtcgatacggccgtggaagtcgttgaagttcagcagattgatggtggtgctggcgggaaccggctgattggttgccatatagcccatacgcaatgaatggccattggtcacgccgtcgtctgcccagaacaccggcttgtacaccttgccatttactaccttggtggcttcggtatcaggggtgatggcaaaaccttcggtgttctgcgtacggatttcatccggagtgtcggtcagcttggtcagctgcagcacaccgttcttgaattcgtaggtgccgattttggcaccggtgttcgcgtcattgtcgctttgggcgagcagctggttgtgctcggcgtcccaagtcagatcgcgcgggccatcatagccggtgttcactgcggactgcggcaggtcgatgtcggccaccggatgcaccaggtcctcatcattcacggtttgcagtgcgaaagcgtagatatggccggttttctccagtgcggcgaagaacagaccgccgaaatcattgccgaaaccgtccgggtcgtaggtcattacgttcttcgggtcaaggttggactggaatccgttggcggtcaggaccgagtcgggaataaaggctatgccttccaccccaagattggcgtccgctccgtggcccagcgtcacgccgaactgcgtgagtgctgcggtgagattccactcgtgcgtagcggtcagctcttgcgctccgtcgccgttggcgtcggtggttttcgcggtcacgtcatactgcaggatggaaggccgcggcacattcttgttttcgttgtcgcgctcggcgccgatgaatatgcccttggatgaatctccgttgatcagcgtgatgccttcggagtccacaccgcccttgccgtccttgaagtgcagctgcttgccgcccttggtctgaccgttgttggtgaaggtccagccatcagtgggatcctgctgccatgtgccgttctggtagacgaacttgttgatggagccagggcccttatcagcggtgttgccgagcgtggggttcagatcgttgtcggccgcccacagcacgccttgcttgccgtctttaccggcttcatacaccagaccagacagattgccgtcagtgtggtcgccgccttgtcctttggcgccaaattcgccttcggcatccactgtggtcacatcggccaatcccgaccatgcgtccacggtcatggtctcgccggcgggcggagtcggagtcgggtcatcgaacacgttctgtgcaccgggcgtgggcgtatcggaaagcgcgaaagtgccatcgtccttacgggaccacgactgactgtcgctcatcttcttcacgccggttgtatcggtattccatgacgtggaatccaccacatcgctatcggtaaagtcgccgctggtagtggtcagataggcttcgtcggcatcggaacccaggccgggctcggccttgtcggggtcgatgtatgccaccagatatccgccggctttgatgacggtgtccgtattcgttacttcgctggtgccgatggtgtagtgcttcttggctttcttgccgctgtcgtagatgccccagcccttcacgtcaacgtctgtggagccggtgttcttgagctcgacccaatcgcaacgcttgctatccgggtctccggcagctttcgtattgccggcatagacctcgttgatgattacggatggtttggcagccgtgttctgttcggcagtggcctgctgctcgtccgcagccgcagcgggcacgccgatcagggcgatgctgctcagtgtcaccgcagcggtgagcagcgcgatggcgcgccgcgacatcgcggtgaaattgttggtgtggaacattactcccgttccttcctcgggttgtgccgccgcagcatgatgctcttcggcggatgacaccccgagggtatgagagagaaatgaagccgacaccgtatgaaggcaaactcggcagatctccaaactgaactttggctgaattaccgctgaagctggttcttggatttgcgtcgaaccgtccgtattccgccgacaatcgcgattacagcggtaccgatggctacgctgatcaacgccggtcgttgcgcggcatggagggtggcgagatccggcccggccgcaatggcgctgttttcacccgccgagccatcagacgccggatgattacccgcgtcggcgtactgggcattgaccacactcgggccggtaagcgccacctggtcggcggtctcgaccttggccacatcgccgtgcttatccaaggtgacgcgggcgcacagggctttggcccagttgatacgctgccagccgtcgctcgattgccatagggggtatccggaatccaaggcagtggctttcaaaatcgcgttgcgctgatcggcgtgcagttcgggataggccagtcgcagcacgtccgccgccccgcgcggtgccacgaaatcagcgccggactgggcggtgtcttgcgggaaggtgtaggtcaggcgtgcggtgtagacgcgcacggccgaggcctggtccgcgaccggctcggtggccaccgggtccagaaaatcgttggtgtagccgcccgaaccggaggccttggtgttggcgatgcaggcggcgagggtagtgccgtggccgtccgcggcgcagcgggacaccagatagtcccgcagctgccgggacgcgggcacgatggacgaagcgaattcgttatgccagtactgcccgttctgggcggatgcgccaatgcgcccgcccatgatgtcaagcggataatgcacgccgagcacgatgcggttgttgccggcctccgaagtgcgggccatgatttgcggcgcgagttcgggaatcatgccggccagcgcgataccccacgaataggcgccggtagtgtggccggaggggtaggaactgtttttctgcaagttcgagtagccgggcacgtgttcgagccatgagggtgattgcttgatgtcaagcgtggcgggcagtccggcgagatcgttagtgccgccgtagctgctttccgcacggttcagataggggcgcggatgcatggccgcacgttttgaggcgtaggtggaggccacattaaaggagaagatatcggcgacggcgttgagtttcccggatttgagcccttcgctcatatatttgccaagcaccggaccgagcgcgtccggcatggcttcctcggcttgcagatcggagtcgacgagcgcacgcttgcgttgggcgttcaggccatccttatcgagattttcggcggctttgtggttaatggccacggccaaatcttcgtcgagtttcattgtatcggcgtcgagcaccttgccaccgtgttcggcatcggtgggggcctgccaatagttcttttcgtagtcggagagcaatgccacccaatccgggttgggcagctggtcggcctgtgcgattgcaggcgtcacggctagcgtggccgccaacgccagcggcgcaatggtcgcaatagcaaaaacggaggataggtgccggaacatcttcatatgttccaacctatcctccgtgaaggctacgtagccggagcccagtcaaacactcagtaaattcttcgtgccggcttagcggcgattgagctgaccgtcaggcctctgactcgtcttcggacttgcggaacgccgggaattcgccggtttccgggtcaacctgtgactcgggctgggtggcgtcatatccctgttcgtagcgggtgcgccgccagttgcgaatcgaggcgttggtgccacggtgatgcacatggtatttgcgcggcgcaccaccaaacggcagctcctcgagctccttggccaccgcgatctgattgacattggacgggtctccggcggcgatcggcgccacgggctcggcctcggtgggcgcggccgtgcgctgctgcatgcgcgaaggcagccattcggcgagcctcgacagcagccagcaggcgatgaagtaaatcaccgcggccatgaccagcgtctgcaggatgttgaagtacatcgagccgagtcggcgcgattcctgcagcaggtcggtatacatgatgatcgagcccagagcggtgtccttcaacaccacgaccagctgggtgacggcggccggcagcatggcgtagacggcctgcggcacctcgacctccatcaacgactgcgtttcggtcaggcccaaagcgagcgaggcctcgcgctggccgcccggcagattgccgacgccggagcgcaccagttcggcgaccaccgaaccgttgtacagcaccaaggccagcaccacggcccaataggacgggctgggcaggcccgcgaacgcgaaccatcgccagaagaagatcatgagcagcagcacgggaaccgcacggcagaactcgacgatcacggcggagacgccacgtaccaacgggttcggcagcagtcggcccacgccgaacaccaagccgaacaccacggcacccaccacggccacgatggtggccttgatggtcatccacagtccgggcaggtagaagtcggtccacgcctctcgttcgacggcgggcttccacagctcccagctgagctggttctcgccgtccggcgggttgtgcaggcgcatgaggataaacacgagcaccaccgcgaacagaatgcccgcgatccagttgacgatgcgaatggtgcgccggcccttgggacctggcgcgtcgaacagcacggaattcgaagtatcggccatatccgtcacctccttacggcgagtttgttggacaggtacgtggtgagcatgccgatggggatgatcaggatcacgtagccgagcgcgaagatcaggaagatttggatgatcacgtcgggacggaattcgatcatctcgctcatcagcgaggatgtttcggtggccacggatgcggcggcggccacggtggagttcttgagcagggcgatcagcgtgttgccgagcggtgccacggagcctcggaaggcctgcggcagaatgatctcggtggcggactgcatgaagcccaagcccagcgctcgtgcggcctcggcctggccaatcggcacggtgttgatgcccgaacgcagagattcgcacacgaacgccgccgtgtacaggctcaggccggtgaccgcgagccagaagaagttcgtggtgaaggtgtcggagaagctgagcttcagctgcgcgtaggcacccagcaccatgaacaccatgatgatggtcagcggcaggttcttgaacagttccacatacgcaccggccacggccctgagcgaggaaatcggcgagatgcgcatcaccacaaggatcacgccgaggatcagggagaacagggcggaccatagggtcagttcgatattgaccagaaacgcgccgagcacgtcatactggctgaagagttccaggaatccgctcatcaggcctcctctccttcgtccggggtgggcgggttgtagcgtacgtcgggcgtgtagttggtgcccttggtgttatcgctgatggcgttctcccacgagccgtcctgaatcatgtccacgatggcgttgttgattttggtggccagctgtgtgtcgcccttcttgatgcccacgccgtagtattcctgcgtgaacggtttgccgaccaccttgagcttgccgcgcgaggcggaggccaggccggccaggatgatgtcgtcggtggttaccgcgtccacgatgccggagaacagggcagtggcgcattcggcgtaaccgggctgttccataagctggacttcggaggcgaacttctccttgacggtggcggcggaggtcgaaccggtgacggagcataggcgcttgccgttcaggtcttcggggccgttgatggagttgtcgtccttgcgcacgagcagatcctgtccggccacgaagtacgggccggcgaaggagacggccttcttgcgctcgtcggtgatggagtaggtggcgaggatcatgtccacgtcgccgttctgaatcatggcctcacgctgcttggagggagcttccttccagatgatctggtcttcggaatagccgagtttcttggcgatgtacttggccacgtccacgtcgaagcccacgtaggtgccggacttcttgaagcccaggccgggctggtcgaatttgatgccgatgcggatcttgccggtttcgtccgcgccgcaggcggccagcgacattgtgcaggccacggcggcgagcgcggcgatcacgcggcaaacctttcgtttgaacgtattggtgaatgtcattggattgcgtacccgtctttcagtgggttcgtcagtgggtgaggatcttcgagaggaagtccttggcacggtcggtctgcggatgctcgaagaactcgtcgggcgtgttctcttcgagaatctggccgtccgccatgaagacgatgcggtcggcggccttgcgcgcgaagcccatctcgtgggtcacgcagatcatcgtcatgccttcatgcgcgagttcgaccatcacgtcgagcacttcgttgaccatttccgggtcgagtgcggaggtgggctcgtcgaacagcatgaccttggggcgcatggcgagcgcgcgggcgatggccacacgctgctgctggccgccggagagctgggagggcatcttgctggcttgggagtcgacgcccacgcgggcgagcaggtccatggccagttgctcggcttccttcttgtccatgtgacgcaccttgatgagggccaacgtcacgttttcaagaatggttttgttggcgaacaggttgaacgactggaacaccatgccaacttcggccctgaggttcgcgagctccttgccttcctgtggcaggggcttgccgtcgatgcggatgtcgccggaatcgatggtctcgaggcgattgatggtgcggcacatcgtggacttgcctgagccggacgggcccacgaccaccagcacctcacccttggtgacggtcaggttgatgtccttcaggacgtgcaaagcaccgaagtgcttttcgacgtgggtcagttcgactagcggacggttcgggtcctctttgccgggaaccagcggggtcaatttggccttgcttggtgatgttgtgcttgtcgtgcgcgaacgcactgctgtttcattgttcgtttcagacatgagtgggaggataacacaccgacgtttccaacgtgttcacagtatgtccacacagttgctcagtcgatgtctcatttccgcatcagacatcgtgaaggcggcattgggcatcggcatacattctcgctgagtcgcgcatcgctcggcgtctgctgtgcgctgattgcctgctgcgtggtggctgagacgttgctgcgacggcaaagcgggcacgtgttgtcctatctgctgattccatgtttggccttggtgtcgttggcgttgctgccgtgtatgccgcagtcgggcgcatggctggcggtcactttgtattgtgtggggctgggctcgccgtttcccatgtcgtattcgtataaatgtgctaggcattttgagcgtggctagctgttcgcacacgatgagtgctgttatacggtggacgacactcccgaagcgcggtggataaccgggcgcggcacacgatatgccggtggataaccggttcgcgccgcttaagttatccccatttttcggttttgcccctgtgccaccgtggaatgcgctacgctcggcgcatgaacggatacagcgaagcgccgcacaatggcgaaatcaacaactatctgcgcaaagatcttgacgccaaagccacggccaagaacacggcctgttggaatctgctgggcaaagtgcgcacgaaacgcacgttgtgtttctcgctgtataccgcattggaattatgcggcgtggagttgccgaggcacagcacgttgccgcagaaggatttttatgtgacggtgaggagcaaggggacccgctcttcattggacaatgtcgactatcgcatatggaatgcaaagttcagcagtatcgctttttcaaacggcgtaacctgcatgcatcccatggatgcgtggatacagtttgcccaatatctcaacctcactgaattagtggtgctggctgaagcgctcatcagacgttatggatatgccattgaacaattcactcaacgactaacggcctttcaccgcgttattggtcgtgcgcgttgtgaggcagcgctgaagctcgtaaaaccatcggattccgttcaggaaactcgtacacgcttggcgcttatgcttttcggcctgcccataccgcaaacacaatatggcattaccgattcagagaacggatacacctacaccgttgacatggcttatccacaatacaaagtcgctattgaatatgatggcgatcatcaccgtcgcttccgcaaacaatatgtgcgggaccagcaaaaacgtcgacgtctgcggcaattgggctggaccgtcatcgaggtgttcgccgatgacctgtggaacaccgccaaacaacgtgccttcgcacaagaggttgccaccgcgatgcaaataccgcttcctggccgtcctcaaccttcatgccgggtattaatagacggcagccttaccatcaatgcgcgcaaaggggaatacaggaggcggaaacaagcaaaacacaacaaagcctcacaacattgatcaaatacggagttgcgatcgctcctcatggggcgacaattcccccatgaggcggcaatttgcccatggggcggtttgaagaaattgtgaaaccgcggaattaagccattttgacctaccgccccatggggttttcaccgccccatgggttgtttaccgccccatgaggaagttaccgccccatggaaggataatcggcaaacgccaagggggacaccgcatggtgcgaggtttgccgcatggcggaggtgccatcgggcggagtatttggcaccccttggcaggtatttggcacattgggccccacccgcaaaaagcaaatggcccttggaattattccaagggccatttgcggctaatagcaccggagcattactcctcgaaaattaatctacgcatgcggagaccgccgttcgaagccgaaggcgcactaaggtgcgtcgagcgctgaggaaaggcggtatacgctccgtagattagttttcgtcggcgtccgggtcgtagtcgacgccggtctcggcgcgctgctcgtcggaaatcggggccggagcaccggtcagcgggtcgcggccgccgccggccttcgggaaggcgatgacgtcgcggatggagtcggcaccggccaggatggacacggtgcggtcccaaccgagggccaaacccgcgtgaggcggagcgccgtacttgaatgcctcaagcaggaagccgaacttctcgtcggcctcttccttggtgatgcccagcacatcgagcacacgggcttggatgtcgtcgcggtggatacgtacggaaccgccgcccatctcctcaccgttgcagacaatgtcgtaggaatcggacatggcgtgctcgggatccttgtcgaacttgtcgatccaatccttggagggcatggtgaacgggtggtgcatggaggtccacttggagtggccgacagccacatcgtcatcatccggatcgtcggtgggcttgaacagcgggaagtccacgacccaagtgaaagcgaacttcttcggatccagcaggccttcgcgggaggcgagctccacacgcacggcacccagcagcagctgggcggactcgcgagaaccggcggcgaagaagacggcgtcgccttcctcggcaccgacggcctcgcgcaggccgttgcgctcctcatcggacagattcttggcgacggggcccttgagttcgccgttttcgccgaagaccacgtaggcaaggcccttggctccacgctgacgagcccaatcctgccaagcgtcgaactgacgacgcggcgtggcggcaccgcccttgaagaccacggcacccacgtacggggcctggaacacgcggaacggcgtgttcttgaagtactcggtcagttccaccagcgggttgccgaagcgcaggtccggcttgtcggagccgtacttgtccatcgcatccttccaggtgatgcgcggtagcggcagctggacctcatagccggcggacttccagatggcggcgatgaccttctcagtcatggccatcacatcttcctggtccacgtaggccatctccatatcgagctgagtgaactcgggctgacggtcggcgcggaagtcctcgtcacggtagcagcgggcgagctggtagtaacgctcgacaccggagaccatgagcagctgcttgaggagctgcggggactgcggcagggcgtaccaggaaccgggcaccagacgggccggcaccacgaagtcgcgggcgccttccggggtggacttgatgaaggtcggggtctcgacctcggtgaagtccatgtcttccagcgcgtggcgggcggccttagccatgtcggaacgcagcttcagattgtgctgcatggacggacggcgtaggtcgaggtaacggtacttcagacgcacgtcctcgcccggcagcttgttctcggactcattctcgagagcggtggaaacctggaacggcagggcgtcggacttggcgaggatctcaatggtctcggccacaacctcgatcttgccggtggccagatgggtgttctcgttgccgtccgggcgcagacgaacgtcgccggtgacctgaatcacgaactcgctgcgcagcgggcgggccatgtcctcgtcgtagatgacgacctgcaccagaccggtggcgtcacgaaggtcgatgaaggccacaccaccgtgatcacgacgacggtcgacccaaccggcgagggtgaccttctggccgaccagggcctcggtcacttcagtggcatgatgtgttctgtaagccgtctggctcattgtcttagttctcctcgagttttcgcgcgaatacgtcagatttcgacggtttgctgggcaaccacagtatccggttcccacgacgtgcaatcggcggcaacctgctcgccggtgacgatgttcttgacctcgtcaccggtcgattcctcaccctcggcggcactggccgggaaccacacgtacgggatgccgagcttgtccgcatacttgatctgcttgccgagcttggcggcggtgggtgccacatcggtggcgatgccacgggcacgcagctgggcggcgatgcgattggcggtcggacggtcctcttcgttccacacggcgaccagcacagcggcagggctcacacggttggcgtgcgcgccggcggtgtgcagcatgtagctgaccagtcggctcaggccgatggacaggcccacgcccggatacttgcggttgccctgggaggcgaggttgtcgtagcggccaccggagcagatggaaccaagcgaggcggcgccgtcgaggaaggtctcgtagacggagccggtgtaatagtcgagtccacgggcgatcttcaggtccgcgatcacggagccggggcggatggcggcggcctcgtcgacgatcatggccagggtatcgagtccctgacgggccagcttataggcctcggaatcctcggcgatgccgtgcgcctcgcacagcgcgtcgaacttggcaaccagctcggcaccatcggaggcggtaagctcggccagttcgaggcaggcgcgcgcctgggcctcggtcgcaccgcaggtttcggaaagtagtcgggccacctcgtcggcgccgatcttgtcgagcttgtcgatctcgcgcagcacaccttcgatgtccgtcagaccgagtccacggtagaagccttcggacagcttgcggttgttggcatgcacggtggccttgggcaggccgtatgcgcgcagctcttccaaggcggaaaccatgaccagcggcagctccacctcatagtggtcaggcaggtcgcccgcaccaatcacgtcgatgtcggcctgcacgaactcgcggaagcggccctcctgcggacgctcaccgcgccagaccttctgaatctgccaacgcttgaacgggaaggtcagcgcacccgagtgctcgaccacataccggctcagcggcacggtcagatcgaaatgcaggcccaaccgctcttcaatcggagtgtcggattcatgaccgacctcctgcaaacggctcagcaggtagatctccttgctggtctc

SEQ ID NO: 524 - DNA, 35172 bp, Unknown
  R48_24m  MAG No. k141_56084
acacccacagatacgcccgccccgaagcaacaatcacattggggcgcaacggatgagcggacaatacctgcaacacattctgcggcggccccaccaactgtggccgaaccgcatgccccaacaaatcgcttaccgagcaccacgcataccccctgcgaacgagccggcacaggcaacaccaccacctgcatataccgcatggcgtaattactcaaaaagccattattgtcatacacattcagcgtgaacgtcagccacggtcccttgctgtagaacctgttcacccgcatattacgcacggcttcgccacgaagcaccaccgtgcttccagcatcgacggtccgtttggcctgccaatcacgcgcatggaccgaatacgtgaccgaagaaactccgggagccggctcataacggatctcaaccagcacaggaaccccgaaaccacggaaaaaacccaacacatcatcgcaatgcaaacgcacgccaccacgaacgacgcgatgacgccgttgcgataccaataccgccacgtcggccacatgcgctgcctgacacggaccatacgccagccgagcaacgaaccagccaccacgaacacgcaccagacaacaatgccgtaccggaaaaccctacccacccagaaaggaaaaccagatttatcagcattcagcagccacagcacgccgacgaacaccacggcctccagcatgcaccacggccaatccaactgccgacgaacaaccgcaccggcaacagcatccacacgatcccacatcatcaaccttctctcatcaaaaaccgcttcgtaaggcaaccatacagtcagcagtacggacaacaagccggctatcacacgtaccagcacagctcctgtgccacacaagcagcatctgcgactccagcgccaggggccatgtaccgcgaatcattgtcgcacacattgatcggcgtccacaggcaagccaggccattcgtcaccttcatgctgtcatgatttccgtggaaggccggggtgagcgctgcagaagcgcagacgatagccagtggggtctgttcgtccgtccgccatggacagtggccggccgaatacagcctcatgcctgtgggacggcacgcggatttggccggtttccgcgcggcgtcccgcaggaacgtgggatggtagagaaatcaatcgtttgacgttcgtggcgttccacactatcaaccgccagaaccgcgcaatcacgccaatccccgttacggaccataatcatcccccgggctctctgcgggacggcagacgaaaaaccgcgaaatccgcgcgtcgtcccgcacttcgcccggtccacgaacaggacaagcatcaccgatagaccgaacacacatctacagccgcgacaagaaccccaacagctagccgcccgccccggatatcgccgtccaatagtaaatcgagcccaaaacgcaaacccaaagcactgactcagataataaaactcggattttccaccacagacagcgagaaactctcccctataccaagtagcgtacgtgccaccttgctcgatagacgaacaatgagaagtatcggttaacgggcatgccgggcaggtcgatgggctctggcgcgggaacgaagacggcgtaccagcacgaatgggccggcaaacgtgatcgtatacaacacgacggcgaggaacacgctgagccatgcggtgaacatgcccaacggcatctcctctaccggagtggtctcggctatgcatgcaacgatctatcactccgatgttgtggtcagtatgcgcggcagttgttcgtcacggttgaggaaagaacgcgtttggcaacgaagtagcgtacgccggccttcctcagtgcgggtgtataccatggtgcaatgcgtcaggcagcggtccaactgtcggcgcagtatttcggcgtcctgctggcggcgggcaaatatggacgggcatgggaagcttacaccgtacgtgcgcacgccccattccttgccgatgatgacatatcgcggattgttgatgggcgcgagtagctccttcataacgccggcgaacagcacctgctcgcgccgcgaaccaccaatcagcatggcacgcaacgccgtgaatctgcgacgtgtctggcggatcgaggaagtcactcacctctttgcctaccgcgttggtttctaggcgctcaggttccgcagtcgccaaatgccagacattggccaccttatcggggtctgcggccacgctgcggttggcggccatgctgtatgcttcactgcatcagtgtaaggcacgaatcaataggttttgagccccagatcgatggtgagaatgatgccggcgattacggcggcgtcgcgcatgatgtttgcgggaatcttgcgggtgatgggcggggcgatgtacccgccgatgaagcagccgatgcacagcatgatggcggccggccaatcgaccgcgccttggatgatgaataccactgaggcgctgatgttcgcgcctgtgccgatcagggttttcaatgcattgatcttgtggaatgggccgattttggcggcatcaagcatggcgagagccagggtgccggcgcccgcgccgaagtagccggagtagatggcgactgccaccacgcccagccatacccaccaggaatcctggctcatgggctgcacgagttgttccggcgggcggtgaggtgcggtaggggtggttgcgcgcttggcggcatcagtggcatcggtggcttcagtggcttcgatgtgcttgagttgcgcggtggcatccgcggcggcctgcttggcctgcatgcggccgcgcggattgatggcgatgatcagcgagctcagcaaaatcagcactggtgcggcgaattcaaagacactcgggtcgagtttgagcaacagaaacgcaccggccaccccgccgaacgcgccaatgaccacatacgtaatggagcgtaccgcttggcctttgagttctttgcgcgcgcccatcacgccaccgatgcccgtgccgaccacgccaacggtgttagaagcgtttgccaatacaggcggaatgccgaacgcgagcaaggccgggtatgagaccagtgacgatgcgcctaccgcatagcccacgaatcctgcgccgattccggccaacagaatcagtagtaatgaagttatggaaaagcccgcaatcattccccgtatccttgtcgctcatcaaccggcacattgccggccttgagcgagaatacgctgttgaggattggttgcgggttttatgttggaatgtggacgtagctcctcgcggaagcgattccctcagtcgcctgaggcgacaactcccctcgcacccgaggggagccagaaggaaatcagagcgcttcgttgtattcgcgaaccttgagggtgcggtgggaggatgccacgttttcgacgatcagacgcttcagggcgttgtcggcggcaatgtgctcgtccagccaggcgtcaccgagcttgaccagcgtggcgggatcggcgtaacccgggtacaggccgttgagcagggcctcggccatgtggtaggtcttgttcgcccagatccagtcgacggcctcgaaataccgggcggcgaacggctcggccaggtcgtggcgcggggtggcggagaagccacgggccacggcttcgagctgggagttggtcagctcgtcgttgtggagtgcctgatcccaagcccattccttggcttgcgtcgtggccatggaggcgcgggcgccgtaggcgaactcgcggttttccgtggtctccttcttggcgagctgcgcgtccacgtcgtcgttggtcatctcgttgacggaggtgagcgcttggacgatggtccacgtgaagttgttgtcgatttcgaggccttcaagacgcacggtgccgtccagcagaccgtgtgcgttggcggcgaatgcggcatcgccctcctcgccatagcccaggtaggcggtggcgagctggaactgggtgtccgagccggcttcggcggcgttggccagggtccacagctcggcggccacgtggcgcagcacatcgtcgcggcgggctggcgccacgtagtggtgggcggtggtgctcatgcaggccagcgcgtaacggaaggtggtggattcggtttccgtggccagaagacgcagggtcatgtccacgaagcgttcggccgggaattcgccgtcacgggtcatatcccagaaggcgagccaggtcacggcgcgggccagggcatcgtcgaaacgatgcaggttggcttcggcgaatgcctgggattcggcgtcgaaacgaatcttggtgtaggtcaggtcatcgtcgttgaccagcacgaatgccgggcgcggcttgcctgccgcggcctcgacgatggtggtttcgccatccacgtcgagttcgaactgctcggtgcgcacgatcttgccggtttcggcgtcttcgttgtagaagccgacggccaggcgatgcggacgcagcaccgggtgttcggccggcgcgctctgggtgagcttcaattcggcgatggtgccgtccgcgtttacggtcaggccggtggcgatcgtgttgatgccggattcctccagccacttggcgctccaggccttgagatcgcggccggaggtcttctccagttcgctcagcaggtcggccagggtggcgttggagtaggcgtggcggttcaggtagttgtggataccttcgaagaactgcgtgcggcccacgtagaatgccagctgcttcagcacggaggcgcccttggcgtaggtgatgccgtcgaagttgacgtaggtgtcgttgaggtcgttgatcggggcgacgatcgggtgcgtggtgggcagctgatcctggcgcaacgcccaactcttctcaccggagcagaaggtggcccaggcgtcatgccattcggtggcttcggcagtggccagcgtggaggtgaattcggcgaaggactcgttgagccacaggtcgttccaccacctcatggtcacatagtcgccgaaccacatgtgggccagctcgtgcagcacggtcaccacgcggcgctcggccagcgcgtcggtcaccttggactcgaacacgtaggagtcacggatggtgaccatgccgatgttctccatagcgcccgcgttgtattcgggaacgtagatctggtcgaacttggcgtacgggtagggcacgccccaggtcttggcgtagaacgcgaagcccttcttggtgatgtcgaacaggtagtcgacgtccttcgcgaaggccttggccaacgactgtcggcagtactgggccatcggcacggtgcgaccgtcttcgttcaggtattcggtgtgccattcggcgtacgggccggcgcagatggcggtcaggtaggagctcatcaccggggtcggctcgaagtcccacagacgggtgctttcgttcggcttgtcgccgagggtgccgtcgagggtttcgcgcggatcgtcctcgatggtggcaaccggcatgttggaggtgacgatccagctggcgggagcgagcaccttgaaatcgaaggtggccttcaggtcaggctggtcgaacacggcgtagacgcggcgcgcgtccggcacctcgaactgggagtacaggtagatgttgccatcggacgggtcgaccgagcggtgcaggccctcgccggtgttggagtaacggcacttggcttcgacggtgacctcgttcttctccttgaggtcggtcagttcgatgcggttgtcctggaaggccacggctgggtccagggacttgccgttgaggtcgatggatgtcacttcgtcggcaatcaggtcgaggaaggtcgacgaaccaggcttcgcgttgaagcagatgagcgacttggaaccgaagttcttcgcgccgaccgtcaggtcaaggtcgacgtgataatgaatcggcgcttcgataacggccttacgttcttcggcttcaatacgagtgagattagaaccgggcatgacttcaattactccttacggtcgtccctggataatccggactacttggtttctacggtttcgacgtcctgggcgatgtcggccacgacgggcacgatcatcggcttgcggtgcagctggcgcgcaacccagctgccgagcgtgcggcgcatggtctgctgcagcttgtaggtgtcacgcgtgccctgcatcatctggtcgttgagctgttcgacgatctggtgacgcaccttgtcgaactcgctttcgtcctcggccacggcgttcaggtagatcttcgggccggtgacgacctcgtggttgtcggtgtcgaccaccacgaacgcggatacgaagccctcggtgccgagaatgcggcgcttttccagctcgtcatcggtcagctcgccgacggaatcgccatcgacgtacacgtaaccgcacggcacggagccgacgaccgcggccttgccgtgatacaggtcgaccacgtcgccgtcttcggccaagaccacgttctgcgggtccacgccggtcttgacggcgatcaggccgttggccaccaggtgacggttctcgccgtggatcggcatggcgcacttgggcttgacgatgttgtacatgtacagcagctcgccctcgttgcagtggccggacacatgcacggcggcgttgtcgcggttgacgaccttggcgccgagctgcacgagcttgttgatcaccttgtagacgccgtgctcattgcctggaatcagggagctggcgagaatcacggtgtcgaactcgttgatgtggatgtcgcggtggttgccgtcggcgatgcggccgagtgcggccatcggttcgccctgggaaccggtgcacatgaagacgagcttgtcgtcctgaatgtcgttggcctgcttcaggtccacgacggtgccttcggggatgtgcaggtagccgaggtcggcggcgatggacatgttgcgcaccatcgaacggccgacgaacacgaccttgcggccgtacttgtgggcggcgtccaccacctgctgcacacggtgcacgtgggaggagaagctggcgacgatgatcttgcgggtggcctgggcgaacgcttggtcaagggccgggccgatggaggtctcgggcttgacgaagccgggcacctcggcgttggtggagtccatcatcagcaggtccacgcccttttcgccgatcttgccgaattcgacgaggtcagtgatgcggtggtcgagcggcagctggtcgagcttgatatcgcccgtgtcgatcagggagccggccggggtcttgacgtagacggccagggcgtccgggatggagtgggtgacgttgacgaattcgaggtcgaaggggcccaccttgagcttctcacggccggcaacctcaaccttggtggggttctggtggtgttccttgcacttggcgtccacgaaggcgagggtcagcttggagccgatcagcgggatgtccggacgcagcttgagcaggtagggcacgccgccgatgtggtcctcgtggccgtgggtgagcaccagggcgtcgaccttgtcgagacggttcttgatgtagctgaaatcgggcaggatgagatccacgcccggctgctcctcctcggggaagagcacgccgcagtcgatgagcagcaggtgaccgttgtattcgatcacgttcatgttgcggccgatttcgcccaagccgccgagcggcgtgatgcgcatggagcccttgcggtacttcggcggggcgatcagcacggcatcctgctggggtgcggtggcctgccgggtggcgttgatcttacgggacggcgtacggctgttggatccgttggcgttgcggccgcgcgcggaaccgcgacggcgagaattcgtgttcttgcttgttttcttttgttcttgtgccataacctttttgggatttctgttgtggtgcctctgctctgtcatgcaggggcggcgggctggcaacccgtatgcagcgtttcgggcttacagcagtccggcagcgcgcatgccctcttcagccttgtcaagctgagtggcgtcgggaccgatgttcggcagacgcatggtggtggaggggataacgcccttgaccttgagcgcagccttggccatgacggcctgatagccgtcgccattcaacgcgtggacaaggggggcgagctggttggcgaggcgacgggcggtggtgatatcgccgcgatcgaatgcctggacaagctgctgcatggggttggaggcgacgtgggcaatcaccgaaatgatgccgacggcgccgatggagaggaacggcaggaacaggccgtcatcgccggaataccaggcgaggccggtgcgctgctgcttctccactgcggctgcaagatcgccggtggcgtccttgacagccttgacgtgttcaagtccggccagtcggtcgtaggtttcgaccttgaccttcaagccggtacggccgggaacatcgtagacgatgatcggcttttcggcggattcgtcgacggccttgtagtggccgacgataccgtcctgcgaggggcgggaatagtaaggcatgacgacgagcaccgcgtcggcgcccgcttcctgagtctgttcgaccatacgcacggtgtgtgcggtgtcgttggagccggcgccggaaatcaccggaacgtcgacgacctccttgacggccctgaccagctcgaccttctcatccatatgggtgacgggcgattcaccggtggtgccattgaccaccagaccatccgcgccatcggcgacgaggtatttggcgagcttctgcgcggcggcgaaatcgacgctgccgtcggatttcatcggggtgaccatagccggcagaatgcggccgaaaggtgctggctcaagaaggtgcatgtcatgctcgctcatagtgttcaccgtacttcccattgtggactcttacattacgtaccttgattgttgctgaatgcgtggcattatgaccggaaccggtggcaatgccgtgatgcgcgtcccggcgcgcttccctgcctgaaatgcgggggcgactactggtcgactgcgggtcgattacaggtcgaggaagtggtcgaggccgatggtcaggccagccggagcgtcgccggcgagcttgcgcacggcaagcaggacgccgggcatgaagctggtgcggtcgaagctgtcggcccgaatggtcagctgctcgccggcgttgccgaagagcacttcctcgtgggcgttgaggccgcgcagacgcacggcgtgcacgtggatgccgtcgaccacctggccgcgtgagccgccatcggtttcggtggcgtccggcacgggggcgagtcctgcggccttgcgcgcttcggcgatgccgtgggcggtgtgaatggcggtgccggagggggcgtccaccttggtggggtggtgcagttcgatgacttcggcggattcgaagtatttcgcggccttggtggcaaagtagtcggccagtacggcggagatcgcgaaattaggtgcgatgaagaccttctgggtttcgggcttcgggccgttggcgatggcggatttgacctgggtgagtttctcgtcggtccagccggtggtgccgaccaccacgtccacgccttggccgatcagggtcagcacgttgttcaggctgacggacggcacggtgaattcgacgaccacatcggtgttgtcggtggtgacctgggtcaggtcgtcgccggcatccaatgcgagcgccagctgcgtatcctcggccttgttcaccgcttcgaccacgtgcgagcccatgcggccctttgctccgaccaccgaaaccttgatcatgtcttcttccctgtctacccgtacctgcccggcaatgtacccggaacgttttccaatcggcaatcagcctatcaccgccaagccctcacgccaatatcccgtccacagaatcgagctccctctgacaagccgaaccgtgaagaaaacgccggaggcgtttttaggtgagggcgaacgacagtgagcaataattcagttggctgaaagccatcattaattgcgttcgagctggccgcgaagcggactgagggagagaccccggcgaagccgccaaccatccatcgggcatagcccgatcccgtttcacccacgccgcttggccaaggcccatccggccaacgccaatggcacggacgccagcgtgaagatgaatggcagcatcatgcccacatgagggttggaggcgtcaagcacaatgccggccacggacgagccgatcgatgtgccgaccgtgcctgcggtggttacccagctcagtccttcggtcagggattccgccggcaccagatccttgacgatgaggttgccggtggcgaacgtcggcgagacggtcaggccggcgaggatttcgaagacgcccagcaggatgagattgtccattgacagccggaagaacacgtagccgacggtcagcagcgacaggaacatcaccatatgcgcccaatgggagcctttgagtcggcaagagccgaacaccagcgcgccgatgcacgagccgaccgcgaacatcgccaattgcagaccgaggaagggctcaagtcccatggatttcatggtggcggtaatggacacgtcgaaggacgtgaagctcatattgaacacgatgaacacggcgagcaacggcagtacgccggcatagagcaatacgctcttgggcttggcgccgctgcgtttgagctggcgcagggtcagctggtcggcatcttcgcttgcagcagggctgccgtcatcgtgcgcggccacggtgacctgttccacgataaccggtggctgggtggatttcagcgagaagaatatggtgccgccgataccgcatgccacggtgggcacgaacagttgggataccgggtgcacggaggtggccagccaagccgccagaatcggccccagaataaagacgatctcgtcaatggcggcttccatggcgtaggccgtgttgagcagctgttcaccatcttccacaccgcgcaacgcataggaccagcgtgttcggaccaatgcgccgaatgagaactgcgtcagacccatgatgatggccaggacgaacagcagcggaatcggcacgcgcaccaacgccgcgaaggcgaaggcgagcatggccacgatctgcacggcgagcgcaagccggcccacgcgggcttggccgaaacggtcgaaggcgcgggcgtagaacggggtgacgcagctcatggccagcacataggcggcgctcatggtgccggcgatggtccaattgtcgtagagatggttgagcgccagaacgatgccgagactcatcatggagatcggcaatcgtgccaccgcgccggacaggcagaacgccttggctccgggcagcatgaacaggcgctggtagggcgagtgggcagcggacgacttcgaaaccgcgcgagtcgtggacacaataactccttactggtgcgttgtccggcacgtgcgcccgcccacacgtgccatccgagggtagcggttcccgagcaacgtcacgcggtgcgtttcaaccgcggaccggtacgtggccagtcgtcttcatcgtcggagatgccttgcgatgcataaggtctctccaccggtgaaggccgtccgatgctgtacaggtcatgagcctttgggctcagtcgttgtcagattgttcgggaatgccggagctcaactcggtaaggatttcctgtttggttttcgcgcgggcgtgaagctcgcgcaagccctcgtcgggctcactgacatagtagagagtggcgtcgatactgtccaattccacaccttcgaccgctgccagcagcagtcggtacatgtcgagctgggcgagtttgcgggtgatgtcgtctggcttggtgggccgacgaccggttttccagtcgaccacggtaaagcgtgcggtggtgctggacgggtcaagtccaccgatgaataccgcatcgagtttgccattgaccaggcccacgcccggcacgtccacgacgatggcacgctccgtccacgccgggatgcgcttggcccacgatgattcggccagtctgcgctgccacgccaccagcttggactcggtggcattgtcgctgcttatggaagtggcggaggcagcggctgcggcggatgcggattgttgagccgtgggctgtgggacagcaggctgccgtgtggacggcttgcggcattgccgctcccgttcggccaaatcggccaacatggcttcccgggaaacgaatcccgcatcctgacctgtatgcggcatgcttggttcggcttcatatgccagtaccgcttcatccggcttaccggcattgatgaattgctcggcccacgcatggaactgcgtgccggcctcggccgccggagacgatatgcgcggaatcgggcggataatgctacgccagtagaggcgctcctcccgttcgttcatgccacctacgcgggcttgcaggcttgtcacgttctggcgtcctgcggccagaacgcgttgcgccttggctttgactgcctcatcaagcgactggccgctggcggcatcggccatcaaatcggcgtcgtccaccagcaattgtgcccgttgcaggagtgggccggcgtcttggtgctgctcaagtgacgaggaatctgcggcgatgacatcgatgccgcgtgacagctgttcatgcaccgcgtcgctgagggtagccggccacggcaattcggcggcggcattcgtctgcgtaatcggcgtttgccacgcctcccccaccacggcgtcactgtatgccgcggcatgctctccgataaagaacccttcgggaggggcaatcgcttcgccttgcgccgagatcagcatgggcttcccggcattggcggcttgcaaccgttccacacagtcctgagccgatatcgcatgttcacgggcttggagcgcgtcatgcacttcaagccagaaattggatggctgagcggcgcgagagcctttgggcaccactgacgggtcccgcccggattcgcccgtataggcgcaataggtcatcagggcatcttcccgcgcacgggtaagcgccacatacatcaatcgacgttcgtcggcatgcagccgacgcccatattcctccgcctgcgtcaaataccagccggatgcatccacttcttccacgccatcgccgaattcgcgcatggagccgaacacttcatcatcgataagctccacatcatccaaagccgccaacgatgcgatggggtcggcttccacatcggcatcatgggggaatcgcggcaaaatgccggcatcggcgcgcataggcacgggcacggcggtggggttggtgagccaggagtcggcggtctcatgatattcgggtgcggtccagtgaccttgctcggcgcctcccgtatggtgttcgtccagcacgatcttgagatggtcgccctgattgctggggaatccgccggcggtaagccccactaccgcaacggcatcccattccaaccctttggactggtgtacggtcatcagttccacatccaccggagcgtcggggagactggcggcttcatcctccaccgaagccagatgatccacccatgtgatgaacccatgcaacgagggagtttgctcagcggcaatctcttgcgtgtacgtatccaccaaatccacaatcgcatccataggcatatgcgccaaagcgggattggcgcggtgctgcggattatgcagcacaccggccaatacggtgtcgatgtcaagatccaacgcttctatgccggcgcgaatcacgtcgcccagtggccgcccgacggcatcatgcacctgacggagcatcaccgcggcccgggttatggcgttgcgcccgtgtgcgctcaaccgttcaagcagttttaccaggtcgccgcgtagcaatacgtctggcaggaataccgcattggccacctgatcgcggtactcacgcaccacagccgcccattcattcgctggtgtatccggttgggcaaggccggcctgcaccaatgcttggaagcgttgttccatgttctgttcttcagcaaaacgggccaacatggtcaaatccgctgcggacatggtgaatcgtggcgtggccagcaagcgcatcagcgatcccgtatcggtgtggtcggcggccacgtgcagcaacgccatcagatcgcggatttccggacgttccagcagcgcggaatagccgaccacgaatgtggtcaatccggcctgttccaatgccgcctgatattcgggcatatgtgatttggaccgaaacagcacggcgaccggcgctttctgttcgcccggcatctgttcctgttgttcggctgcggaacggtgccgtgcgatggccgtcttgcagaaacgcactacggcgtcgatctcctgcccggccgtggcgaagcccagtactcccattgttccttcgggggcatcaggcatggggtcgagcgatgagacatcgacctcacgcatcaatgagctggagggacgcgacggattggagcgcaacggcagcgtgagattattggcggcttcgagcactatacggctgttgcgcctggtgacggacaacgggaatggcttgtatccggcaggcaggtggaaatcttgctggaacatacggaatgcaccagggctggcaccacgccatgcgtaaatcgactggaacggatcacccaccgcgttgacggcggacctccgtgacgcatccacatggaacagtgctgccagcagagcggcctgcgtggtggaggtgtcctgatattcgtcgagcagcacgtggctgtacctgcggcgcgtacgctctccgatggaggggaagcgctcgataagctgatacgcggcaatggtgaagtcggagaattcggccatattgcgttcccgcttggcttgggcataggcctccaccagctggagcagaatatcgcgtttgcgtgtggtctccagcagcgcaccgcaatgataggcgcagcgggcgtgcaaatgttcggcacggtcatcgagcttggcttgccagctggcgtcggtatctttcttcagtcgtttgatcttggggattttcggctcgtcctcgggcatgggttcgtctgcgacggcttgctgcaatcgattgatgaatgccgaatcccattgccgtacttgattgatcgcatcatcgaagctggtgcagccggcaccgatcatggcactgccaatggcatccgacaacgccagaacacggttcgccaaactggagaaggcgccaaaatcctcactgaacgccagatccatgtgactgtcgatgacttcggtggccagttgaagcgctccggctgcgctcaatggttgcgtgttctgatcgaatccgacaagcagtccatattggcgcacgatggtctggaagaaggcgtcatacgtgaaaatggccggcttgaggaatgcccgatcagacaccgtggcggtcgtagagcccgccatatcaccggccactgcggcggagacgcgttccagcagttcgcctgcggccttgcgtgtgaaggtcaggccaaggatgcgttcaggtgccacacctcgattgataagcgcgatgatgcgttgggtcatcgtaaaggttttgccggaaccggcaccggcaaccaccagtacgtcagcatcgactggcgcatcgatgatggcggcctgttccgcactgggagtgaacgtgctcatgcttgcctcgtttcgaaaatcgtgtcgatctggcccgcacaggcagggcagacgttcttcatacggcagaatccgatatgggtgtcttgcggatgggcctcgatgatggccgacctgctggccgccgcggcatagaatacgcgggcgatcatggtcagcgaccataacgtctgcgtaccggcgagcgcggcgaattgcgcccacgcttcggcactcacaccttcgggaggagtagccggatctatggcgggtatgtcgaagaaacggttggggtctttataccagtatcgtggcgtgaacggttcggcattcaacgaaccatcagtgaacagcggcggctggaaggcaccttccggggcgtagcttctggctggtgccgcattctgcccgacatggaacagcgcgctttggctgatatgcggcattgcggcaagtgccttggcaccgcgcggcccgtcttcggggaacacgaggccaagctgatagcacacgagctgcagatcattgaaaatctgtttgaccgtgggcgttctgcctgttttgtagtcaatgaggcgaatgcattcgccgccgtctgcgagtacgcgggtttccatacggtcgatgcgcccggacagtctcacggtcagatgctcgtccatgccttccggccaccctccgaccagtgctcccatcagacggaccagcatgttccgatcgatcgggtgcatgccgggcacggcagtgtatgcgtcgagtatgtcacgcacatcgaatcgtgcggcaaactcccgttcgcattcggcaccggccaatgcgccaatgctgaagttgctggagttcttgccaagatacgtttccggatcggcgtcgctgcgcacaaagtaatcggcgatgttgcgcagggcatctgccgcggactcgtccttacgggtggcctcatagcggttccgggtgtcggctatggcattcggatcggggcgtttgctctgatagatggcattaagccgtgccgtgacagcctcgatgcggcgttccgtgccggccgtggagtccaagcccagtatggccaacgtctgggcattgtgggaaagatggtccagcccttcctcgctgccttgctgtgcaaccgcatggatgagggttccgaagctggtggccacggagctggggcgaggaccggcgaaccggttctccagcatccagcacaccggacatgcccataggctgtcgaccgccgatggagacagggtgaccatgggtgcggcctgcgcatccgtcttgcctttccccgtttggataccgtcagactgtacaccgccagatgacgcgctgtcggatgaggcactgtcggatgaggcactgtcggatgaggcactgtcagatgacgcgctatccgattgggccggcgattccacgaacgcccagctctgcggatttgcggcgcgcacaccatgctccgacaggagtgtcaacgcaaccgcggcgtcctttgcggcagcctgctgcggttgagcagtggccagaaccgcgcgggcggcgctgaccaacccacgtgggtcggcgtccaatccggccagatcatattcggcggatcctgtatgcgcccccactgtggtgaaaggcgcctgttgccggttgcgcggatagtattccggcagatacccgaaaagaaagtccgaggggctcatgctgtcgttccataccgcgctgatcatgattcgccgtgcacgggtcagcgcgaccaggaaacccttcttctcgcccgacagcacagccgcgaaccgcggatcatgcccggttttgtcactttcttcaagcgctcccctcagcacgagctcggcaaggtcttcaccaccgaacatggtgttgcgcccggcgaggttcggccacacgtcttgctggaccaccggtatccacgcatatccccagtggcgtccggccgcgcctgccggcgtggtcaatgtcacagcgtcttccaccggccctatgtgggccaaggaatcggcctgcacttccatgccccgaacctgtgccatgaatgacgtgatgtctcggctggcggtggaatcatcggcgaactggaacaggcgcattgccgcgtccagccggtcattggccgtgcgcccctctgccgtgttgaataatgccgcacgctgccagaccggtgccagaccggtggcgttccaggcaacagacagtgcataacgcggctgtacgcgctggcttgccggcagccgctccaagccggaagcaacgctgcccaccagatgccacaggttcgcaaaagcgcgggcctgagggtcgttgccaagcaccgcatggatggatgcgagcgcagcctgcgccggcgcggcggcatcatcaacggcaagcatcacgtacagcgcgtcaacgccaaaggccaagtcatcgtcggacggttcaccgagtatttcgacagacactggcgacggaaccactgatgaggatgtttcacgacctgtttcacgccgtgtttcatggtatgtttcacgcaatgtctcccatgccgtcgtcagagaggtcagcatggcatcatccgtggcgagatgcgccagcgactccagcgcgctcatggccaattcaatcggagcgagccttgcaggacgcccttgaccgggtctgcccccggcactcaccaacgggccgttcatcaacgtggccactctagtccttatatatgccgcgcaggaagccaacgtcatctggcattccgccattccctcggcacgcaatcgggcaagctccacaagcgcgaacaatccctgcacgaaagtctcgtccttcaaaggacgggtgaccgacgaataccgcaccggcacgccatctcggcgcagtcgttcgccgaacagccgcacggcggcattgtcgtgggtgatgaccgccatgtcgttccaccgaatatgccggtcaagatgcgtccgcttgatgcgccagaccacatcatccagctcctcacgtgaggatcggtacaggccggcggtcaccgtgccgtccgactgataattcgctgcatcgactccgcccagtatggcggtcagcttgccgggacgctcggctggaggcagcggctcgtcttccggcgagggaatcgacagcgaaatacgagacgcgatcacatcagccatcgtcatgtgcgactgatcagcgccggtactgccgccaaccagctgttcttccttggctttcagccacccttccacggcacggcgcatcagatattccggatacgatccacggaaggtctgcaccgattcatccgggttgccgaccagcaccaacttgacgccggcattccccaactcctccaagaagcgcatgccggccagcgtggtgtcttgaacatcatccacaaccagcagccggggcaagcccaacgcctccatacgcataggccggtcggaatcatccgcgtgatcggcggcgaatgcctcatgcaccacacgagctcctgccaccagcaaatacgaggcatccaaacggtattgccccggatatgccgcgctttgggctgcaatatattcacggcgcaatgcgaaagccaaacgccattgcaccgacaatcgcgcgtcctccgtcacggcgtccaagagacgtggctcttcgtgaacgcctacaccgagctcatccaatcgggccagcatatcgcgcaactggctgataaacgcatctgaaatacctcgagtgaacctatccgcgctggtcgagccgcctgccgacgtcggagacggcgaatccgacccttgttgcgagaggcttgattgtgcggaagcggccgagccgggcatctcgccggcaccggcatcgcgtatgagtttcgcccagtcatcctgggcaaagtagacgcgtagcaaatcacaggtgccgcaatcatctcccgctacggcatggcgcagatgcacggccatgacttgacgcagcaaagcatcctgttccgcaccgttcaacaatcgaggcgacggcaatccagttccctcgcgcgaagctgatatggcccggaatgccacggcacccagcgtggtgaccggcctggcctgcacggaaaacccgagctcacgaatcacccgattgcccaatgcgtcggcggccacacggccggatacggccatcaccgcctgcgtgccaccgtagcggcgcagccccgccatcaacaccgataaggcgaattcggttttgccgcttccaggcgtgccgacaatcagcctcgccgctccatcacggtcgatgccgtccagcactgttccaggttcaagtctcgtcatcatggctccagcctaaacccgaccgtcacagagggaaaaattttaccgaacccgacgaagaatcgtacccttgacggtatcctgtagaacgaatgcagggagagcgcattttccaaggagggagggaacagatggccaatattccgatgaggccgccgaagctgcccggatatgatttcgtccagatgttgggaagcggtgccaccgccacggtgtacctatataaccagcgtatgcccgcacgcccggtggcggtaaaggtcagcgccaaaacccttgacccacgggccgctgccctgttcaaccgcgaggccaacttcatggccaagctgtcatcccacccgtacattctgccggtatatggtgccggcgtcacctccgatggccatggctacattgtcatcgaatatgcgccgggcggcacctacaacagcatcatgaaggcccggtccatgacctgcgagcaggtactcgacctcggcatcaagctgtcaagcgcgctgttcaccgcgcatcgcagcaatatcatccatcacgacatcaagcccagcaacattctcatcacctcgcagggcttgcctgttctgggtgatttcggtatctccaccgatgtgtatgaccgtaccgaaaccggattctcgccgccgtgggcaccgcctgaagtgcttcagcatctgaccaatggttcggaagccgccgacatctattcactggcggccaccctgtacgccatgttcgtcggctgctcgccattccagcacgaatatcatccacgttcgcaatcggaactgatttcgctgatcgtcaaccagccattgcctcgcctcaaccgccccgacgtaccggccgatgtggaagcggtgctgcgccgggccctgaacaaggaccccgaccagcggtactactccgcgttggagttcgcacgtgccatgcagcgtgtgcaattcgcatatttcgggcatgccactcccgttaccgtggaagggatgccggcctaccccaaagacatcgagcgtcggcgccgggccacggaccagcgagatcagaccacccgttcgtcacggcgatgggtcaaaccggtgggtattaccgtcggtatacttgcggcgatcaccgcagcggcactgatattcgccttcgtggtcgttccccgcatggacagcgccaccggatcagataccaaacaggtggcgacgcccggcaccaaggatgatgacaacaaccgcaataatcaggatgacgtgattaccgataccgcgaacgcccagattccttccccggagaatctgaacggcacctatgcggcggatgggtcatccgtgacgttcacctggacgaatccagacccgcaaagcggtgatacctatgcgtgggccatagtgcagggcagcaataccgaccagagcgcgcaaaccgtcacaacgtcagatcccacggtgaccgtcaacgcgcaggaaggctcgcagacctgcattcaggtgtccattgtgcgcaagaaccgccagatgtccgtcagccccgccatcgcctgtgcggccaagccgcaagagtgatccgctcgccactgccgggcataccaccttggcattgcgtatcgcatcaggcatgcgcccggcagtggcgaattcaccaaatggacaacaggaacggcaggtattggaaccgtaaagcgttgtcattacactagcaaccagagaaaccagggttcagggagttcagatggccacatcgtcccagtcatacgatcgtcgccgacgcatcagcgcggctttgcgccgccttatgccctccggagggcatacgtggacggttcccgtaatcacgctcctgctgcttctgggacttgttgccggcgcggtgatcatgagcaccgtcacgcgccgccatgtgcaactggacgatggtaccgtatgggtcacttcgctgaagaaccagaaggccgcacgattcaacgtaaagaacaaggaggccgacgccggcgtctcctcctccgccccacgattcgacatcgcgcagcataatggcgacaccatcctgaccgaaacgaccaaagcctccaccatcaaggcatccacggtcagcaccggtgtcaagaccgacatcaaagccaacaccaccactgtggtcggcggggataccgtagccctgatcaacgagaagaccggcaatgtgtggaccggcttgtcggaaaaccttgattccgtggcccccaccacttccgatccgaaaatgaagctgggcgagggcgggcgcatcgcagtaacccacgatggcaaggtctacggataccgtccatccgacggtatggtgctgcgtcttgacaatcccagcagcgccaaggccaaaaccctcgaatcgctgaccgacggcaagcagcagaccgttgaaagctttaccgtcatcgggagcacgccggtaatcgcaaccggcaaaaccgtcatattcaagggcggccgcgtcgatgtcgacacgaccggcaccctcacccttcaggagcctcccaccgatgacgtacagtccgattgggtggccgcggcatcaccgagaggccttgcgcttatcccgttgaagtccaatgccaaggcgaatttcatagccaacgggggcaaggcgaatccggcacgaccggtatcgtccaagggctgcgtgtactcggcttggagccagaaggccagcaactacattcgcgcctgctcccccgcggataccagcgtcaagccgcaaaccctcgaatccgtcaatactacttccgaattggtgttccgcaccaaccatcgccttgtagtgctcaacgacacggttaacggcaatgtgtggaaccctgaggattccaccaaagtcatcaaaatacagtggaacaaaatacaggccgagcagaccgagaaagaacagcagaacaacgactcggccaacaaccaccacgacttctccaagacctgttccgcacaatccggccaaatcaaagccgaggatgatgaaatcggcgcacgagccggttcggaacagattctcgacgtgctgcgcaatgacgagcagaccgattgttccgtgctgaaaatcaccaaggttggcgcaccaaacaacaaagacgtcaccatttcgccgatttacgacggccggtatctgcaactcgatgcctccgccacatccgcaggcaccgttacctttacttacgatatttccgatggccgcggccagacctcttccgccacggtgaccgtaaccctgaatgatggaggcaaccacgctcccgtacagttcgacactcctcccgagatcgatgtggagcagggagccagttataccgccaatgcgctgagcagcttcaacgatccggatggagacccgctcactctggtctccgctgtggcccagaacaccgaccaggtgcaggtgtccacccgagccgacggccagcttacgttcaacaccggtgcgctggcgtcgggacgcgtgggcgtcgaggtcaccgtctccgatggcacggcgaccggcaccggcatggtgtatttctcggtcaagcccgcgaacaccttggccgcggtcatcgacccggtagcgaaaaccaccgttcccaacacggataccgtcgtcaagctgtcctcttacgtgcatggcacttccttgcagccggcacagctgactcaggtggatacgcccaacggcgcttcgacgaccaccaatgcggcggatatgtcgttgacgttcaaggccaccaatcccggcacctattatgtgccctacaccattactcaaggctcgattccggccaccggattggctcgcgtcgaggtacagcccgccaccggcgaggccgccaaaccggttgccgccaacgatgtcgccctgcttggcgcggataataccgccattgtggagccgctcaccaatgacgtcgatccgatgggcggcgtgctgtccgtcaccacggtgagcgcaccggccgactccggcatcaaggttggtctcgtcagccataagcgcgtgtatatcactgcgcgtcaggtgcccacgaaacccgtcgcccttacctacaccgtggccaacgcctccggaaccgccaagggcaccatcgtgttgcagccaccggctctgaccacctcgaattcagtgcccaaggccagcaatatcaatgcccaggtgcgcaccggcggcatcgtgtccgtggatgtgcttgaccatgtggcctactcggatggcaccacggtcaagctcaagaacaacctgcaatacgacaaggagacgttcaagggtctggccttcgtctctggagacacggtccgctaccaagcatccagcgagaccggcaacttccccatcacctatacggttgaagacaatctgggtaatgtggcttccgccaatatcaccattaccgtgcataagagcgacgcagcgagcaaggccgcgccaaccccgcatgacgccgaagcgcaggttgccgccggacagaaggtccgcatccccatcacactgaccggcatagacacggatggcgacgacgatcagctgttgggtctgggcaacaaggcacccacgctgggccgcatatccgaagtcggttccgactacttggtctatgaagcgtatccggattcgtccggcaccgacaccttctcctatgccgtggaggattggaccggtcagcgcgcacaggcgcagatccgcgtgggcgtattccaaggatcgtccgactccggcgtatacgccagggatgacgaaatcacgttgaggcccaatacggccgcaaccgtgccggtcgcgcagaacgacatctccggcgacaacaccaatctgaccgtcgacaagcatgtcgaggtccaaggtctcgacggggtgagcgcgaaagacaacatgatctccttcaccacgcccggcagcgccaccaccgcctatatcgcctacacggtcaaagacaaggccggcttgtccgatacggccaccctcacggtaaacgtggatccgaatgccgccatcgagccgcctaccgcctacgactatcgtgtgccgtccgccgccaccatcgataagaagtccgtggatgtggatgtttcccagtggatcgccaatccttccggcacagccaatgagctcaaggtcggcgtgcatccctccgccagcgctcacgctcacgtcaagggcggtgagcattcgaccaccatcaccgtcgacctgacgtcacaggcgcgagccgtgccttacacggtgaccaatacgaaatacaacatcacctccaccgcgttcatccaggtaccggcctatggtgtctttccgcccacgttgcgtcccaaggcaccggaattgaaggtcaattcgcgtgagaccattgaaatcaacatcaatgactatgttcgcgtcggtgccggcaaggaaccgtatatcgaaagcgctgattccgtcagcgccaccaaggcttccaactccgatttctacgtgaacgacaagaccctgaagttcactgcggcaaaagactacgcaggccccgcctccattacctttaccgctgtggacggcaagcagggatcggataagaccaagatcatcaattccgcagtgatcactctccagatcacggtgataggccgcgatgtgccgccgcccacgttctcgtcctccactattgatgtcgaggcgggcgcgaaccccaagaccgttgatctgacggcgctcacccatgcaccgtccggcgtgtatgacgacgagaagcaatacacgtattccggcggaagctcatcgtccgggcgaatcaccgctaacctgtcccgttccggcagcttgcaggtttccgccaccaaggatgccgctcctggcaccaccgcgtccattcccgtgcaaatcgcatacggcgcgggcaccgtgaatgccggtgtgaccgtgcgcgtagtgtcttccacccgtccgctggcacgcgtcggcgacaagacgctgaagatcaaggccggtgccagcgatgccgtgaacgtgcttaccggcgcgtacaatccgttccccgattcctcgctgaccgtcatcagctgcaaggcggatgacgccgccaaactcactatcgccggatgcgatgcctccggaaacgtcaccatcgccgtcgcatccgatccgggtgcttccacgaacaccgtgctcgtcaccgtgcaagacggcagcaagtccaaggatcgtgaagtcaccgcatcgattaccgtgtccgtgatcgacaagcccgagccgccactgctctcccccgtagccggggaaccgcaggacagcgcggtcagcctcacatggacgcccggtgccgccaatggcagcccgatcaccaactacaaggtcagttggaccggcgccgccaccggagagaaggattgcggtgccgtcacctcatgccaggtcacgggtctgaagaacggcaaaacctattccttcaccgtcgccgcgcgaaatgacgtcggttggtccaaaccgtccaccgccgtcgaagccacaccggacaaggtgccgtccgctcccaccgatgttacggtcacaggtggcaataaaaccgccaaagtgacgtggaaagcgccgagcggtgatttcagcgccgtcgacaactattcggtgaccgtcaccggtgcaggtgctccgcagaccaaggaaaccggcaacacggccaccgagctgtcgtttacgttcaacaacaacgacatttccgatggcaccgccattacggcgaccgtcaaagcccataacaaaatcaattggagtgccgagtccgcctcatcacagccaaaggacatctggggagacccggatgcgccgaccattgcgctgtcgaacgacgacaccacaggaacggcgaaagtcactctcggcaacaaccgcaatgccggctgccggcgaatttccttgggaggagacgtcaaggacaccatcgattgcagtgacggtggcgctacgttcgatatcaatgagaacgatttgaacacccgggaaatcaccgtaacggccaccgtggtgccgcagcgcgatgcttccgccggcacaggcaagagcaggtttgtcccgcagtacaatgtccagccgcccactgacgtctacaccaccggatccggcagtacatgcaccgtgcattggaccaagcaggggcatgcgcagtcctacaacgtgactgccgatggcatcgattccggtacagctactaaccggaactcactcgacttccgaatgagtccttgggccaaatgcaataccgcatcggtgcaacaggtgttcaacggcgctaccagcgatgccgccaccggaggcccgtacaatggcgctccttacacctatgagaagaaggctgcaatcaacaaaccacaggagctgcgctggtcagacaacgctcacgtcattaacgtcaccggcggttcggttgaggtctatggcaagcaggccaccgtacaaatcatcatcaatggccaaccgttcacgtggaaccccggccagccattggacgtcaccgacttggccgtggccgccgatggcaactacacgtggagcgtcaaagtcaccggcgggccgggatactccggtctcgacaatacggcggacggcagcagcgtcgcgggcacacgcccctctgattcctcggaggggaccgagtcgctcaaatccggtaccgatgtcaccactttggccaagaacccttggattcttggtttcggtaataccccaatatcgtcaaccaccattcacaagcagtaggagaacatccatgagcgagaacatcgacgacgcgacgcagctgtctgacagcacgcagctatccgacgccacgcacttgtccgatgccacacatctggcatcggaaccgcacactggcaccaccccgaacaccgagacggcacagcaacccgttgcgttgcctaacctgccgcagcggccgtcacaagcgtcgtcagaaaagccgtctcctactactgatgccgcctccattcctgcgggcgatgacagcaccgtgctcaagccacgcaaggacgcgacgccagccatcccgcagcaggtcggcatgccggcaaagaccagcacgcccaaagtcgcgcttccgcacttcggacgtaaatccggcaagcaggccgctactgcgaatgctgcccccgccacccagacctcccgtcaatggacgaccacaaccgccggcaagaccgcagcatccaacaccgaaaccgtggctggtcgcgggccggtagccaatcagcaggccgccgcgcaatcccagccgcaatcccagccgcagcgtcagtcgagcaaagccgcgcaagcagccgcatcggcactgcccgccagcatcaattccggactactgccccagcccacggctcaggtccgggatttccagcagtccttcaatgcgctggtcgagaatgtctccaaggtggttatcggcaagaccattcccatcaagcaatgcgtcaccgcactgatggtcggtggccatattctgcttgaagacaaccccggcaccggtaagacccagttggcccgaggcttggccaactccatttccaccggtttcaagcgtattcagttcacgcctgatctgctgccttcggatgtggtgggtgtgactttctacgatcagaagcgcggagaattcgagttccgcgagggcccgattttcgcctccatcgtgctggccgatgaaatcaaccgtgcatcgccgaagacgcagtccgcacttctggaggttatggaagagcagaaagtcaccgttgacggcgtcacccatgatgtaccgcagccgttcatcgtgatcgcaacccagaaccccatcgagcagctcggtacctataagctgcctgaggcgcagatggaccgcttccttatcaagacgtcgattggctacccgggccatgatgtgtccgtcgatatcctcaagcaggtcgatatcaccgaccgtgcgcagaccatttccccggtgctgagcggtgacgatgtcatgcggctgcgtcaggtggccaccgaaatctatgtggatgatgcgattcgtgaatacatcgtcaggctcgtcgaggcgacccgccacaacgagaagatcacagtcggctcctccatgcgtggcgctttggcgctgacccgatgcgcccgtatctgggccgcggccgatggccgtgcctacgtggtgccggatgacgtcaaggaccttgcagtggccgtgctcgcacaccgtatcacgctgactccggaagccaccttcgatggcgcgactccggaaagcctgatcgcacaggtgctcgaagacgttccctcccccaccatcggttcctgatagggcctggaaaggtatccgaccatggcatctacatccgccgcattacgccgtcgccggcgcgctgaacgcatgttcaagcgcgcggtaagacgcatcagacggttcttcgcatcctacgtctcgcccttgggctgggcggtaacgggcgcaggcatcgcatgtcttattgcgttcctgcctctgggctggtatgagctgctcgtattcggcatcgtggcgatggtgatgatgctcgcggcaatcgcgctttccctcggcaacacacgcttccacgcgtccatcgccgtatccgatcatcgcgtgaccgtgggagacaccatatccgttatcgtcggcatcgacaacaccggcagaacgccgacaaccacggcacgcggatatctgccaatcggcgatgcgcatgaacgattcaacatccccatgctggctcccgggcaatccaagcaaaccgatgtggagttccgtacggtatcgcgcgcaatactgcccatcggaccattgcgcatccgcaagggagacccgttcggcctggtgcgtcacgaaaaggagctggccgaccgcatcatcgtattcatccaccctcgtaccgtgcgtctcgataccctgaatgccggcgtgccccgcgatctggaaggccaaccatccggccagatcgtggatgatgatctcgacttctacggattgcgcgaatacgagccgggcgacgacgtgcgtaacgtccactggctgagctccgcgaaaaccggcacgttgatgattcgccaatatgaagccacgcgccgcaccgacacctcggtgaccatcagcgtgaacccggatgagtacgtcaacggcgaggaattcgagatggcggtgtccatccactcctccatcggcgtcaaatgcctgctgcaggatcgcccgctgttctgtcacgcgggcaacgcgcacggccagccgcgcaacgccatggagttcctcgacaacgccagtgccatagagcctgatcgtgaggataatccgaatctcgccgagggcacgctgaagcacagtcctgatgcttcgttctattttttcactgttggatcgctgaaagacatcgagcaaatcaagcgcatgaccttggccttgccccgatcggccagctgcgtggtattgcaggccagcgccggcgccaatcgcggcatcagaagattcgccaacttcacattggccaccatcggcgaactcgatgatctcccactgatcatgggggtgctcgcatgaccttcgaccagtccagtatcaccaataccaataccgctgcgtacgccggatcgagcggcacatacaccggcacttcctccggcacgtacaccggaacctccaccaccaccggctcctgggccgactccacacattcggttatctggatgaccagaggcaatgtgcttcgcggcatgggcctcagtcgccagccgtggggcaaacgaatcgccagcctcgtactcatagcggcgatgatgttgctggcgcaagccaatctcatcgacgtgtacggcggcgtggccacttgggcgatcgccgccgtaccggccaccttgctgggcgcgatcatcgctctggcgggcatgttgccggcgttgcgactgtggtggcaaatcgtgtttctggcgtttgcccaattcatcatcggtccggtggtaacgctgagttccaccacgtcccattacgtgattcccaccttgaagaccttgagttcaggttgggaaatgacgtttggctcgttcaagtacattatttccgtcgatccgcctctgggcacgcaagacggcgtgctgctggcggtatggaccatcggcctgtggcttacgttcctcaccggcgtgtttgccattaatgccaacgcatggttgtctctggtgggagtgccgccccttgcggcggccgtggccgtatgtgctctgctgggtacggacagcggctggcaacgtgccatctgcggcattgcctttgccttgctgctgattatctggctgtcttggcgtcttgaactgctggaatgggggcgctggatatccgcgctgatcatcgtcgtgctcgctgccggccttgctttcgggggcacgttgctggtgccacaggaccgtttcgtgctgcgtgaccgctacgatccgccgttaagcccctacgattacaccagcccgctcagcggcatgcgatcctatatcaaggaccacaaaaaagacgtgttgctgaccgtccataatctgccggccggaacaccagtcaaacttgcggtgatggatcgattcgacggcacagtatggaacctgtccgattcttccgaagccacggactcctcgaattatcatcgcgtgggcaccacgatcaaggcggatgagcagggcgaatccttcactgcgaccttcaccgtcgatcagggattgaccgacacctggctgccgctggcgggagcggccactggcgtgagcttcgccaacgatgccgacaacggcaatgacacgttctactacaacacggataccgattccgccattattcccgccggcacgcgtaaaagcctcacctataccgaatccggcattatcgcccgcaagcccaccgataagcagatcagcagtgcggccgcggcccgcatcacccaaccggaagcccaggatgttcccgattcggccagcaaactggccacgtccattgccggcggacagtcctcgggcggtgccgcagccacggcgttggccgacacattgaaagactccggatggttctctcatggactcgaaggcgattatccctccgatgccggccatggcaactaccgtatcaacaagctgctggcaggcacggccatggtgggcgactccgagcaatatgcctccgccatggcactgatggctcgtgagctgggactgccctcccgtgtggtcctgggcttcctgccgaaaaacgaggatggcgaaatcaccgatgcccgcacggagaagacctcgggcaatggcaccaaaatcgaattcaccggcaacgatgtcaccgcttgggtggaaatcaaattgcagggcctgggatgggtggcgttctatccgacgcccaaggagaccaaggtgcctgatgaaaaccagaacctgacgccgccgaatccgcagacgctggtccggcaaccaccggtgccgttgaccgatccgctgcgcgatcagacgcaagccaggggccaaagctcattggccggcgccgacgccgatgattcgccgaccaacctgttctgggtgcggttctggcgagtgacccgcaaggtggccctgtacggcagcccattgtggaccctactcatcgtctgcggtctgattctgatgttcaaggccatactgctggcacgagcgcggcggcatggcagtccgaaagcccgtgtggcagcaggttggaatgccatacgcatgcttgccgagcaaagcggcatcacagccaagggcactcgtcgagatcaggccggtgccatcgcccgtcaactcggcacagatgaccaggctttgatccagcttggccgggaagccgactacgtcacgttctcggggcaagacattgaatcgggccaagccaccacatattggacaggagtcgaccaattgcgcaaggcaatgctcacttctttgccgcgtttcaggaggatacgtacacgactttccctgaaaagcgtggctatactgtcaaatagacacgcagccaagtcgcacacgacgcatgtcaagcgcgcgcgtaagaaggggaagacgtcatgaccacaggctccatccgtatcgcgatgaccagtgacgtgggtcttaggcgcaagaacaaccaagacaccggattcgcccaacagggcgtgttcatggtctgcgacggcatgggcggcggcaaaggcggcgagcaggcaagccagttggctgcccagcatttcgcgcagctggcttccatgccctcgcgcacccgccatgacatcgacgacaccctggcacaggctcagcacgacattctcgatttgggtgaccgtctcggcggcgtggccggtacgacctgctccggcctggttttgccccagccttacgcagatgccatcaatgcccacagcgcagctccgtttgacgacgccgactccccggatttctcggaccagacctatgtggtcaatgtcggcgattcccgaacctaccatctcagcccgctgccggatgccgatgcccccgccacggatatcatccccgtgtgggacgcctcctcgctgacccgcatcacgcgggatcattcccaacgccaggaggctatcgattccggtcagatgctgccggaagaggcggaggcgaccattccacgcaacatcatcacccaatgcctgggcgatccggacggcatagtgcccgacgtatatgttgccgatctgaccggccgtttcatcatctgttcggatggattgcacggtgaagtgtcagacgaacagattgcggccatcgccgcagcgcattccagtccgcaggaagccgtggacgccttggtggcggccgcgctcgatgcgggcggaaccgacaatatcactgtgattgtggccgatatgccactgaccgaacccgaacatcacgcgttcagcgcttttaaactggacgagggcgaggacattggcgccattgaagacgcaacactacaaacactacggaccatacgttcggcataaccgagcgaacataaggaggtaatcccatggttgattatgatgctgcggtcgctgccgtacaggatccgaacgcggacccgattctgttggcaaaaatcgcctacgagaatccggaattcggcgcaaacgtcgccgtaaatccgcgttgctaccccggcttgaagcgttggatcgccgaattcggcgatgagcgcgcccgcgagaccctggcgcaatacgggttcaccgccgaggcattcggcggcccggtccaggatcaggaagccccgtcacaggcggccctgcaggctgccgagcagcagcctgcagacgcttacgccgccgaccagtacgccgctgcccagcccgctgccgaccagtacgccgctgcccagcccgctgccgaccagtacgccgctgctcagcccgctgccgaccagtacgcagcccagcagcccgcggctcaggcggcattcgaggagcctgtggccaccaatccttatggcttcaccgccgaacaggccctgaccaccaccgaccagatgcaaatcgcccagattgcccaatacgcgcctgaactacgcgcctgcatcgcccgtaatcccaacacctatccggcactgatcgaatggctgggccagctcggcgacccggcgatcaacgccgctttggcttcccgtcagtgaaaggacggcatcatcatggccaaacttccctaccctccagcacctgaactgggttggtattctgacgatccggtggaaggcaccccggattccgcagttggcacagccgaaccgcagaatgactacgggcagcccagcaccgcggaagcggcaaccaatgccgcttttaccgcagagcccgccgccactgccgccgctgagcccactgccgctccggtagacaccacaccgcacgccgccgaaaacgacatcgaggattgggacagcaccgtgctctcctcgtcgttcacttccaaggcaccgaagaaaacgtatctgctgcataacgatgtcaccggccagaccatcgtgatcgacaagagcacgttgctgggccgcaagccatccatggatgtgccgcagggtgccaaggccgagcgtatcgaagatccgacccgcaccacgtcccgtaatcacgccgccatcagcatcgataccgatggcgcgttgtggatcgaggactacggctcgttgaacggcacctacatcatcaccaatggccaggagacacaagtcaccaagggcacaccgctcaagctcagcgcgcctgccacggtgcgtatcggagaccagttcttccagttctccgaacagcagtgaccgctggactgtacaggccag

SEQ ID NO: 525 - DNA, 5052 bp, Unknown
  R48_24m  MAG No. k141_56251
gagcccgtcgacctgctccggggcggtgacacgcaccagagcctccacacggcggtcaaggttacggtgcatgaggtcagccgaaccgatgtagacctccgggccggaagccggaccctcgccgatctgcgggccgtccgcgttgcagaaggcgtagatgcgggagtgctccaggaagcggccgagaatcgaacgcacgcggatgttctcggacaggccgggaacgccgggcttcagagcgcagatgccgcgttcgacgatgtcgatcttcacgccggcctgagaggcacggtacaaggcgtcgatggtcttctcgtccacgatggagttgaccttgatcttgatccaggcctccttgccagcgcgggcggcgtcctcctcgcggcggatgcgctggattagaccggtgcgcacggtgcgcggggccaccagcagacggtggaagctggactttggcgcgtaaccggagagctggttgaacagacgagtcagatcctggccgaccaccgggtcgcaggtcagcagacccagatcggtgtacagtcgcgcggtcttcgggttgtagttgccggtgcctacgtggcagtagcggcgcagaccgtccgcttcctgacgcacgacctcgatgagcttgcagtgggtcttcaagcccacgatgccgtacaccacgtgcacgccggcgcgttcgagcttgcgggcccacgcgatgttggcgtcctcgtcgaaacgagccttgatttccaccaaagccagcacctgcttgccggcatgagcggcgtcgatcagggcgtcgatgatcggcgagttggagctggtgcggtacagggtctgcttgatggccagcaccttcgggtccgcggcggcctgcgcaaggaaggcctgcacggaagtggagaaggagtcataggggtgatgcagcaggatgtcgcgctcgcggatggcagcgaaaatatcctgtgcgcgggaggactcgacctcggcgatctgacggttcgtggtcggcacgaacggacggttcttcaggtccgggcggtccacgctgccgagctcaaagagcacggtcaggtccagcgggctgggcagacggtatacctcgtcctggctcacgccgagctggtcggcgagcagctgggagaggaaggggctcgtggtgtccgtgatctccaggcggatcggcggtccgaagcggcggcgcagcagctccttctccatggcgttgagcaggttctcggcgtcatcctcttccacgtcgatgtcctcgttacgagtcacgcggaaggagcgggcctccttgatgatcatgcccgggaacagggattccagatgcgcggcgatgagcttttccatggcgatgaagccgtaacgctcgtccttggactcctcatcggtcatgtcgtccaccggcaccaggcgcggcaggttgcccgggatcttgacgcgggcgaagtgcgacttgccggaggccgggttctccacaatcacggccaggttgatggagccgccggaaatgtaggggaacgggtgggccggatccacggcgagcggcgtcaggaccgggaacacctgctggcggtagtagcgcgagaggcgctcctgctcggaggatgtgagcttgtcccacgtcagcaggacgatgcgctccttctccaattccggcagaatggtgtcgatcgtgtaatgtgcgtgctcgtcttgcagacggtgtgcggtctcgctgatcgcgcgcagctgctgacgcgggctcaggccggcggcagacggcacggcgatgcccgagtcgatacggcgcttcaggccggcgacgcggaccatgaagaactcgtcaaggttcgaggcgaagatcgcggcgaagttggcgcgctcgagcaggggcatgtcttcgttctccgcacattcgagcacgcgctggttgaacttgagccagctgagctcgcggtcgaagaaacggtccttgggcagcggtgcctcgccttcctgatcgacgcggcggtcgttgttgtcgttttcggcaatatgctctgcgatttggctgcgcagaattgccttcgagggtgcgtcaaatatctgtgccatagcttatatcgtaagctctggcgtggccggaaaacggctgaacgcgccagaattcaacgggtgttcatgttagttcggtgttggttggttctgagtgtgctagcgtgctcgcgacacgccgtgagcggcggtgaaacgaacgaaaccgaacatcagacgggttcgatgtgaacggttcagctcgttttccgatagccagaaagtgcgattgaacagttgtgataaaaaacgcacaacgactctctgcaggttgcgagaaacgggagtgatgaatagattatgaggtacaagaacaactgaacagagcagagcccacaaatagtgtatggtcacgaggactgttacgttggacgggcattggaaagacttaccgttacgacgatgatgttgtgcagagattctgctccagtagttgaacttgtagaaaaggcccgctccggcgggccttttcgtttgtgtgtacagtggagggcatgacggaaacacagcgtacgccagaggggatgtcgtcgaaaccccgtatcaagccggccgatgccgaagacggccgcccggtctctatctctgcgcgtctcggacgactgcaattccactattccggcaagttccgcgtgctgcagattgccgacattcaggatgggccgaaagtctccaaagacaccatcgccctgattgaggccagccttgatgccacacggcctgatctggtgattttctccggcaaccagatcgccggctacgatccggcctttgccaagagcttccgcaaacgccgttggtgcgaagaggcgattcctgaatctgcgttgaaccatacgcgtgaattggtgcgcaaagccatcggtcaatttacctctcctttggcgtcacggggcataccgtgggcggtgacctacggcaaccacgatttccagtgcggtttgagcaatgccgaactcgacggaatctaccgcgagtttcccggttgcatcaatccgccgagcgatgcgctggccaagcagaccgtatatatgtgtcataaggacggctcgcctgcggcaaccaatggtgaagaaaccgatgcgccgatttccgcgtccaccattcccggcacttttgcattgccggtgatggatgtggattgcacgcgcaacgtactgggactggtactggtgaattccggtgactatgcgcatggaggcggtttcggcacgccttcgcccgagacattggccttcctcaaggctttgcccgaacatatcggagccaaatcaatggtgttccagcacatgccgctgccggagtattaccgggtactcaaaccggtggccgccaatgcggctttcgccatgcagggctaccgcaagcatgcggatacctattatgtgctggacgaggatcgcactcaagccggcgggtatctgggggaaggcatttcctgcccggatgagtcggacgagtttgaggcgctgcgcgaggggtatttcggcgtcgtagctggtcatgatcatcgcaacggcttcgtcggcgaacatgagggtctgttgcttatcgctacgccaacctgcggattcaatacgtacggaccggctccggccaaacgtgccacgcgattgatcgaatttgatatccgtcacccttacgagccgcgtacgcaattgctggagtttggcgaactggtgggcaagcccagttccaaacgcgcctacacctatgcggtgaaccaaaccgcgcctggcgagggcgagggtgatgatttgctgcgcaagccgtcgctatggagccaactgtccggtttattcaggtaactgttcctgacagaggcggaaagcggcgcgaagtattcgtatacgcgcgcggccggaggcgcggccgtataccggttccatgtcccggcacaaagatatgccgacatatgatacaaatgataacatttgttgaataaagggttacgttttcgcgtttagggacgtgtgcttcggcacgcattcaaacaagcgcatcccttgcggtcactatctcacgatggttcgcgcgaagcgatgaaccgtcagtatgtgcggagttctggtatggtcacacgtttaacgcggttggcgacggctgtcgcgctggtcgtcggcatgatcgtaccggtcgccacggccgccgccgtcgacgggggggggctgtcgatgccgcacaacagacgccggcgtgcggtcgtccttggaaccaggacgaacagggtgccatcgttgattccagcaagccttccggccgattggtcggctgcatcagcaatgccgcagtgcaatatcgattgcagaattcgacgcaatggcagaacgttcccgcggatgaacacggcaatgtctcattcgattacagcacgaaaatagcccaattccgttttgacgcgcaattcgtcatacccaaaggaagcatcaccgaagacaaccacgtgttccgataccatatcgcgggattcaatggcaccggtaccgccatgtcgggcacgctcaacgacgatctcggcacgtacacgatcgctcccgacggattggtgaccatcgtcttcagcgagcacgccatcagcaagaacgccgccgccccgctggacaatggccgattgtacatcgaagccgatcgcagcaaggtgaccggcaataatccggggcagaccgtattggatttcggcaacggccataccaccaccatcaccatgtaccgcagaagcggcagcacctccaagcaggtcgtcggcacaccgacgctgcaaccggacggaacgctcaataccagatggcaggcgcaatacgtcaacacgggaaccatcgaccagccaatcgtgaggatcgaggattggatggcgtatgagaacgttgatcaaccgaacgccggttccatctcgttaagccgaggatggtacacggctgagaacatcaacgatctgtaccaaacgttgaccacaacgatggggcacggcacgttgacggtatataaggtcacgctgccgaa

SEQ ID NO: 526 - DNA, 8880 bp, Unknown
  R48_24m  MAG No. k141_56684
cgtcggtgcggttgtacaggtcgatggcgctgcgcaatgccgataggctgatatccagtccgacgcttcctgtggtgtcattggccgcggtcaccgtttcccgactgatggttatcgccaaacgcccgttgccgtcagcagccaggtagccgcggactgtgccatcggcgagcagctgttcggctttccgcacggtgtcggctgcggtgatggtcagcaattgctgattgatatcggcgtatgccgtgccgtccaaagactccgacgatgaggccgtctctccagacaaggcatccacaaacgtacgcgctccgtccgcctgctgccagcggctatcttcgacgacggccattggtatcggtttgagctcgtatccctcggacagtccgccgaagaacccgttgaacatggttgccagcacgatcggaaacacaatcatccagaacagtgcctgacgattgcgcaggttcgctttcaatgcgaccaaaaatgtggtccacatgatgtctccttacctgctcccgctggcgggagctgtcggcgaagccgactgagggtggttactacgggaccgcccccgcccgcttcgcgggagcccccgccagcgggggcaagattgttagtcccttaacgccttgccggtgagttccaggaatacgtcattcagggtgggcgggcgactggtcaggtggccgatgttggcgccggagcgtttcaccgcgtcgagcacgtcggtcaggttgtgttcgccgcgccggcatcgcacgtcgagttccttgccatcgtaggtagctccgattacgcacggcagcgcacggacctcagccatcgccgaatccgccagatcgagcgtttcgatggtgatgcgctcgcccgtgtcgatcatgttcttgagctcgtcggcggttccgagcgccaggtgccggccgtggtccatgatgaggatgcggtcgcagatctgctcgacctcctccatgtagtggctggtgtagatcaccgtggcgccggcctggttgagccgctggatgccttccagaatcgaattgcggctttgcgggtcgacggcgaccgtgggttcgtcgaagaagatcaggtcaggcttgtgcgcgatgccgcaggcgatgttcaggcgccgcagcagaccgccggacagtttgccgggccggaacttgcggaagtcctggagaccgacgaattcgatggcctcctcgaccagcggcgcacggtcagttttcttcggcacgtacagcgagcagaagtagtcgatgttttcggtgacggtcagttcattgaacacggccacgttctgcggcacgatgccgatacggtgcttcagcgcgtaggaggtcggcgtcatcggctggccgaacacgcgaatcgtgcccgaatcgtaggtgagcagcgcgaggatgcagttgatcgcggtggttttgccggacccgttcggtccaagcagcccgaaaatctcgccctggttcacgtcaaggtcaaagtagtcgagcgccaccatgtcgccgtagcgtttgaccagttggctgacgtgcacggccagggccgggttggttgtcgagtcgtgttcggaagctctgttgtcggttgccatagccactcccttccttggtgattccatcatcccaagaaggggccagacgccgccacaggcaaacgtcacgacttggccgcacaggcgtgacatttgtcattacagtccttcggcgtcggtctgcatggccttgtacaccttatcgaccggcatcaggctgatctcgtccatcgaatagttggacgccctgtggctttgcgcaatcatcggtatcatccctttacggttgtgtcgacaacatccgacgcttgtgcctcatctattcgggaagtgtagacccgttgtcttggaccgtcatgcgaataattccgcacgcccgtcaagttcgtcgtgttccgcacaccgctagactggtggtggaagagcgtcgagccggggaggtgccatgcgcgtgttggccgagatgggcttgctactcgtgttgggcctggctttggcctggcttgtcgggctacggtccgatggcgtgttcatcgccggcctgctgttggccgtttccgtcgccggattggtggaatggctgcgtcccgcgcaatggtcttgggtcttgtgtacggcgtatctcgtcatcgccgtggcggtgccttcatggtgcgcgttcatgccgctcatcgcctacgatactgcacagctgccggccctcgcctcgaccggagcccgggctggggcacggactgcggcaagcggccgctcccccagtgtctcgcggaccgcggcctctcgccgttcccttgccgatgcaatacgttcggccccgtggctttcggtcgccgcgcgctggatatgggtgttgccgccgatcgcgctctggttcgcccgtggcaccgaccgtctccagacgctggtgatgacgatggtcgccctgcttggattcgttctgggccgggcccgcgcctcctcggacgaggcgcggcgcgcgttgctgcacgcgcaggacagggcgcgcgaatcctcgcgggccactcgttcgcgcatcgccgacatcgatgaggaacgcgcccagtcgattcgcatggcgaccctcggcgagcgcacgcgtatcgcccgggagatccacgacaatgtgggccatctgctgacccgcgcgatcatgcaggcgcaggccggcaggacggtggccgaggcgacgaacgatacggtcgccgcgcaagggttcgccacgttgggtgcgacgttggatgatgcgatgacgatggtgcgccgttcggtgcatgatcttgaggatgacggcactgatttcgccgcgcagatcgatgatgccgtcacgtcgttcgacggcatctcccccggtttcgccgtgacgctggccaacgacatcgccaaggcgcccgcgccggtctcgcgctgtttcgcgaccgtgattcgcgaggcattgtcgaacgtggtgcatcatagtgcggcgcgcgaggcgagcgtgacgttgcgagacttccccgcgttctggcagttggtcattcaggatccggggccggccgtgtccgagtccgatgggtcccggacggccgctgcccgcccgcgtgcgatgcgtgccacgctcgtcggctcgcgactcgccgccgacagtgttgccgatatgcgcggttcggccgatgagctgatgcgcggcatgggtttggcggatatcgaatcgcgcgtacgcgcccttggcggcaccgcggtctgcgggccgtatgagggcggctggcgtgtgttcgtatccgtgccgaagaagcgttggaccatggaatcgagggattgatgagaatcgcaatcgtggatgatgatccgatcgtctgccagtcgttggagacgattctgacggccaccggcacggccgaggtgctatggacggcaaatgacggcgacgccgccgtgcgccgttatttcgagacgccggcgagccgaccggacgtgctgctgatcgatattcagatgccctgcaccagcggtttggatgccgcgcgcgaggttctggccacggacccggccgcgcgcatactgttcctgaccacgtttgcggaccagtcgtatatcgcgcaggcgatggggcttggcgccaagggctatctcatcaaacaggatgtggcggcggtcgggcctgcgctgcaggcggtgatggccggtcaggtggtgctcggcgcggaagtgctcggcaagctcaccgaacggactccgaatcctgccgattccgacgattccggagataccgccgattccatcgagggcctgcttggcgagcgtgagcgtgagatcaccgcgctggtcgccgagggcctcgataaccgcgacatcgccgccagactgttcctgagcgaaggcacggtccgcaatcgcatcagcgcgatactggacaagctcggcctgaccaatcgcacccaactcgccatcctctggctcaacgcccatcggtgaggggcctttggtcaagtaggtctctccctccgtcatcgcttcgcgatgccacctcgaacgcgattcaggacagcttgcagctgacctcttattcgctcgttgttactcacccttgcctaaaaacacctccggcgttttcttcacggctcggctcatcagagggaggttgtgaaaaaccaacctcagctgtttttcatgacgatactgtcgatggtgttggccacgcgctcgcagtcgtcggagcactgttcgaggtgacggtacacgtcatgccaggcgaacacctgcagcggatcggtgcaggtggtgtgcagcgtgcgcatcgactcgatgaacaggtggtcggcgtccgtttcgatcgtgttgatggcgaacaccagttcgcgcaacgtcttggaatgccggaatcgcggcagttcgttgaccagctcgcagatgctttccgtggcgcgcaccaccatatccgacatctggaccgcatcgtcgcgcatgtcggtcacattgtcgtagtacatgcggttgagtacgccttcgatgctgtcggtcacatcgtcgagcacgtggccaagctcgtcgatgtcctcacggtcgaacggcgtgatgaacgcggtcaccagttcgtccatcatgtcgtggcgcacctcgtccgccgacttctcaatcgcgtgcatgctgtccatgcgttcgcgcagctggtccggattgaagtcgtgcatgacctcggacagcagcttcgcggcctggcatgcgtagtccgcgctgcgacggaatccgtcgaagtagaacacgtctttttgtctcgccatgatgggtggattcctttctagaacacgaccatgaacagtttggccattacgaagctgatgagaccgcaaccggggaaggtgaacacccaggtgagcatcatgtcgcgcaccacgccgaagttgatggcggagaggcggcgtaccgcgcccacgcccatgatggcgctggtcttggtgtgcgttgtggagacggggatgccgagcacggtcatgacgagcaggcacagcgcgcttgacagatcggccgagaagccttggtatttctcgagtttcaccatgtcctggcccacggatttgatgatgcgttcaccgccgacggacgtgcctacgcccatgatggtgctgcacagaatcatgagccagaccggaatcatcacaccggtcacgctgggttggccgttgcagaacgccatgccgaggaacagcacgccgatgaacttctggccgtcctgcgcgccatgcatgaagctcatggccgccgcgcccacgatctgcgcgtaggtgaagaacccgttggtgcggcggcggtccatgccagcgcaaatcagggtcacggccttgcataccaaccagccgacggcgaagccgaacaggaggcttgcgaccagaccgtagagcaccttgacccattcgcccatgttgatgccgccgatgccgccttggatggcgatggccgctccggacaggccggcgatcaggctgtggctttcggaggtgggtatgccgagcagcgaggcgcccacgctgtatacgacgatggagaacagcgccgcgcatagggcgatgagcgccgcgttcgtgtcgccgccgaaatcgaccatgttgctgatggtggaggccacggaggcgttgagctgcgtcatgatgaagacgccgaggaagttgaagatggccgccatgatgacggcggagcgtacgcgcatgcatcgcgtggtcacgcaggtggcgatggcgttgggtgcgtcggtccagccgttgacgaagatgactcccagcgtcagcaacgttgtgacggtcagagccgggttggaaagcacttgttggaggaaatgcgccagtgagacgtccaaagggaatcaacaccttcttcttcgggggcggaagccgtcacactgattgtaacggaagaatggctacgtagttcccatggcgcgcgggttttatggtgttgttatgctgcgcgccgcgcatcctttcgtgaaaacagagcgggacagtcgtatgcttcgattcggcgcctgcatcgacaactctcgtcatctaccgaggattcggtcatgcgtgtgcgaaaatggacacggtgtcaatcaggaggtgcacagtggttgtaagcacggattcgagccgcacaatgcccgattgggtgaagtacggggtgttctggcacgtgtatccgctgggcttctgcggtgccgatatcaggcccgccggcccgcgccagttccatggccgcggccttgacgcgatgatcccttggctggagtacgtgcgcgatctaggcgcgtccggcctgctgctgggtccggtgttcgagtcggcgacgcatggatacgacacgctcgaccatatgcacatcgatgtgcgattgggcggggatgccgcgttcgaccagctgattgcggcctgccgggacatgggattgcaggtggtgctggatggcgtgttcaatcatgtgagccgcgatcatccggccgtccgggcggcgcttgacgagaccgccggacgcttgaatccggccgacaacccgtggcatggtctggtccgcgcgcatgtcggtgataatgacgaacccgctttggatgtgttcgaggggcacggggatctggtggcgctggaccattcggctgacgagaccgttgactatgtggcccatgtgatgagccattggctggatcgcggagccgccggctggcgcctcgacgccgcgtatgccgtgccaagcccgttctgggcgcgcgtgttgccgcaggtcaaagccgcacacccgtattcgtggattttcggtgaggtgatccatggcgattacccgcgcatcatcgaggaatccacgatggattcgatcacgcaatacgagctatggaagtcgatccagcatgcgctggagacggagaacttcttcgagctggattggaatctcaagcggcacaacgcgttcctgaattccttcgtgccgcagacgttcatcggcaaccatgacgtgacgcgtatcgcatcgcagattggcccggccaaggcggcgttggcattggcggtgctcatgacggtcggcggcgtgccaagcatctattacggcgacgagcagggctatgtgggcgtcaagcaggagcgtttcggcggcgatgacgacgtacgtccgaagttccccgactcccctgccgaactgtccacgctgggagagccgacataccggctgcatcaggcgctgatcgcgctgcgccgtcgcaacccatggctgatggatgcgcgtaccgaggccgtgaagctggaaaacaagcacttcgtctatcgttcgacgagcgccgacgcccagcattccctgaccgtggacctcaacatcgagcaatcccccactttcaccatccgcaacgccgacggcagtacagcgtatcaatactgagctacctcatcagagggagctcaccattcaccgccgaatgcctcggatcagcaggtcgagcaggtaaccgtacgaccggtcgacccgttcgcggccacgtgtgcggggttgggcggaacgcagttcgaattggatgaacccgtgtatggacacccagatggaggatgcaatcaggtgagggtcatcgtcgcggaacacggccgccgcctggccgtatcgaatgatctgcgtgatggcttccaggcaatgctgggccgagtccgacgcctgccccatccagaccagcgcgtaaatgccgggggcatccagcgcgtgttcacggtagatcatgcccgccctgcgcaggcgcagcacggggtcggattcgtcaatggcgatgagctgttcgcgcagatcggtgaagtatgcgtcgatgagcgcatcggacaccgcctgcttgccgccgatgtgctggtagatgctggtgggcgacacgtcggcctgcgcggacagcgcacggatggtcagaccgtccacaccgtcccgttccacgatctgccttgccgcgtcaaggattctcccgtggatttcaagggtgggcgtgcgtttggatcggggctgcgattgcgtcatatccgttattctagggtgcatacaggccattaccgccgtttcggcatggccacgatcgcaacgaccgcggcgataagtgcaatcgtcatggccgccaggcaggcgatgtgcagcccgtccatgaacgcggatgcgaccgagccatccagcaatctgcgcggggtgcccggcagggagctggagatggattcggcagccatcacggattccttggatacgccaaggatgccctggggcaggtgggatccccgcagcgcgtccgtcaggccggtggtgtacgcaccggcctgcagcgaccccatgatgccgacgccgagcgttccaccgagttcgcggatcgtgtcgttgacggcactgcccataccctcctcgccgaccggcacggccgtcatcagtgtgtcggtggcgggaccctggacgagggcgatgcctgcggccatcactgccatgacgaccgcgaacggcagtgtggcaatcgccgtctcgagcgccgaatacccacgcagcgcctggaaccattgggttgtgaggaagatgaaaccgaacaggcacaggaaggcggcgcaaatggccaacatgccgatgacggcgcacacccaaaacacgctatcccatgcgaaccgttgcagcaggatgccgccgatgaccgggccgagcgctatgcccaccccggatgtgccgacccgcagtccgacggccagcccacgcataggcgatccgtcgaacaacccgatgatggatgacagcgtggctcccatcaagttgtatatcaatatatcatacttatggaacattgatacacatcatgtcgggaacaggcatccgcatcgaaaacaccgacctacaacaca

SEQ ID NO: 527 - DNA, 6752 bp, Unknown
  R48_24m  MAG No. k141_56699
ccctcaaaaaacctcacccctcatcaaaccctcccgggtacccgaccaccacgacaggcaatcaggcgaggaatgaactggcaatcattgactataaagaagtagtacaaacacgctcttgagttctcaaaccaccaccacaccagcaagacaggaaaccaaccagaagaaggaacccgccgcgccgagcggcaacaggtgaataacttacacgcaaccacgccacaacgcaaatcaaagcgcacaagaacccaaggaatcggcataacagcgcggttccttcggcgtgtcgcacagagcccaatttgctctgatagggctagcgtaacccctcgaatgtttccggaaaacatcgaatccattattcggctggcgtgtcgcacgagttttcggactgtcagctccatgttcatcgttcggcaaccacaccaccggcgcacaatcaatgcatggcaacaacgctccatcatcggatttcgttcatgaatcacgggtatacctgtagttatgaccaagaagattgctgtattaaccggggcgggcatttccacgtccgctggcatccctgatttccgcggtccagacggtgtgtggaccaagcatcctgaccaaatgagcgtttacgacatcgatctgtttctgcgtaacaaagaagaccgtgagtactcctggcgctggcagaaggaatcaccagtatggaacgcacagcccggcaccgcgcataaggcgctggtcaagctggaacaagccggcatgctgacgctgctggccacgcagaacttcgatgcgctgcatgagaaggccggcaacagcgacagcgtcatcgtgaacctgcacggcaccatcggcacctcgcattgcatgaagtgccatcaggaatatgccacggcggacatcatggcccgtttggatgaagaacccgatccacattgccatcgcaaactgaagtatcgtggcgatatgccatgcaatggcattatcaaaactgatgtggtgtatttcggtgaggcactgccggacggagcgatggagaagtcgtacagcttggccaccaaagccgacgaactatgggtaatcggatcgacccttgaggtgtacccggcagcgagcattgtgccggtggccgcgcaggcgggcgtgcccatcaccatcatgaatatgggtcacacgcaatatgaccatcttgcgagccgcttgattcatgaggatatcgccgtcgcgctgccgaagttggtggacgagacgattgcggagaacaagtagtcctcagcataacgaaagcgccggcgggtggttaagcaactgatgattgttggttaaccacccaccggcgctttcgcgccacctcccgctagcgggaggtattggagcacacttctgcgcggcctcccgccagcggtattggaatcagtagatgcgcttgggctggaatccagcttccctgagtgccacgaggatgcggtcgatgtgctcggggccgttggtctcgaccgtgacgccgagagacaccgcgttggtgtagtggccggatgccttgaactggtcgtggtcaagctgaatgacgttggcgcgctgctcggcaagcagggtggccaccttgacgagctggcccggagtatccggcagctcgacctcgaagttcatgatgcgaccgcgggcgatcatacctttctgaatcaccgcacccatggtcacggtgtcgatattgccgccggacataatcggcaccaccacgtgcgggccggtggcggcggcgaacttgcgcgaacgcaggttcaggtgttccagcgcggccagcgagacggcgccggccgcctcgaccaccagcttgtgcttctcgagcatgagcagaatcatttcgttgatgtcgcgctcggtgacggtgaccagatcgtccaggaactcgttgatcagagcgaagggcaggtcgccggggtgcttgactgcgacgccctcggcggaggtgaccacatggtcagccggagacatacgacccgcggccagcgagtccttccaggccggggagccctccggaatcgcaccgattacgcgcacttcaggcttgaacgtcgtgatggcgagcgccacgccggcacccaagccaccaccaccgagcggcacgaccacgtcagtgacgttcggcacgtcttcgaggatctccagaccgatggtgccttggccgcagatgacttcgtaatcgtcgaacggcggcacgtaaatcatgccttccttgtcggcgagctcagcagcgtgggcggcggattcgtcgaacacatcgccgtacagcaccacatcggcgccgtaggccttggtggcatcgaccttcagcggcggggtgatctgcggcatgcagatggtggccttcgcaccacgctcacgggccgcataggccacgccctgggcatggttgcctgcggatgcggtgacgatgccacgggcgatctgctcttcggtgagcgatgcgatcttgttgtacgcgccgcgaatcttgaaggaaccggtgacctgcaggttttccggcttcaggagaatctcatgaccggtcatctcgctcaataccggcgaagggataatttccgtatgacgggcagtccctttgagtcgtccggcggccaacttcagttcggctgcatgatcacgctgcagcgccttcaaaacatccttttgttccatagcttttaattgtatggcgcggggacaccgaaaacagtggcttatctcgctaacgagtgctcatttacggtaattcccgttcgtaatcagctttcgaggggctgatttggcttcgcggggaggtctatctcctcttcgaggggctgcccgatcgtgcaatgcgtgagtatgacacatcatttgcagcggtattatgcggttttcggagcccggctattcaggcaccaaccccctgaaacggagatagacctccccgcgaagccaaatcagccccttgaaatggagataccgcctagcaacacttataggctgacgacgacgccctcccatggtgcaagctcacggccggcaagagcggccacagcgtgcgcggcgtcatacgtgctgatcaccacgttcgactcggcaaggccatcggccactgccaacagttcggcggattcgcgaggcaaatcaacggttcggccggacatgttgaccacgaccagcagcttctcatcgccgagggtgcgggtgaaggcgtagacatgcgcgtcatccgcatcgagcagatgccagtcgccggccgccacgacaggcatgtcgtggcgcagcgcgatgagctgcttgtagaaggcatacaccgaatccggatcgtcgaattcgccggccgcgttgatcgccgcatggttgggattgacggagatccatggctccttagcggcatccggcgcagtgaaaccggcatagacagagccgtcccattgcatcggggtacgcgaattatcacgaccgcgcgcggcgatacccgccaacatcgattcgggcgactgcactttggcttcctcaaccctttgacggtaagcgttcagggactcgaggtcacggtactggtctaggcgcgtgaagtgggcgtcggtcatgcctagctcttcgccctgatatatgtacggggtgccgcgatgcatgtgcagcatcaggccaagtgccttggccgaacgcacacgagattcctccgaggagtcatcaccccaacgagaaacgacgcgaggctggtcgtggttaccagtaaacaggcttgcccagcctgcattcttcacggccgcttgataaccggccataatgctcttgagcttcggcaggtcaagtggcagtggcttccatttgacgccttcgcagtcaaaatcaacgtgctcgaataggaagagcatgtccagctcgccgttggcggggtcggtgatgtattcgttgcgctgtgcggtaacgccgggagcctcgcccacggtgaggaagccctcacggccttcgaacacttcacggcgcatttcggccaggaattcgtcttggcgagggccgtccgcgcagaacggattcgggttggaatagccttcctcacccacgggcagatcgtccagctcggaaccgtactcgccgggcagcttgccagacaggtccgtgcgcttggaaatcagcgtaatcacatccatgcggaagccgtcaacgccgcggtcaagccaccagttcatcatgtcgtataccgcgcggcgcacagccggattttcccagttgaggtccggctgcttcttcgagaactgatgcaggtagtattcgccacgctcagggcaatactcccatgcagaaccgccaaagtaggagccccactggttgggctcggcaccgggctcgccggcagtggtgccgggacgggcgggacgccaccaataccagtcggcgtgctcatcatccttgtttttggacgcttcaaaccaggcgtgttcatcggaagtgtgattgacaacaagatccatcacgatcttgagcccgcgcttgtgggcctcggccagcagctcatccatatcgtcgagtgtgccgaacagaggatcaatgtcctgatagtcggaaatatcgtagccattgtcgtcttgcggagacttgtataccggggatagccacagcacatccacgccgaggtcggccagatagtcgagccgtgacgtaatgcccttgagatcgccgaggccgtcgccgttggtgtcttggaaggaacgcgggtaaatctggtaaacgaccgcattggaccaccacggatttggggtggcaccgttggtgcggatggaatctggaattactgtgcgttgtgaagtggtcatcgttggctcctccattatttatggtctacattgcctgttgctcatagtctaaaaagcgctgaattacatttccattggggaactgcgttggtgtgccggaaacaaaaaccgcaaagagccggaaggcactgctacggctcaattctcataagctgcacatgctatttagcaacatatgggccctttcgctgtttgtggtgggtgactgtgccgtggggtgatgttggtcgggtaggttggaggcatggatgcctctcacctgttcaccgccgcgcttcggctgcggtcgccttggagggtcgggtccgcggacttccgtgacgccgacggcgacgggcgggagccgcacatcacgatcggcttcgagcccggcagagggttcatgctcctgttcgaggcgtgggtgtggctatatcgcctgtgctcgtggatgatgcactcgaggctcgaacctatgaaggagctcgcccgcttgttccgccgccataatctacctgacctgcggcagctcacatattaacggttcttctgattgcgacgcgcaagagcaacttcgggcgcgcttggattgcctgcttgaacccactggtgcggggatagatgatttagttgacacgcctgcgggaatctggtggggatttcgctggcacaccggatttcaagcaaaccccgcctcgggaaccgctccggacctcggcgttggcccggttcgtatgtcaatcgattgccgtctgaaccgggacagaatccgctgtcccggttcgcgatttttgtccttttttacaaacagggacaagccaatctccgcagttcatatgctccgtaatacaaaatcggcggaatagagccgatcccggaatcaacatgttgtcccggttttcacataaaacgattgacattcataccgggacaatgaaaattgtcccggttcgtgaaaatcgcccgaaaccgcgaaccgggacagcggattctgtcccggttcgcgcgtcaaacggttgatatgtggaccgggacaagccagtggcacggcgacacagcagatgcgctcaattgcaccgtaagccgtacggtttcgtcactttttcattcgcacaacgagcaaaaccacatgacctttgtgcgccaccgccacatcaaccgaccgtcgcctttattgtggcggtttccagtatggcaacaggacagaaaagcctcctccggtgagagccggaggaggcttgggtggaagcggacctttacttcacagagtcctgcaattcaggactggcctacggccagacccaacatgacctcgcgagtacgcgacctatccggccgcccgggccgggaaacagcccacggggctgtttccttaatcggctcgtctcgctcgacgcggtgaagtaaagcagcgcctgcgctgttttacttgaccgctcccctcatcacaccaccgacgacccacttttgggcgaagatgtagacgatgaggatcggggccatggccatcaggtagctggagaaggccatcgggtagttggtggcgaactgcgagctgaagacgtactgggcgagcgggatggtctggttcgactggtcggtcagaatgatcaacggcaggaggaagtcgttccaggcccacagtgcggtcaggatggcgatggtggcgttaatcgggctcatcagcgggaagatgatggtccagaaaatgcgccacgtggatgcgccatcgattcgggccgcctcctccagcgaaaccggaatcgaacggatgaagccagtggcgatgaacaggttcgtgcccaggccgagcaccgtgtacaggatgatcaggccgacctggttgtccaggtgcagggagcccatctgcttcgcaatcggcagcatgacgaccgggaacggcacgaacatggcggcgatgaagaagtagtacaggaagcggaagaagcgcttatccatgttgcgggccac

SEQ ID NO: 528 - DNA, 3435 bp, Unknown
  R48_24m  MAG No. k141_57324
acccccgcacaaggcgggggtctcacagcttagttctcaaacgaaccgtagcggcctagaccgcagtggttcactcggagatctcagcgaagtacagcagggtacggatcatgttggaggtgaagccgtactcgttgtcgtagaaggacacggtgcgagccagggtcacgccgtcaatggtgttgacgtcggtctgggtcgggtcgaacacgccaccgtgggtgtcgccgaggatgtcggaggagacgatgccctcatcgttgtagccgtagtaatcggtgtcggagaaggcagccttgaaggcttcgttgatctcgtcggcggtggtctcggtgttcagaacggtggtcagctcggtgacggagccgtccgggacctggacgcgctgggcgtggccctgcagcttgccgttcacggacggaacgaccttgccgatggccttggcggcgccggtggagtgggcgatggtgttgatggcggcggcgcgcaggttgcggccggtcttggtgccacgcgggccatcgagcagcatctgggtgccggtgtaggcgtggatggtggtcatgaagccggccttgatgccgaacttctcgtccagcagcttgaccatggcggccatggagttggtggtgcaggaaccggcggagacgatcacgtcggaagccttgaggatgtcgtggttcacgccgaacacaacggtcggggtggtgtcatccttggccggggcggagatcaggaccttcttggcgccagcgttgatgtgagcctgggacttctcggcggaggtgtagaagccggtgcactcgagcacgtactcgacaccgtcgttcttgacccacggaatgttgttggcgtccttctcggcgtagaccttgtattccttgccgtcgacgatgatggagtcttcggtggccttgacgtcaaccggagtgccatcgtcatgacggaaggtgccgtgggtgctgtcgtacttcagcaggtaagccagggtagccggggtggtcagatcgttgatggcggcaacttcaatgtcaccagcctggccgccgcgagcctgcagctcgaagatgcgacggaaggcgagacgaccaatgcgaccgaagccgttgataccaatcttaactgtcatgtaattctcccttgtagggtggccttggcgcgctttggcacaccgggccattgtttaccaacagttgctactgtaatgccgactctgtacacatggcaacgtttcagcgtgcgttttgggtaaaaatgccgtattttttgtgagcgctcacaatttggattgcccgcaaccgacatgtgattttcctctcctttggaggaatgtctcgaatcatcacgagcaagcgcgcggcatgcaagtcagcgaaccagcagcttggacacttcggtgtccagctcgccgatatcgccgccgaattcatggaatctgctcacctgtggcaacgccacttcgatggggaaggtgacgatcagtgtgccgcgtttcacgctgatggccgcgtccacgccgtcgcggaactcgttgctgaccccctgcaccaccgtattggtcagcgtgccgtctttaagctcatatttcagccccggttcgttcacgccaagcgaaacatcggagtgggagaacgccgacaccatgcggccgtcctcgggcaccggatgcgcggggaacgaaagcctaccatcggtgatggccgtgacgatgagcccgtcaccatacaggtacccgcttgccccgtgtcgggccagcagcgccatcagttgaatgccggaaatcgtatggtcaatacggccgccaagcccgccgtacacgtgaaactcgcggcaacccgccgaccagccgaccttcagcgcggaaagcatgtccgggtcgtccttcaacgcgggcagcgcgatggtgcgcacatcggtgcggggcggccggccctccagcgaatcgaagtcgcccaccaccacatcgggcacgatgcccaactcgcgcgtatggtcgagtccgccatcggccgcaatcacatacgcaccggtgggaaccacgggcgtgcccgcatagtattcgcccgcaccaaaaatcacgcatacctgagtcattatgcctactgtagccggtatccacccatcgacacacggtccgcgaatgtccgggcatgtggtaagattcctatttggcttgagaaatcaagaaagcggggcaaccccacctggaagcctttcaaggcctcgggttcaaggcaaacagcctagcgattgcgatatacaacgcgcaatcaggaatgacgcaaagaactgatatgcgtctgcagaagctgagcgcatattggcgctggttttggcttgccatgaacccaaagcattgaacaggactccagcaaagggcctcgccacggaattgaagtagaggattggagtcatcatcagcgacgaaccacgtattaacgacgagattcgcgtcccgcaggtacgcctgatcggcccgaagggcgagcaggtgggcgtcatcgcgacttccgtcgcgctgaacctggccaaggaggcaaacctcgatctcgtcgaggtggccccgaacgcgaagcctccggtcgccaagctcattgattacggcaagttcaagtacaacgagaagatcaaggctcgtgaagctcgccgcaaccagagcaccgcggaaatcaaggagattcgtttccgcctgaagatcgacgaccacgatttcgacgtgaagaagggccatgtgacccgcttccttaacggaggcgacaaggtcaaggtcaccatcatgttgcgcggtcgtgagatctcccgcccgattggtggcgtggaactgctgcagcgtctggccgacgatgtcgaggaatacggcaccgtcgagtccaagccgaagcaggagggccgcaacatcatcatgacccttgcgccgaagggcaagaaggtccacacccagtccgagcagcgtcgtcgtggcgccgagtcccgcgccgagcgtcaggctcgccaggcggctcgtctcgcggccaagcaggagtctcaggctcaggccgcggccgacgcgcagtccgcgatttctcagaagacttccgacaagaagcaaaccagcaaggagggcagcaatgccgaagatgaaaactaattccgccgcttccaagcgcgccaagatcaccggcaccggcaaggtgaagcatgtcggttccgccatgcgtcacaacctcgagcacaagtccgctcgcaagcgtcgtgaactgtccgccgacgatgtgctgcgcggcggccaggccaagaagctgcaccagcttctgcagaagtgagcatagggcttacccggaaataataagactttagaaagctgaggaatagattatggcacgtgtcaagcgcgcagtgaacgcccacaagaagcgtcgcgttgttctcgagagggcttccggctaccgtggccag

SEQ ID NO: 529 - DNA, 9983 bp, Unknown
  R48_24m  MAG No. k141_58414
gcttcaacgagcttcaggaggttgtcgtaatcctcggtggaaggaccgatggtgtctacgatcttggctttacgcatgaatgcctgcctattcttgttcaatttggttcgaggcacgattgccccatttgccgaaacccagtctactagcgcgagccgactcatgacaagttttcttcacggtgtgttgtgagcgctcacattgttgtgctgactgggtttaagggttgtattctctaacgatttcaggccttctcggcgctttccatgctcttcatcttgatcacggaagccacggatgcgccgccaattgcgaccacaatcacagccagcgacagccatgtgggcacttccggcacccaatggatgccttcgccgccgttgatgaacggcaaggtattgccgtgcagggcctccatgatgagcttgacgccgatgaagcccagcaccacggacaggccggcaggcaggtagacgagcttgtcgagcagagcacccagcaggaagtacagctgctgcaggccgagcagggcgaacacgttggaggtgaacaccaggaacggatccttggtcaggccgaagatcgcgggaatcgagtcgaaagcgaacatgacgtcggtggtgccgatggtcaggaacacgatgagcatcggggtccagtaacgcacgccgttcttggtggtgcgcagattctcgccgtcatagtcgtcggtgatcttgatgatcttgcgcagattacggatgatgccgttttcgtgatattcctcgtcctcatcgccgccgagcaccagtttgacggcggtgtagatcaggaaggcgccgaacaggaagaacacccatgtgaagcgggtgatcagggccgcgccgatcagaatgaaaatgccacggaagatcaaagcaatggtgatgccgaccgaaagcacatacttctgaatctgcttgggcaccgcgaagttcgacatgataatgacgaacacgaacagattgtcgatggacaacgagtattcggtgagccagccggaatagaactcgatggcgggcttggagccggcgaagaaccagatgcatccgccgaagatcagcgccatgaccacgaagaaggcgatatgctgcacgcattccttggtggagggcacatgcggtcggcgcccgatgacgaacaggtcgacgatgaagaacagcgcgagcaccacgaaggtgatgatttcaaatgcgagtggggtttctgccatgattccctacactaacccatgtatgtgacgggtcattgccccgcctcggtcatctgccggagctccttcttgagatcacggatctcgtcgcgcagacgggccgcgagttcgaactggagttgttcggcggcggtgtgcatctgttcggacagctggcgaatcaggtcggcgaggtcctgcgcgggcaggccggccttcaggatctcctcgtggcgtttgtctgcctcgttgggatcgagtaccggcacgcccaggtgtgtgttgccggccttgcccgcgttgcggtagccgccctcaagcaaggtctgggtgtccacatcctccttggcgagcatgtcgttgacgtcgctgatcttcttgatcaggggcttgggatcgatgccgtgctcctggttgtaggcgatctgcttggcgcggcgtcggtcggtctcgtcgatggcttgccgcatggcttcggtggtttcgtcggcgtacatgatcaccgtgccggacacgtttcgggccgcacggccgatggtctggatgagcgaacgataggagcgcaggaatccttccttgtcggcgtcgaggatcgccaccagcgatacttccggcaaatcgaggccctcacgcagcaggttgatgccgacaatcacatcgatcttgccttcgcgcaacatgcgcagcagttcgacgcggcgcagcgtgtccacgtcggaatgcaggtattcgaccttgatgccgcgttccagcagatagtcggtcaggtcctcggccatcttcttggtcagggtggtgaccagcgcgcgctcgttcttggccacacgggccttgatctcggcgagcagatcgtcgatctgccccttgaccggccgtacgtcgatcttcgggtccagcaggccggtcgggcggatgatctgctcgaccaccccatcggacagtcccatctcatagtcgccgggtgtggcggacaggtacacggtctggccgacgcgctgcaggaattccggccatttgagtggtcgattgtccatcgcggagggcagacggaagccgtgttcgaccaacgtgcgcttgcgggaggcgtctccctcgtacatcgcgccgatctgcggcacggtaacatgcgactcatcgatgaccagcaggaaatcatccggaaagaagtcgagcagcgtatgcggcggcgtgccggccgcgcggccgtcgagatgacgcgaatagttttcgacccccgagcacacgcccacctgggtgagcatttccagatcgtaggtggtgcgcatgttgaggcgctgcgcttccagctccttgccttgcttacgcagttctgccaggcgttcgtcgagttcctcgcgaatggttttgagcgcgcgttccatgcgttcggggccggccacgtaatgggaggccgggaagatgtggatttcgttttcctcgtcgatctcgtcgccggtcagcgggtgcagcgtggagatgcggtcgatctcgtcgccgaagaattcgatgcgcacggccagttcctcgtagacggggatgatttcgaccgtatcgccccgcacgcggaacgtgccgcgggtgaaggcgatgtcgttgcgcttgtactgcatggccacgaaccggcgcagcaggtcgtcgcgattgatctgctggccttccttgagaaacagcatacgcccggcgtattcctcaggagtgcccaggccgtagatgcaggagacggtggccacgaccacgcagtcgcgtctggtcagcaggttggccgtggcctgatggcgcaaacgttccacatcgtcgttgatgttggagtctttctcgatataggtgtcggtctgcggtatgtaggcctccggctgatagtagtcgtagtaggaaacgaaatagctcaccgcgttgtcgggcatgagctcgcggaattcggcgcacagctgcgcggcgagcgtcttgttcggctcgatgatgagcgtgggacgttgcagccgttcgatcagccatgcggtggtggcggttttgccggtgccggtggcgcccatgagcaccacgtcgttctcgccgttctcgatgcgcgtgaccagttcctcgatggccttcggctggtctccggatggtcggtacggcgatttgaccacaaacggcttgtccacacgttcgatgttgaatcccatgcgctgtttccttccgattcacgctgtatcccgatgatatatcggaatatacgctaggcaactccaatacccgtcttcctcttggacgcgcagccaaccaccgctccgcgtaattgattgacacagatgagacattccaaatcccatgcccaatgttctcggagattccgccaatgctccatccgccatcttggcgggaacgtcagccaccgatacgtacagtccgtcttgccgcacttgtatggcgagcacatacccttgttcgcgatccgcgtgcttggcgatattggcaaacgtctcttccagcaacgaccgcgtcaactggatagtcttctcgtcaaaccgactcaggagatcgaagggatcggacacaaccacctcgcctcggaaaccaagcgctgcgagttcccgccggtgccgttcgatctcggcctcgaagcgacctgcaccgattggaacaatggcttctccggagcgacgcgcatggcatcgcgggattcgcgcagtaccgacattgtgctttgcgagaaccgctatgacatcatgcgtctgatcgagcgcccgttgagccacttcgcgcaacagtggcaagtccatcgactctccttgcgaagggtgttccgacatgatcctgtcgatgctcatgatgagatatgagagatcattggtcgtcgcatcatgcagccttgccgccaaatccaacgattcggccctgccacgcgcttccgactccctctccccctcacgatgatgccaattcagcagcagaccgattccaacgcacgccaacgccggcatgacggtccaaggcacaacggacaccaacgccccggcatcccaacccatcggcaacccatactgccatatcagctgcgccacgcgagatacggtcacagtcaccgccaacaccacgccgcaccatatgcgttgataggagaggacgattaatggctcggctatcaccacgctcaccgacatggacagatccaccggcaaggggaacaccacgcaccatgagatcgccaacgcgatattgccgccgaacgggaatgccacgcagagcaacgacaggatgacgaacaacagacccacccacagggcccacgcatcccaaaccggattgatacacgattcgatgaccgtatcagcggctatgcacaaggcgcaggctagcgccgcgatcttctcgccatgccaagacttcccgaaatcgcggaagcgacgtctaagaaaacggctgccgtcacagaacatggtatcgctcacagtaatcaaggagttcgccgcgcctcgtcaccccgaccttgcgcatggctcgtttcacatagctgtacacagtttcgacaccgattcccaagcggcgcgcaatttcaacggtcggtacatgatgtgcatagagacgcaacaccgccagctctcgatcggagaagagcctggcaccatccgcttccggctgtgcggcatccaccgtatgcaatgtctcttcaaggctatgcaaaccccaaccatgagggtatgttcccccgtcaaacaccgatttgaccgcctcgcgtatggtcgctgcgaaatctcttttcgaaatcaacgcttgggctccgcaacacgcgatatcctcaccataggttgccaggtcatacgaagtgactacgatgacgccaacctgcacgttccgctgtcgaatacgttccgtcagctgcactccgttcagcccgtccatcatgagatcgcaaataaggatgtccggcttccgcggatcgaacagacaacgttccaaggcaagactgggattatccgtaacccatagcatatgcgccccgggaatcgtcctgccaataagcaaagccatcatctccgcagagcaacgatcgttgtccaccaaggcaagccgaatcaggcgcccgttcttcataagtaccccctccccaaatcgcctccgtcaaacgaaatcgtaacactgtgacgattcccgtcacacagacttcgttcgctcctcattggcatcttaccgtgttgcatgcggcaaaacagccgcgcaataatgtgcggcgagcgaacttcctatcgtccgccgcacaaacacattgttaccgggaataaggtgtatcatgcactggacttataaaatcgccagtatattggccgtggctctcatcactctcgcagcaggattctatgcgcagaataacgaagaaacctatccctccggccctagctacgatattggaatttccgacgcgcacgggcagactctatcgacattgaccggtctcgcagcgacccatcatgtcggactcgcgagagtctcctatgagccggacggtcacggtaccaacagacgcgtaatttctattttcggcgcattagacggcaacggcatgcatgcgaattcgccatacccggattatgggttcgggccgcgcacacgtgtgcaacgcggagacagattcaccgacccattgggaagatggcttctctatggatcaccacgggataccgcttcagtagccaaatccatacggcgccaaggattcgaacttaacagagcaacccccatcggcatcacacaaatcaccaaacaattcttctccaattccatcgcccaagtcatattcgccggacttgctgtagtatttgtgtccggcgcgctttccgtgtcgacagcttcacgcgtttgcgcgatacaagccttgcatggcatgagaacaaccggcattattatgaggcaattcctgcggcatgcgttctttttcatcatctgcgtctgcatcggatggatgacttggatttccattggtgcgatcttctggcctttcgcttctcccttaggattcgccggtcagatattcctctccatcatcatcgccacaacgtgcatggcattggttgccttgtcattgtcgattgctctagtaagggttctggtgccgaacgcactcaaattaatccaaggaaagcgccctttacgttttctcatggcttccggctgcatcatggcaatcatcgttctcgctctcagctctgccagtttgaacgttacgaacttcaaatggcggcaatcccaaacactgaaaacaacattggagcatcaattgtcatccaacgacggattccaattgcaactgtggtatagcagcgatcaaaaccgagctcgttccatgccctcatggaacgacttcgtcgaacaaacttcccaatcagaacatacgcgattcgcctcattccgggtaggatgcacgtgggtggatagctcgcaagacccacagccctgcatcctcatggattcccgtacggcaaggctccatcatcttatacgaaacaacacgacacttgcacgaatcagtgtgattatgcccgagaatgaacaatggaacagcgaatccattacgaacaatgtgcttcgcgcatactcattcgagcaaagtttggcggcagaagagggaaagagtctgcccgccatcaatcgcacgagcatctccattgaatccagaccaagagatgctgtcttatcagcatttgacaccccttccaacaccgatggcctttcctctgttcctgttgttgtcattgacccgtcactgctctctggcgataccactacatcgatggtgtccaccggcggcatgaccttcgattacagctcccgccatcagctgctcgaaatcctacgggaaaagggcgtggactctttggtggcttcggtcgtcaatcggcacgacgagatacaaactcgtttggcacgaacaactcaggaaatgaactatttttccatcacagcttgcatatccataacatgtctgctgggcggcgcaatcatggtggctttgacactatgcacactccgacgtcaaattatgttcgtggaatatatgcatggagcgccgtcatatctccgttttcaatcgatactgttcctagcagcggcgttatgcagtgcatctcttccgatccagttgctcataggaggttacaacgccgtttccacgacctcggtttccttactattcatcgtcgtttctctggcaaccacagtgctttacgattcgcggctgcgcgccgacagtatcaaacatccctgatcgccatccacaaacctgtatcagcaaccgcttaccacgtaaggaacatcaagcatgagcgccttattgatcacgcataatctgacatatcgaatcgacgaccgcaccttatgggaaggactgaacctgacattcagtcccggtgacatggttgccctgaccggagaaagcggatgtggcaaaaccactttgttgaatgtcctaggtcttttggaagagccaagttcaggaacaattacctatgatgggcaaacaattgcctccagaaagggccgacggctcatgcaccgcaacgtcatgggattcatgttccagaattacgccctggtggagcaatggacggtgaacagaaatctgattctggctctgcgcagcgtcggaataccatcggcagatagaagtcggctcatcagacgcgcattgcgggccgtgaatctgacgggctacggcaatagaccgatctacacactcagtggaggcgaacaacaacgagtcgcaatcgcgaggcttctcatccgtcaatcgctgcgcgtcatactggcggacgagccaacagcggccctcgatgccgacaaccgcgccatggtcatgcgtcacctgcgtgatttcgccgacaacggagcgatcgtgatctacacgacgcacaacgaggagaccgcggccctcgccgaccgcatcatcgcattatgattccgccagccactgttcgtacagcgcatcgacggcttcgagcattcgacccatcggctgcgtggaatcgatcaccgcgtcggctatgacacggcgttgttccgggctggactggtggcgaatgcgcgcaagcgcatcatctcgcgtcatgccgcgggtcgacaccattctgtcgacccgtgcttgttcgggcgcttcgacggtgacgatatggtcgaatcgcatgggcatggcgtccaggacttccgccaacagcggaacatcatgcacgaccatggcatctggattgtccgcgaccgcctgccgctcccgagacagcgcaagatcatagatcaacggatgctcgatatcgtccagtttcctccgcaaccgttccgagtcgggcccggcgaacacgtgctcggcgatccatcgccggttgagccgcccctgatcggtcagcgcgtcggggccgaaacattccgctatacgacgaagaccgacgccgcccggttccaccactcggcgcgcgagctcgtcatagtcgataagcgccgcgccgagctcccgcagtcttgcggacaccgtgcttttgcccgccgcaataccaccggtcaatcctattcgaatcatgctcccccatcatgccatgtttcgaggttcatgcacacaacggcaaaacccggcccgccgaagcgagaccgggtattgactatacgtcaggcgtcagtcgcccgatggcaaactcacttgccgagcagctggtcgcgcagggcggcgagctgatcggagtcggcgagggtaccggtagccggagcagcggaagagtagttggaggtctcctcgaccggcttctcttccttcgggccctggccgtcggcggctgcggattcggcagcgttctccagctccttggccacgaactccttgtgctcctcccacagctcgtgggcggcggcgtactgggactcccactcctcgcgctgcttctcgtaaccggcgatccactcgttggtgttcgggtcgaagccttcggggtacttgtagttgccctgctcgtcgtactcggccggcatgccgtagatggccggatcgaagtcctcggaagccgggtcgacggagtcgttggcctgcttgagggacagggagatgcggcgacgatcgaggtcgacgtcgatcaccttgacgaacacggcctcgcccggcttgaccacggtctccgggttctcgacgtgacggttggcgagctcggagatgtgcaccaggccctcgatgccgtcctcgacggagatgaagacaccgaactggacgatcttggtgaccttgcccttgacgatctggccgggaacgtgggtgcgagcgaagcgctgccacggatcctcctgagtcgccttcagggacagggagatacgctcacggtcgagatcgacgtcgagcacctcgacggtgaccttgtcgccgaccttgacgacctcagacgggtggtcgatgtgcttccaagacagctcggaaacgtggatcaggccgtcaacaccgcccagatcgacgaaagcgccgaagttgacgatggaggacaccacgccctcacgaatctggcccttcttgagctgggacaggaaggtctcgcggacctcggactgggtctcctcgaggtactggcggcgggacaggaccacgttgttgcggttcttgtcgagctcgaggatctgggccttgatcttctggccgatgtacggggagaggtcgcgaacgcgacgcatctcgacgagggaggcaggcaggaagccacgcagaccgatgtcgacgatgaggccgcccttgacggcttcgatgacggtgccctcaacgacgccgtcagcttcc

SEQ ID NO: 530 - DNA, 6687 bp, Unknown
  R48_24m  MAG No. k141_58626
ggacggcacgaccgtgccgaggtcgagctcctcgtattcggagtactgcggctcgacatagtccgggtcggaggcgtcgccccactgcttgttggccgtggcgtacgcctcgacaagcgcgacctgctcttcggagcggccggtcaggcgcaggtagtcgagcgtgacattgtcaatcgggaagatgccgcaggtggagccgaactcggggcccatgttgccgatggtggcgcggttggccagcggcacggaggcgatgccttcgccgtagaattccacgaacttaccgaccacgccgtgcttgcggagcatgtcggtgatggtcaggaccacatcggtggcggtaacgccctccgggatggagccggtgagcttgaagccgaccacgcgcggcacgagcatggagatcggctggccgagcatggcggcttcggcttcaatgccgccgacgccccagccgagcacgcccagaccgttttcggtggtggtgtgcgagtcggtgcccacgcaggagtcgaggtaggcgagcgcgttgccgttggcctcggccttgctcatgaccaccttggccaagtattcgatgttgacctggtggataatgccggttcccggcggcaccacgcggaagttcttgaatgcctgctgaccccagcgcaggaactggtagcgttcaccgttgcgctggtattcgatgtccatgttttgctggaccgcgtcggcgatgccgtacttgtcgatctgcacggaatggtcgatgaccatatcggactggacctgcgggttgatgacctccgggtcgccgccgaggtccttgaccgcgtcacgcatggtggcgaggtccacgatgcagggcacgccggtgaagtcctgcatgatcacgcgggacggcgtgaactggatttcgtggctgggttcggcgttcggatcccagtcgagcagggtcttgacgtgctcgtcggtgatgttggcaccgtcgatgttgcgcaccagattctcgaccagtaccttcagcgagtacggcagatgatcgatgccgtcgagattggcgatgttgtagtaatcgaagtccttgccggctgccttgagggtagccagctggtcgtcgcgtaaggacatgcttcctccgaaatcatgaatcggcttatgatgccgctgattatccgctacacatggtacgggcacgttaccgaggctctggcgtgtcggcttgaagtatgagacaatcgcgccgccgtctcaatgccgacgcgagagcttgcccgtcagtccgcgcacgaacggcgccagccacaggcacagcgcgaagatcagcgcggaaccggccaacgcgatcagcgtggccaccatcgtggcgccggtcggcagaatcagggcgaagaagttcgccacgaacgggacgaacgcgccgatcacgcccgccgccgcgaacaccgccaccagcacgccacgccaaccgttgagtggtctggccacgcgggccagcacgaacacgcccatcgcgaacaggatgatggcgctggtggcgcgcagggcggacaggtccgcggcatcgccggtcacgttccagcccatgaccggcggcagcacccaagcggccagcagcaccgacagcgcagtggcgatgccgcccggcagcgcgaacgtgaccacgcgcttgaggaatcccggaatatagcggcgcgtgttcggcgcgagcgccaggatgaacgcgggcatgccgatggtgagagcgccgatataggtgatatggcgcggcaggtatgggtatgggatttgcgtcagcactacgccgagcgagatcagcgcggagtacacggttttgacgaggaacaggctggccacgcgctccatattggccatgacctgacggccccgcgccacgacgtccggcaggtgcgagaacttggaatccaccagcaccacctgggccacggctttggtggcgggtgccgcgttgcccatggcgatgccgaggtccgcctccttgatggcgagcgcgtcgttgacgccgtcgccggtcatggccaccacgtggttctgcgtgtgcaacgcctgcacgatggccttcttctggtcaggcagcacgcggccgagcacatcgacgttttcgagcacgcgggccagttcgttcacgtcctcgggcagttcgcgcgcgtccatcgccaccggctcatggtcgcctgtcagtttcactctgcgggcgatggcacccacggtcactggattgtcaccggaaatcacacgacagcgcacaccctgctcacggaaccaagcgagcgtccgctcggcgtcctcgcgaatcttctcagagcacaacaccaacgccaccggctcagcctgcacatccagttgcgggccgtccgagacattggctccctcaactgcgtccctcagtccgcttcgcggactgaggggagctgtagaccgcgcaacaagcaacacacggttgccgtcattggcatactcgttaacctgctgcaacaccgacgaatagtcaccctcaagcgcagaaataatcacctccggcgctcccatgtaccaggtctcgccggatttacgcaccgcactccatttgcgcgccgaagagaacgggacacgagactcaaccgcacctgccccatatccttgggccttgagcccggcgagtacggcttggccggtgccgttgggctgctcttcgttgcagcagtcgtagagggcctgcgtggctgcctgttccgcagccgcattggcggaatcgagcatcacgagccggttgaaggcgataccgccatcggtgatcgtgccggttttatcgaggttcagcgcgtccacgcgagccagtgtctccacggattcaagctcctgcaccagcgtattgtgacgggcgagacgcatggcggccaccgcgaagttcagcgaagtcagcagcaccaagccttcgggaatcatgcctactacgccggcgaccgcggaaaccacggcttgccgccattcgccggtggagagtgccgtgccccaaccgccgaccgtatgaatctgcgaaagaatcagcagaatacacagcggtaccacgaggaaggtcatgaatttcagaatcgtgttgatgcccttgttcaggtcggacacggttttcttgtataccttggcctgcgcggtgagcgtggcggcgtaggaatggctgccgaccgcattgaccttgaccaatgccatgccggagaccgcggtggcaccggaatacacctgctcccccaccttgtggcgcacggtacgagattcgccggtgagcatggattcgtcgagttccagtccccaggtctggatgatctgcccgtcggccggcacctgttcgccggcacggatccacagcaggtcgtcgagcacgatctcgttgtggggcacctccacgtccctgccgtcacgatgcacgaggaattcggaggccacaaggatggaaagcttatccaacgtgcgcttggccctgagttcggtgacgatgccgatgcccgtgttgatgatgatgacgaaaccgaacaccgcgtccctccaggaaccggtgatcagcaccagtaccatcgcggcgaagatgatgccgttgaacagcgtgaacacgttggctcgcacgatatcttgaaccgaacgcgaggtggatgttttcaccgcattcgattggccactttcgatacgctgcaccacttctttgggggtaagaccggttgctccgatttcaggcatttccacggctgttgttgcactcatattccccagcctaccgcgtcttgtttcgcaatccgctaaggctcagggatgattcagggtgctttctcagcttcaagggcctgattcggctcaggaaacggtgactttgatctcgcgttcgtggggttcgtcgcgcgtgatggtgagcacggcgtcagtaatagccattggcttggtatcggcagtgtcgccagaatcggcactgttggtgttgaggtgaaggatgacggcgtacagcagttcatcttcgggcgcatgctttggatcaatgagagcgactggaataccggcttcacgcgcattggtcaacgtctggttccagctctcccggttggcgtcggtaacgtcgatgccgctgataaccacgattttgaccgcgcgagctacgaaatcggcaacaccctgctgtgcggtggccgcattcttgtcgacgccagtatgagcatccatactatcggcaccgttttcgctggtagtgccggcgtcagaagattcggtttcaccggatacaccatcagttgcgtttgccgagcttgcggatgtttcgagcgaggcatagtagacattgagtttgtcatcagacagcgcattgatggcggacttgtctgcggcggtgtcagtcgaccccacaaagccgactgtgacatccgtgggatgtgtggaatcgtgggcgacttccggcatgctgtcttgggtatcgccgaccgccctaccggccggcgtgcaggcggccagggacaacacagccgccatgcaggccagcaatccgagaattcgtcgtgtcatatgctcacctgtcagcgggtaaacagggccaccgtctcaacatggtgggtcatcgggtagatatcgaaggcacggatgtctttgagctcgtagccttcgccgatgagtgtcgcggtgtcgcgtgcgaggctggtgggatcacaggcgatgtagaccacgctgggtgcgccggccgcggcaatctggcggcagaccttggcacgagcaccggcacgcggcggatcaagcactacgacattcggcttggccagatgcgccggcacatggtccagcgtgcgcgagacgtcacccgcgcgggcgtccacgtcgttcaggttcatggcgcgcagattgcgctgggcgttcttgacggccacacgcgcgccttcaacgctgagcatgcgggtgcgttcaccggtcattgtggccagcggcagggtgaacaggccggaaccggaatacaaatcccagattacggcgtccgccgctgactgcagctgcccgttgaccaggttgatcacgtgcgtaccgagggcgatcggcgcttggcgatgcacttgccagaaaccgttggcgtcaacctgatagtcgaaggtcgtgccgttgatggtcacctgttcggtgagtagctgggagccggcgcgcagttcgccgtccacaagtacggcgtaattgtcgtctgctgccgcggtatcgacgatctcgccgcgcggttcgggcacggaaagacgaatctgggagccgggttcaaagccgccttcccacacgtgttcgcgcttggcgacgtccagcagcgtgcgcgtggcaagcggcatggtgtcgatggccacgcggttgtgtgtgccgcgccggcgcatggatggcatgccgttgtcgtcggcaatcatttcgatgcgggtacgccaattgaggccgccggctgccttgtcgccgggcatgcgctcgatgggaacggccacgtcgatatggccgagtcggctcatctgttcggagacggtgatggccttccacttgagctggccgggcaaagagacgtgcacgagatccgcgccgcccactcccccgcccatcgccaagggaccggcaagtggccatgccggggtgactcggtcttcggacggctcgagaacctcgacgacttcgccggtccagaaccggtcgtcccggtcgtggggctcgtcaagttcgactcgcacgagttcgtcgggcaaggcgaagcggacgaacaccacacgaccgtcgatatgggccacgcagcggccttggtcggcgtatcgttcgatacgaacttcagcttgcatcatcgtcctttccggttgcgctcggttcaagttcggcatcaacagcgacttcagtctgtatcttcctagccgcgaccttatgccggtgcatcggcgtggcaataatgaggtaactcacccaaatcgccaatgcccagaacggaatgcccatgagcaggcgggtcacgccgagtgcagttacatggttggtcagatacagcggcacctgcaccaccagccgcagcaggaacagaccgacccacaggccggtgacaatcatataggcgcgtttcagggccttgtcgtccatccagtcatggaaccatgccttgaaatgctcggtgggcaggctacggatgaattcgacgaccaaacccagtccgggcacgcgcgcaatcagcgacacggcaagcaacgcggcatagccggcattggtaatgaatccgaagatgtagtaattgcgggcctcatgagtctgccatgcccaaatcaggcagatgcctaccgccaccagaccagagaccgcgcccattaccgactggcgctgaatcagtcgcacaataacctgcaataccgccaacacggccgaaaccgcaatggtgagattcagattgctcgtggccacgaacagtacgacgaacaccacgccaggcagcatggattcgatgacgccacgcgggccaccgatggcgtcgatgacggagaaatcctcgccttcattgccggcgtcggctagagcggacaggccggtgcgtttgttgtctgccaagtctcttcctataaatcagcgaacttcggagaacatcgggccgcgagacagcgtggtcttcacttcggtctgctggtcctggctcagcggacccttcggcttgttgtccggaatgtccttgaagtgttccttgcc

SEQ ID NO: 531 - DNA, 4338 bp, Unknown
  R48_24m  MAG No. k141_58897
cgcccgcgcagaagcgtcccacatcatcgccgacgctcgttcccgcgccgagtccgatgcggctcaaatcaccgcatccgcacagcgctcgatcgaatcccagcagcagcaggccatcgtctcgctcaagggcgaggtcggcgcacttgccaccgccttggccggcaagatcctcggtgccaagctggaagacagcgacgtgcagtcctcgatgatcgattcgatgatcgacgacctgggcgccaagaagtgaccgtgaccatccgtaaccagaaagggaggtgaccatgcgaggagaggcatcacgtattgcagaccgcgagtcgcgtgattcgctggccccgaaactgcgcgacacccgtgaggacgcgtggcggatcggcaacgaactgttcacgatcaccaaggtgctcgatgacagcattcagctggaacgcgcactgaccgacccgtcccgcccggtcgccgacaaggtggccgtcctgaagggactgctcggtgacaacgcgcatcctatgaccatggagatcatgaccgacttggtctcccgccgttggagccgtgcgcgcgacatcgccaacgcggtggaggacttcggcgtggacgccatgatgtactacgctgacgccaccgacgccacgctgcaggtatccatcgagctgtccgagctgcattccgcactgctgaacctgccggtcgtccgctccaagctgtacgactgccaggccaccagcgagggccgtgtgaagctgttccgcgaggtgttctccggcaagaccctgaacaaggtcaccatgaggctcgccgaacacgccacctgcaacctgcgccgccgccgctacttggagaccatccagtggctgatcaacaagttctcccgccacatgggcgagtcgatggtcaccgtgaccaccgccaccccgctgaagaaggagcagattgagcgactggtcgaggtctactccgccaaggtgggccgccaggtgcacatcaactcggtggtcgatccgaccgtactgggtggcatgcgcattcaggtgggcgacgaagtcacggacaacaccgtggtcgcacagctgcagaacctgcatcgcaaggtgcagacggaggcgactccggcctgaccggccgagccaatccgtccaacaccacacacaagcaaagacttgactgaacaataaccaatagaaggagtgatcatggcagaactgaccatcgatcccgcctcgattcgcaaggccctcgacgacttcgtgtcgtcgtacaagccgagcgacacccccacccaggaagtgggctatgtcgccacggccggtgacggcattgcgcacgtgacgggattgcctggttgcatggccaatgagctgctgacgttcgaagacggcacgctcggcctggcgttcaaccttgacgcccgtgagatcggcgtggtggtcctcggcgatttcgcaggaattgaggaaggccaggaagtgcgacgcaccggcgaagtgctctccgtgcccgtcggcgacggctatctcggccgtgtcgtggacccgctgggcaagccgatcgacggcctcggcgagatccagggcattgagggtcgtcgtatcctcgaagcccaggcccccgacgtgatgcaccgccacccggtcgacgagccgctgtccaccggcctcaaggccatcgacgcgatgaccccgatcggccgcggccagcgccagctcatcatcggcgaccgccagaccggtaagaccgccatcgcgatcgataccatcatcaaccagaaggccaactgggaatccggcgacccgaagaagcaggtccgctgcatctacgtggccatcggccagaagggctccaccatcgcctcggtgaagcagagcctggaagacgccggcgccatggagtacaccaccatcgtggcctccccggcagctgattccgctggcttcaagtacattgccccgtacaccggctcggccatcggccagcactggatgtacaacggcaagcacgtgctcatcgtcttcgatgatctgtccaagcaggcagaggcctatcgttcgatttccctgctgctgcgtcgtccgccggggcgtgaggcttacccgggcgatgtgttctacctgcactctcgtctgctcgaacgttgcgccaaggtctccgatgacctgggcggcggttcgatgacgggtctgccgatcgtcgagaccaaggcgaacgatgtgtccgcctacatcccgaccaacgtgatctccatcactgacggccagatcttcctgcagtccgatctgttcaacgccaaccagcgccccgccgtggacgtcggtatctccgtctctcgagtcggtggcgcggcgcagaccaaggctctgaagaaggtctccggtacgttgaagatctccctggcacagtaccgttcgctggaatccttcgccatgttcgcctccgatctggatgcggcttccaaggcccagctgacccgtggtgcccacctgaccgagctgttgaagcagccgcagttccacccgtactcgccggaacaggaagtcgtgtccgtatggaccggcacccacggcaagctcgacgacctcgacctgaaggacgtccttccgttcgagcagggactgctggactacatcgaccacaacaccgatatcctcaagaccattcgcgagaccgaggaattcaccgccgacaccgaggctgccctcgataaggccgtggacgagttccgttcgacgttcgtctcttccgccggcaagccgctggtcgagaagaagccggacgttgacaaggccgcgccggttgatcaggaaaagatcgtggcgggagaaaagtaagccatgggctcgcaactcgcattgaaatcacgcatccactccaccgagtcgttggcgaagatcttcaacgctcaggagatgatcgcgtcttcgcatatcgccaaggcccgtgatgtggccctgaacgcgaagccgtacaccgatgcgattttcgatgccgtgcaagcgttggtggcccacacccatatcacgcatccgatcgcggtgaaggacgagaagaacccgcgcgtggctgttctcgccctcacctcggatcgtggtatggccggcccgtacacctcttcgattatccgtgaaacggagtcgctgctgtcccgcctcgatgcggcaggcaagcagccggagctgttcgtgtacgggcgtcgcggttcgacgtactacaagtaccgtaatcgtgacatcgcggcgacgtgggaaggcgacaccgaccagcccggcgtggaaattgctgaaacgatctccaacactttgatggacgcctacatgaagccggctgagaaaggtggagtttccgaactctacatcgtctacaccgagttcatcaacatggtggtgcaaaaggtgcgcgtgctgcgcatgctgccggtcgaaatcgtgaaaaacgagaccaaggtgcccgatcctgatgaagaggcaccggctactgcggatgtcgctccgctgtacactttcgagcccagcctcgaaaaggtactggacgcgattctgccgaagtacattcagtcccgcatccacgagtgcctgctgaccgcggccgcgtcggaaaccgcaagccgccagaacgccatgcacacggcaaccgacaacgcacgaaacctgatcgacgaccttacgcgcaagctcaacgcttcccgccaggcctcgatcacccaggaacttaccgaaatcatcggcagcgctgacgcgctgaccaagaaggaagagtaggaacgcatatggctgacaaccagaccactgcggccgagcctaccaacggtcgcgtcacccgcgtccagggctcggttatcgacgttgaattcccggtgggtcatctgcccgacatctacaacgccctgaaagtaacgatcgtcaacaccggcgccaaggaagaaggcgaggcgaaggagaccgagatcaccctcgaggtcgaacagcacctcggtgattccacggtccgttgcgtcgctctgaagcccaccgacggcctggtccgtggtgcctccgtctccgacaccggcgccccgatctccgtgccggtcggcgacgtgaccaagggccacgtcttcgacgtgtccggtaacatcctcaacaagaagccggatgagaccatcaccgtctccgagcgttggcctatccaccgcaacccgccggccttcgatcagctggagtccaagacccagatgttcgaaacgggcatcaaggtcatcgacctgctgaccccgtacgtgcagggcggcaagatcggtctgttcggtggtgcaggtgtgggcaagaccgtgctgattcaggaaatgattcagcgcgtggc

SEQ ID NO: 532 - DNA, 6489 bp, Unknown
  R48_24m  MAG No. k141_60268
cgagtgtttctgccatgatgttccttacctccaagtctgtcctgcggccagtttagcagcgagttcgggacggctgtccagcaggtcgtcaagttcgcgggcgacgcgcagcggggccaccgggtcgaagagcgcggccgcacccacttcgacggcgttcgcgccggcgtacaggtattcgagcgccttctcgccgctgtcgatgccgccgaggccgatgatcggaatctccggcagtgcggtgcgcacccgatagacggctgccaggccgaccggcagcacggccgggccggatacgccgccggtgacgttggcgatgatcggctggccggtgcgaatgttgatgcgcatgcctttgagcgtgttgatcatgctcaacgcgtcggcgccgtgttccacggccgcgcgcgccggcacggtgatgtcggtgacgttcggcgtgagtttgacgatcatcggcttgtcggtcatcgggcgcagccggtccataagattggcgagggccaccgggtcggtgcccacgctcatgccgccggcggaaacgttcgggcagctgacgttgatttccagcatgtccgcgtcggagtcggcgagcttttccacgaccgccgcgtaatcgtcatcgcaatgtccggcgacattggagatgacgaacgcgcccgcggccttgagcttgggcaggtcttcggccaagtaatggtcgatgccggggttctgcaggcctacagcgttgatgttcgcggccggcgattcggcggtgcgcggcgaggggttgccctcccacggcacgggcgaggcgcccttggtgcatacggcgccgagctggctgacgtcgtagaaccagcggacggcggcgtactggaaggtgccggaggcggtgccgaccgggttcttccattccagaccggccaccttggtgtggtgcttccacacgtggggctcgtacaggttgatgtggttgtcgctgccctgcgcggactggttgtttgcgctcatcgtcactccccccatccgagctgttcgcgagtgaacacgggtccgtcggagcagaccttgagccggccgtccacggtgtcgatggtgcacagcacgcaggtgccgtagccgcagcccatgcgctgttccatgctcagctgcgcggggatgccgcgttcggcggcccaagcggccacggccttcatcataggcagcggtccgcaggacaagatgatcggcttgcgatcgtaggccttcaggtcgtcgccttgttcgagtttgttgagcaggtcgaccacgttgccttcggcgtcgtcgatgctccacgaccagtccgcgtaccgggagacgtattcctcagcgaagtggtcgttgcggtagccgaatacggcggtggcaaaggaggcgtcgtgttcggcgagcttttgcgcggcgtagattagcgggggcacgccgagtccgccgccgacaagaatgtagttggcgtcttccttgaggttgaagccgcggccgagcgggccgagcacgtcgacggtgtcgccggcctgcagtcctgccaactgttcggtgccgtgtcccacgacggcgaagatcacgctgacttcgtcgccgtcgacttcgctgacgccgaacggacgcggcatgagcatgaagtcgtcgtgcgtgaacaggttgacgaactgggcgggcttggcgtgggaggcgatgaacgggtcgtggaacgtcagtcgcatcacgcggtcggtcagttccgtaacctgcgtgatttcgacgttgtggcgcggcgggaagaatccggccgcagtcgcctccgcaaccacatcatgggtgggggtgaaagttgtcatttcattcctattcagcacatcaagctccccctatcaggggagctgtcaaccgcaggttgactgaggggtagttaaacacactcggctccggtttccagcccacactcacgtatagcccacagccggacaatctacctacctatatacggcaacccgcagattatcgcgcatgtcgagcgccgcctggcgcgcgctgctcgccacaaggtccagcgcctcgtcggcggtcatgaattcggagtacttgccgctcttcttccatgcgccgatgatgccgcgcgacgagttgacgatggcgccgctgccctgcttgtcgaacatgcctgccacgtccgcggccgtgccgccctgcgcaccgtagcccggcacgaggaagaacgtgtgcggcatacgttcacgcaacgccttgccttcctcggggtgggtggcaccgaccaccgcgcccacgcgggagtagccgtggctgccgatggtctcggcgccccagccttccacgagatcggccacatgctcgtagaccttcgtgccgtcggccaggtcgagcatctgcagttcgctggaggacgggttggaggtgcgcacgagcacgaagatgtccttgtcggcttcggcggcggcctcgacgaacggggtgatgccgtcggtgccgagatacgggttgacggtcaccgcatcctcatgccacgggtcgaagtcgcccacgccgttcaggtggtgggcgtaggcggctgcagtggagccgatgtcgccgcgtttgatgtcgccgagcacgtagaggccctgctgggccgcgtattcacaggtcatcgtgtagatgtccacgccggcggggccgagcgcctcgtacatggcgatctgcggtttgacggcgggcacgatgtcggcgatggcgtcgatgatcgtgcggttgtattcgaagtaggcgacggccagctgcgcggattcgatttcctccggggattcgaccgagtcacgcacctcgtcggcaaagctcgccacgacctgcggcggtaccaacgcctcggtggggtcgaggcccacgacgctggggttctgagtgttgtcaatcgcttcgatcaggcgatccatgctgctccttatgttatctacagacggctgaacatcagctgggagccgatgatcgtggcgagggggcgtccggtgacctgccagccgccgaacggggtgttacgagccctggagtggaactgttcagggtccacggtccattcctcagcggtgttgagcaccacgaggtcgacattgtcggcgtcatccacgcggctcaggtcgagcagtcggttgacgccttcacgctgcggctgagcgtcgctctcccccgcaatcacgccatccggatcatccccagtgggcgcgggttcggcgtagtcctcgaccagcgcggccacgtcggttggcacatgccccatgagttcggtgggtcccacggacatgagctcgatcagacgctcatcggaaatgaagccgccgtcgacgagcaccttgtggcacacgccgtacgcgcattccagtccgatgatgccgttgggcgcctcaaggaagccgagttccttctctgccaacgtgtgcggcgcatggtcggtggccagcagatccacggtgccgtcggcgatggccgcgatggtggctttgcggtctgcttcggagcgcagcggcggattcatcttggcgagcgtgccgtacttgagcagcgcctcgtcgctcaacgccagatagtgcggcgcggtctcgcaggtgattggcaatccttcggccttggccttgcgaatcgcctcgaacgagatggcagtgctcacatgctggaagtgtacgtggacaccagtgcggcgggccgcttctatatcgcgggccacgatcttgagctcggtgtcttccggaatgccgggcacgccaagttcgcgcgagaccgggccttcgttcacggcacctgtatcgtgatgctcgcaatgctcgattaggtacaggtcggaggccttgacgttctccagcacctggtccaggatctccggcgtcacagcggaaccgtcgtcgctaattgcggtgatggggtgcgtgagcatggccggcgtcttggcgtcgtcctcgaatccgggcacgtacctgagccagtcggcaacgtcgcttgcctcatgaccggcgcgatccttggacgcgcacacgcacagatcgtaacgaaccggcaattgaacatcgtgcgcagtatcgtactgctgcaggaagtcgatgacgttgtcgaagccggcatccagaacctctttcgcaccggccgcttccaggtcagacacggtctgcccatccagtgccggcaacgtgttcggcatgatgagcacgttcgtgtatccgccggatgcggacgcgcggcagccggagaccatagattccttgtaggtctggccgggatcgcggaagtggacgtgcgggtcttcgaaaccgggggccacggtcagtccggtggcgtcgatatcggcaccgtcagccacggcggaggtgtcggcgaagtaggcggcagcggtcccgggcaccacgaggtcaatgatctcgccggtgttccagaccttgatgttgcgtagggttatacacacagttaggcttcctcgtcgcagtagtcgcagcggtattcgagccgttcggagtgcacgaggtggaacatctgcttgatgccgggctcggtggtggtcacgcagcgcgggttcacgcaggagatcacgccgacgatgtgctcgggcaggttcggctgcttcttttcgacgatcttgccgccgcgcaccacgtctacggtggcctggcaggccacgaagccgagcacgtcgaggtcgatgtccttgtcatcctcgattttgatgatgtccttggagccgtaacgcttggagttggcgttcatgatgagcgcaagcttggttttggccgggtcgattttcaggtattcgagaaccttcagcgaggttccggccggcacatggtcgatgatgatgccgttctgaatgctggtgacttccatcaggcctgaacctccttggggttgagcggttcgtatccgggtagttcgtcgcccaccacggtgctttcgagggccatgcgcacgagcatgccgttcttgacctgttcgaagtaggcggcacgcgggtcgtcgtccacgtccacggagatttcgttgacgcgcggtagcgggtgaagtacggccatggacggcttggcgagctgcagcttttcttcgtcgagaatgtaggtgtcgcgcaggcgcaggtagtcgtcttcgttgaagaagcgttccttctgcacgcgggtcatgtacagcacgtcgaggtcgccgatcacggaggccaggtcgcgcacttccacgtaggagcagttgtcggtggcgttgatgcggtcgatcacgtactgcggggtcttgagctcgtccgggctgataagcacgaagcgcacgttgccgaagcggcacagggtctcgatcagggagtgcacggtgcggccgaaggtcaaatcgccgcacagtcccacggtcaggtcggtgatgcggccgaagcgcgactgcagcgtggccaggtcggccagcgtctgcgtgggatgcatgtggccgccgtcgccggcgttgatcaccggcacggatgcggcgcgggaggccaccagcgcggcaccctccttcgggtgacggatggcgaccacgtccacgtagttggacacggtcttcaacgtgtcggcgatggattcgcccttggtcacggaggccagctgcgcgccggcgaatccgatgaccttgccgccgagacgcagcattgccgtctcaaagctcaggcgcgtacgggtggagggctcgtagaacagcgtggccagcactcgcccatcgcaggtatgggcaacctctttgcggtgggaatcgatgtattcggccttatgcagcaggtcgagaatctggtttgtagacaggccgtccagcgttacgacgcttttgccgaccattggcgtttcttcagacaaggctcaccttttcgctcgtggttttcaggtggccacccttgtgtgacctaatataacttacgccatttttcggacagccgcattcaccgagtgttcacctgaaaatccaacgaatatgctgtgtctgtatagctgatatctgctttggaacgccagagctcattcattaggtcgatttgacgttcattaggtcactgcaccctcgtatctgttgttggaatgccgccattccaacaaggtatgcggcggcggaccgacctaatgaacgatgaatcgacctaatgaacgtagtgaacgcaatacaagaaaggtctatcgctgcgcgcggcgtcggttccgctccagtcgcggtgcgatcacgtgcatacgcgggcgaggcgcggtttgcggctgctgcgttgcggcggaggccgtggcggtggttgccgcagtcgcctcgtcttcggtctgcccgtagaacaggcgctggcatacgtcacggcatttgcgcatcacggccagcaggtcgttctcgaaatgctggccgcggtgggcgccgtagccgaggtagacggcgatgccgcccagcgaatagatgtcatcaggcagaatatcggcctggttggcgcgcccgctccacagatagttgccgttgcgggccgcggtgcacaacgtccatgccttgcgc

SEQ ID NO: 533 - DNA, 13478 bp, Unknown
  R48_24m  MAG No. k141_60487
agtgtcgatcgcgcccgattcgccgttggcccgcgcgttgtggccgctgggagacaacggcccgagtgaggcggaggccgatgaggtcgattccttcggcaggccgtatcatccgcgcgcctatacgctgggcgtcaacagttatcaccatcaggcgattcgcacgctgggccagggactggaaccgatggccactgcgccggacagcatcgtggaggcggtctggatgccggccaagcgtttcgtctgggccgtccaatggcatcctgagttctctcaccgcgccgatagcaaccaacgtcgcatcctcagcgccttcatcgacgcctgctgacgcaagctcccgccaatctcgacgaaacgtcttccaagaaatggcttgcccgcatccgcagccccctaccacgacatgagcgcccttgacaacgtcaccctcggcatgcgcttcacccgtgacagcaaacaggtcaggcagcgcaaggccaaggccatgctctcccggctcggactcggccatgtcgcgggagacaagatcatgaccctctccggcggtgaacagcagcgcgtcgccctcgcacgatgcatattgaagcccggggatttgatcctcgccgacgagcccaccggcgcgctcgaccgcgatctcgcccaacatgtcttcgacgaaatgctccgcctccagcacgaatacggcaagaccctcatcatcgtcacccacgatcttggcatcgccgcacaatgcgacaacaccatcgagctacaggcggtttgacggagatattccggcagctttggtctaccgaagtcacgtgttgcccttcaatctcctcggaaatctaggtggcccatttttcaaagaatgcgatcggacgtaacgccccgtaaggagacctgcaatatgaaacgttgaatcgtcatctaaagatgacgttttcgtagatcttccggaatcgccagtcatctgcgatccggatatggcaccggtccggctcgatcgagcccggacgaccatggagaaaacgaacgatcgaatccgaacgcgggtaaagagcctgcgcgacaccattgataaagccaaatttaagaaaacagatcagtatgcataagttttacatgccttcagcctcgtcaaccggcagcgggccccagaatccagtcacagctaggcagagcgtacaacatactgcgtagtacatggcgcgaatcccaatgaccaccatcgattgatgacggccacgaatactcgtactcagccttactgctttggctcatttctgttcacttcacgctggagtaccgagacacgttgagcggaaataccggtaattcacgtacggttaccgaccattggcctgaacggtactcagcatccgcagtcacttggggtatggtcatgacggagagccatcatgaccgatctctcattattctgggatgaatccggcgaggctggaactgaatctaaatattaaaacgcatgatgcacacgttgcggaattagtccaccagaacttcggcatgctcggcaggttcagcgggttcgatgtgacgggcacgcatggcatcgagggcggcggccaggtcggccgggtactgggaccggaccgtggtccagacgcgggtgcgaggatggcggaattcgagcttcatggcgtgcagccactgccggtcaagtcccaaagcttcagacagcaccggattggcaccatacatggggtcgccgcacagaggatgcccaatcgaggagaaatgcacgcgaatctgatgggtacgtccggtctccagattcacggataccagtgtggcctcatggccgaaacgctccaacacatcccaatgcgtaacggccggtttgccggccggagtcacgcagaagcggaaatcggacactttggcgcgcccgatcggtgcctcaatggtcgctttgttctctttaagaccgccctgcacgagcgcatgataggttttctttacctcatgctcggcgaactgccgacgcatctcggtgtacgcaaggtcggacttgcacaccaacatcaagccggaagtgcctacatcaaggcgagaaacaatgccttcacgcccggccgcgccataggaagcgatatgcacgccacgatcacgcaacgatcccaataccgtgggaccggtccagccaaccgaggcatgcgccgccacgcctacaggcttatcgactacgacgacatcatcatcttcgtagacaacagccatatcagttgcgataggctcaggcccggcctgttcctccgccaaatcaaattcgacggtctcccccgcctgcaacgtgctggaccgcgcaacttcacgccctaaaacgcgcgcctgtccggagtcaaccagatcggcggctttagatcgtgaaatacccagcattttggccacggctacgtcgaaacgcttacccaccaatgcatcgggagcagggaccattcgactcattacttggcgtccgcctccggctcagactgtagggattcgtcggattgctcgataagatccttgtgggagaacggctcccccataagaatcagaatcaccaggaccacaccggcgactaccagatagatatccgccacattgccaacggaccagccatagttaaggaaatccaccactttgccgttgaggaagccgtcagcgtacataacacggtcaatcaggttgcccagagcgcctgcaaacgcgaaagaaagcgccaccgaccatttcatggagatagtgcgcaccccagccacagcaagggccacgcaagccacaacggccaacagactgattacccaagtagcgcctgaccccatgcccaaggacgcgcccggattacgcaccaaggtgaaggacagcagtccgggaatcacgcgaatggtctgaccgttggataacgcggccatcgcccaagccttggtgagctgatcgacaatcagcgcagccgcggccacacatgcaaagacggccacgcgagtgcgcagccgtccctgttggttcgtcatacgacctgtacctgcctgcgctcagttggtcttggacgaggtctggtcgacgtagttgttcgactcggaaacctgcgatgccagctggccgaggtactcggtgaggcgggcgcggtattcagtctcgaactgcttgaggctctggatgttgccctcgacgaccttggactgagcctgaaggttgtcgcgcacctgctcggcatacgtatcggctgcagagcgggtgttcttgtcgtacgcatcagctgcggaacgagtgttcttgtcatactcggcggcacgctgctgcacttccttctcgtagttgtcagcgtcatcgtgctgagacttggagtagttgtccgcatcctgacgagtcttgacggagtatgcgtcggcctcagaacgggtgttctgggagtaggtctcggcatccgcgtgaatctggtcacggtaagcgtcggcctcggagcgggtacgatccgaataggtgtcggcgtcggaacgagtacgagtggagtagtcgtcggcctcggagcgggtacgctcggagtagttgttggccttggtgaccaaatcgttgtacttgttctggctggcctcggtgatttccttggccttgttcttgcccttctccacgtactgatcgtgcagctgcatagccagggtcagcatggcggtggcgcgctcgggctcggtgcccggcatggaagcgacgccagcgatcttctgcagagaaccggtctcagtgctcggctcgaccttggaaacctgggcacgaagctggttttcacgctgcttggcttcttcgagctgacgagacagttcagcgatctgagcggactgctgctgagcggcggaaccctcctgctgagcagcggcgagctgacgggacagctcctcgttggccgcgcggaactgatcacgttcctgctgaatggcggcgatctgctggccgacggcttcctggttaccggaggcctgagcggcctgggcggtgagctgatcgatttgagcgttcagctgatcgacctgacccttgagctgctcattctgggaggacagcgcgcggttggattcctcggcttcgctgagcttggcagaggcaagctgtgccgcctgatcattgccagcctgagcggcctgctgggcctgagccacagcgttcttcaaaccagcattctccgactggagttgctgcacctgaccggtaagatcggagatcttcgcattaaggttggtcacgtcagggcccagagactgagtggcctgaccgccggcgaccgcctgacgtccaagagcctcgacggtttccgtgacctgatcaaggaagtcatcgacctcgtcgacatcataaccttccttgaatcgaacagtctggaaggtatgctccctaatatccttcggcgtcaacagagccataaatcttgcacctcgctttggggcattgcccgcacttacgttggtctcaagtcagaatgctatcacgaccccatcgtttcagaacattcaacgtgggtttttatgccagatatatgcctccggcgggtcaaaaacggcctcagaacactatcagaacaacactttctagtaccaccaacgcaaaatacagcacgatgaagctgacatcaagataaatcgagccgagcggcaatggacgaatatagcgacgtagccagcgcagagggggttcggtaatggaatacacaatgttgatcagctgggccaccacaccacgtggataccagtttcgtgcgagaacggagacccagtccagaatcatgcgcacgaacagaaccgtgatatacgcgttgatgagccatgcaagaatgcggccgatcagagagaacactaaggaaagcatgctgacagactaacaaccgcgcatgaaaagtttgctcggagcgcaataagaatcggccgactccttgctgggagtcggccgaataccgatataacgtcgaatgcgaaaactactgaaccggtcagtcagcgaacaaatcgtgggacgaggttggttttgtcggctcttcgaccttgatgttcacctgcgccgggctcaacaggaacacgcgcggagtgacacgctcgagggaaccacgcacgccgaacaccacgccggcggagaagtccacaatgcgatatgccacggcttcggccacaccggtgagattcagtacgaccggaacaccgtcacgcaatgcgcgaccgaccagctgagcatcctcatatgacttcggatggatggtggtgattctgttcacacggccaccggggaacggcttggtagtcgacgatgcggcaggcgcggtggttgacgccagcggcgtgaccgtatggtcggaatcaaatgcggacttcgaagccggcttctgctcctcgtcctcctcgatgtagtcgtcctcatcgtccacaacgtcactcatgcccagataggacatcgcgtttttcatgaacccagccatggatcaatcctttcagcgcaggaaatcaggaatgtcgagatcgccggcgggatcgttcacggcgatgttcggatgcgaggtagtcggatcgtcaaagggcagggatgcggagtcaccgatagccggtgtgaatgccggttgggcagtggcagcgggctgtgcagccggtgccggtgctggagctggctgtgccacgggagtcgcaggatcggcggcggttggcacaaccggcgtcaccgtgctctgagtgtcgtcatcttgagcggcgacggggtcaaaaccagcagcaataacagtgacacgcacttcatcgccataagcatcgtccagagcaagaccccaaataatctgggcttcagggtgaatcgccttgcgcaccagttcggtggcagcagaggcctcctgcaacttcaggtcggtcggaccggcgatgttgatcagcgcaccgtgtgcgccttcgatgctttcctcaagcagcggagagctgatggcgatttcggcggcctgcgtggcacgatcctctccccgtgcggaaccgataccaaacagcgcagtaccagcaccacgaagaatggagttcacatcgttgaagtcgacgtgaatataggagttcatcgaaatcaggtcagtgatgccctgaacaccggcaagcagtgcggtatcagcggtcttgaaggcctcaatgatgccgatggaacggtcggaaagctcgagcaggcgatcgttcggaatgacgatcagcgcgtcgacttccttgcgcaggttgtcgatgccgtattcggcggaagcggaacgctgagggccttcgaagctgaacggacgagtaacaaccgcgatggtgagagcaccctgttgatgagccgcacgagcgacgatcgggctggcgccagtaccggtgccaccgccctcgccgcaggtgacgaacaccatgtcggcacccctaagcgcctcttcgatatccgactggtggtcctgggccgccttggctccacgctccgggtcggcaccagcaccgagaccacgactggacttatcggaaagggaaatcttgacatccgcatcagagcgcagaagatccttcgcatcggtatttaccgccacaaattcaacattctgtaatccctcggcaatcatgcgattgacggcattaccgccggcaccgccgacgccaacaaccttgatgttggtcttgtcgttgaactcattctgcgcgatctcgctcacgtttggctcctgtcacttcacggttacacccaagagtagcgcaaacaggctactcttggagggaaattcacgcgcagaatggcgcgtgttgcgtgtattttcagtattttctcagtaactggcgtccattgggtcgtcaccgaagagcgcctcacgctcttcgtgggtggtggtacgcgattccaaccagccatacggcaagtgcaccttcttggcgaaacgcacgcggccgcgcggtttgtcgaccacgcgtggcgggtattcgatggtcgggtcgagcttgccgatctcgcggtccacatcggccaggctctcgcattccataaaggccttgcgggtggacccacccaccgggaaccctttcagataccaggcgatgtgcttgcgcagatcgtggacggccatcatctcatcgccctcatagaactcggtaagcagctcggcatgacggtgaatcacccggcagacctcgcccagattcgggttgagccgttcgggattgccctcgaaggcgtttttgatgttggcgaacagccacggccggccctgacatccgcggccgatggccacgccgtcgcagccggtctcgcgcaccatttcgagcgcgtcctcggcgccccagatatcgccattgccgaataccggaatgttgaggtgttccttgagctcgccgatgcgggaccagtcggaatgaccgccatagtattcggcggtggtgcgggcatgcagggttacggccttgcagccctcctcctgcgcgatgtgtccggcttcgaggaaggtctcatggttatggtcgatgccaacgcggatcttcgaggtgacggggatgcccgccggctcgcatacggcgaccacgcgctggatgagctcggtgaagatgtcggttttccatggcagggccgagcctcccccgcgacgggtgaccttgggtaccgggcaaccgaagttcaggtccacatggtcggtcatgttgccgtcgaccacgattttcgccgcctgttcggtgatggacggattcacgccatacaactgcagcgaacgaattttttcgcttttggcgaaatggcagagacgcagggctttcgggttgcgcgccacgagggcccgcgcggtgatcatctcggccacgtaaagaccatcgggaccgtattcctcgcagatcacgcggaacggccagttggtcacgcccgccatcggcgaaagcaccaccggggtcggcacggtaatgttgccgagctgcacgggggcgatgtataccggagtctcgggccgtgccggcgcgtccgtacgcgggtcgagattgttggtctcgtgagtagcggtgatggtggtttcggtttcagattctgccatgtggttcctgttctgaaatagttttggctcccctctttgagggggagctgccgccgtaggcgactgaggggagtcgcctcagcaagagccccccctcagtccacttcgtagacagctcccctcatagaggggagcctctatacagacccgtctttagtacagaccgccggcttcctgaacgccggactcaggccaagcctcgccgcccatttccacgggcttcaggggcacgcgggtgcgcttctcgccgatgcgggcggccacgtaatcggccaccttgtcaagagcgacgcgctcctgggccatggtgtcacgctcacggatggtcacggcgtggtcctcgagggtgtcgaagtccacggtgatgcacagcggggtgccgatctcgtcctgacgacggtaacgacgaccgatggcaccggactcgtcgtagtcgatcatccattcgttgaagcgcaggtcgtcggccaggttctgggccacggtctgcagttcaggcttcttgctcagcggcagcacggcggccttgaccggggccagacgcgggtcgagacgcagcacggtgcgcttgtcgacgccgcccttggtgttcggggcctcgtccacatcgtaggcgtccacgaggaagcacatcagggaacgggtcagaccggcggccggttcgatgacgtacggcacgtacttctcgccggtggcctggttgaagtagctcaggtcttcgccggagtgcttggagtgcgcgctcaaatcgtaatcggtaaggttggcgatgccttcgagctcgccccagtcggaaccttggaagccgaacttgtattcgatgtccacggtgcgcttggagtagtgggagagcttctccttcgggtgctcgtagtggcgcaggttctctggcttgacgccgaggtcgatgtaccagcgggtgcgggcgtcgatccagtactggtgccattcctcatcggtgccgggcttgacgaagaactccatctccatctgctcgaactcacgggtgcggaagatgaagttgcccggggtgatctcgttacggaaggacttacccatgttggcgatgccgaacggcggcttggaacgggaggaggtcatcacgttcttgaagtcgacgaagatgccctgtgcagtctccggacgcaggtagtgcaggctgttctcgtcctcgaccgggccgaggtgggtgcgcagcatcatgttgaagtcgcgcggttcggtccactggccacgggtgccgcagttcgggcagacgatgtccttcatgccgttttccggcatcttgtcgccgtgcttctcggcgtaggattcctcgagcttgtcggcgcggttgcgcttgtggcagttgaggcactcgacgagcggatcgttgaacacgctcacgtggccggacgccacccacacttcgggcggcagaatgatggaggtgtcgacaccgacgacatcaggacgggtgacgaccatggagcgccaccattcacgcttgatattgtccttgagagcgacgccgagggggccgtaatcccaagcggaacgggtgccgccgtaaatttcgccggcggggaacacgaagccgcgacgcttcgcaagggatacgacttcatcgagtttggactgagccacaatgcaccttctggtttgaacggtttggggtctaataacaaccgcttcaggatagccgtatacggtgacaggtcaggcggcattgtccggtatatgttccgcgtctcacgagcggccgttcgcagcgattcctatatcgcaaacacctccatattgttcctgttgttttgcccttccccaatttgtaccactgacatcgcgttagcgtcacaaattcgggagatgttgctcggcggaggcgtccacatatcacgaatggacgggacgcgccagacctgacgacacgtatcgaacaaatccgtcacgataatgtccatgttggcgcatagcgtcggcactgtaatgcaggggaactcgcatgtggttcgcgagttgagaaaggcctgagcctgacccttagaacctgttggttaagaccatcgtagggagcagtaaatgagcaatagtgcatcatcgtttgccgatgtgtccagcggttgtaccgccgggactccggttccagccgattcacccatccgcgacaatatcgccgatgccgttcgccgcgtacgcgagacgactccattggcccagtcattcaccaattttgtgaccatcaatttggtcgccaacgcgcaactggcggccggcggcactgcggccatgagtttcctgccggacgacgtgatcgaaaccgcgaaaatcgcgggcgcgaactacatcaacgtgggcacgctgctgccgttctataaggatgcgctgcccgaaatcgcccagcgactcaactacttggacaagccgtgggtgctcgacccggtggccgccggcatcggccacacccgcaccgccattcttcagaccttcaaggccgctcccccgaccatgattcgcgcgaacgcctccgaggtaatcgcgctggcgaacatgtgggggctcaataccgaaaccgtgggggacgcttccgagcaccgccccgccggagtggaatccgtcgacgacgtggagtccgcaaccggtgcggcggtggcgctggcacagtatctgaccgaacagcacgccaagcattcctcccatgacgcttccacccgctgtgcagtggctgtgtccggcatcgccgatctggtgaccgacggcgaaaccgtgtaccgactgccgggcggcagcgcgatgatgaccaagatcatcggtgcaggctgctcgctgggcggcgtggctgccacatatctggcggtttccgatccgttgaccgccgctctgtccgcatctctgctgtacaaccgcgcggcagagatagccgatacgacttcgcacgggccgggctcgttccaggttgcgttccttgacgcgctgtggaatgtgaccgccgaacaggtggcggaatccgagattttggtgcagtagtttcagttccctctgatgagggagctcataacagtttttcccaataagacttccacaagaaacaacaaaggtaggaataataatgagtaatgaatacccatacgcctccatgcgagacaacttcgacttgtccgcgtacttcgtggtggggccggaggactgcaaaggccgtccgctgaccgacgtggtggatcaggctctgcgcggcggcgcaaccttcatccaactgcgcgccaaggaggccgatgcctctgagctgaccgacatggcccgcgacatcgcgcagatcatcgaggacaatgagaagtccgattccgtggcctttgtgatcgacgaccgtgccgacgtggtgtggcaggcccgccgcaagggcatcaaggtggacggtgtgcatatcggccagaccgacatggagccgcgagaagcccgcgccctgctcggcgacgaggccatcgtgggtctgtcggctgagaccgaaagcctcgttcagctcattaacgagctgcccgacggctgcatcgactacattggcgccggccctctgcacgtctccaccaccaagcccgaggcttccgtgggcggcaacgacggctccggcaagacactggacgccgcccagatcaacaccatctgcgctgccagcgaattcccggtggtcgtgggcggcggcgtgaccgcagccgatatggccatgctcgccggcaccaaggccgccggctggttcgcggtctccgccatcgcgggtgccgagaacccggaagaggccgcgcgcaccatggtcgaaggctggaaggccgtccgcggcaacaagaagcacggctacgcgccgcgcgtcgtagcccacacccccgctgctgatactcaggctgctcaggaaggggccgcaaagcctggctccgaggccactgagaagaagttcaccaacgccaaggacgccaaggatgcccagaagctcgccaagcagcagcgcgtggacatcgccgcccgtggttccaagcagcgcgacaaggcgcacatccgcaagaccaagtccgtaccgttcacctatcagtatggttcctacgacctggaagtgccgtacaccgaaatcaagctgagcgacacgcccggcgtgggcccgaacccgccgttccacgactacaacaccgaaggccccaagtgcgacccgaaggaaggcttgaagcccctgcgtctcgactggatccgcgaccgcggcgacatcgaagactacgagggccgccgccgcaaccttgaggatgatggtaagcgcgccatcaagcgcggccgcgccaccaaggaatggcgtggacgcaagcatgaaccgatgcgcgccaaggaccacccgatcacccagatgtggtacgcccgccacggcatcatcaccccggagatgcagtacgtggccacccgagagaactgtgatgtggagctcgtgcgctccgagctggccgccggccgcgcggtgatgccctgcaacatcaaccaccccgaggccgagccgatgattatcggatccgccttcctgaccaagctcaacgccaacatgggcaactcggccgtcacctcctccatcgacgaggaagtggagaagctgacgtgggccaccaagtggggcgccgataccgtgatggacctgtccaccggtaacgacatccacaccacccgtgagtggattcttcgcaactcccccgtgccgatcggcaccgtgccgatgtaccaggccctcgaaaaggtcgaggatgatgcctccaagctgagctgggagctgttccgcgacaccgtgatcgaacagtgcgagcagggtgtggattacatgaccatccacgccggtgtgctgctgcgttacgtgccgctgaccgccaaccgcgtgaccggcatcgtctcccgcggtggctccatcatggccgactggtgcctgcgccaccaccaggagagcttcctgtacacgcacttcgacgagctgtgcgacatcttcgccaagtacgacgtggcgttctctctgggcgatggtctgcgccccggctccctggccgacgcgaacgacgccgcgcagctttccgagctcatgactctgggcgagctgaccgagcgcgcctgggccaaggacgtgcaggtgatgatcgagggcccgggccacgtgccgttcgacaccgtgcgcatgaacatcgagctggagaaggccgtgtgccacaacgcgccgttctacaccctgggaccgctgaccaccgataccgctccgggctacgaccacatcacctccgccatcggtgctaccgaaatcggccgttacggcaccgccatgctgtgctacgtgaccccgaaggaacacctcggcctgccgaacaaggatgatgtgaagcagggcgtgatcgcctacaagatcgcctgccacgccgcagacatcgccaagcaccacccgcacgcgatggatcgtgacaat

SEQ ID NO: 534 - DNA, 5798 bp, Unknown
  R48_24m  MAG No. k141_60740
aacggtcatccggatttctcaatttctcccgggatcagcctcttccaccgagttttccagaccacaatctgaaaactcgtgatttgagcctgctgaatcgagattttgagttcttcccaaactgactgccgcaaactgaccgcactcatcgtcctgtcagcgcagccggtttgcggaatggaagacgtgtgcggagagcagcgcgcagcggtgcatagtccccatggttggtggccgtccgcggctactccagcggtgtgcgatcccactggtcggcgcgtggaatggtgcgcaggctgcgcgaactgacgattagcagcatactgacgagcatcaccgcccagaacaccagcatagtcccgctgaatccgaaagcgggcaacagacttccggccgtcgctgagcagaacgcggacagtgcctgggccggtacggtaagcgtcacggtgatacgcccctgcatcgtgtcgggcgtcttaccgaaaatgaacccgagctgcaacgcgttgatgatcgggaacggcaggcacatcacggcgttggcgataagcagcacccagtagttgtcggtcagcagcatcggcagcgaagcgatgcagatgaacacgaatccgcagcatgtcaccggcccgaccggtgcggtatcgctgatccgtccggcgatgaacgcacccgccagcatcgcgaggaatacgcccgtattcacgaatccgatgagcgtcgcgttcacgccggtgcgcatcagatgcagctgaatcgcatactggaagccattgaccccgaaattcgccagcgcggacgacaccatcgtcaacaccagcatcctgcggtgcagcgaccacgaccatccttcggcgaaatcacggaaaaatgacgcgccgcccgctttcccaccgtcatcgtcgctatcgccgttgccgctatcgctgccgttccgcggatttccgccgactcggatacgtgtcgcagccacgcctgccagcaggtacatgaccgcagccgacaggaacggcaaccacggggcgatgccgtacagcaggccgccgactgggctgccggccatgttgatggtcgcgtcacggccttcgttgagactgcgcgctttcggatatgagcgaatatcgacgatggatttgagcatcgcatccgaggcggggccgagaaacccgttgaccgcagactcgaacaccgcgatggcaagcagcacggggaagaccagcttgccggccatgagcagcgcagcgactgacccccaacagatgacgcccgctgtcgcgttcacgatgatcagtgtcttgcgatcgtgacggtcggcgaatgtcccgccgaacacggcggccgcctgctgtgcgatcgcggccagcgagcccaaccaacccgctgctgtggtcgatccggtgagcttgtatccgatcagagagaccgccagataccgcagggccacgccgatggccgtcgcgctgtccgccgtgaaccatggcacgtaacctgggatatcccacaacctgctttcgcgcacaggagcagaaacgagctttaacgaattactcatctaataatttatccttaccctaccagtactggaatcctacagaagattaggcggcactggttctttacaaacttgctcagtatgccaagcataatcatatatatatcgaagtaacccttttctccataatgagcaggacagcaatgacatcgataatcttcaacctgttccgctaccaacgatcccaatgttgaacataatcgatagctaagcttaccggactcatggtgcagcaatagcttgcctttgattgccaagtgtgaagaaatatagtcatatttattgttcggataatagaattcaggcaaacttaccgaattaccaaaatagcctggattaacaatgaacgctatatctttcttatcacatgagtagttaatcatccttgcgacttcggtggtgcttggaacgtctgccgcttgaattactaagttgattttctctcggtcaattaattcatcaagttcactatgacaagttatcattttatcaatgctatctatagaaagacatcttgacgccctggatttcagcacatcaacctttttcttcccaatgtctgttcgcacgtaatcctgacggtaaatgttgtctacagtgacaacatcatgatcgaccaaagtaatatgttccaaagcaagcattgaaatgtgccgataaatatgacttccaatagacccgcatccgagcagcaggcatctaatttgtcgcggctcagcgtgttcgacacgcaatacgtccaaactgacaagtttgtcaatagccgctggggccggtaacgttttgttggactcgtggcataatcaaaccatagaaacaaagaaatccaataaagcgacaccgtatccaagtgcccacctctatttgacggaatgcaccatattccggcaccgacgaacatcaggatcgagccccatcaccaatcggcaccaagccgcccatatcccatgattagctaaagatatctctgaatcacagcgttcagaaaggaggcgccatggaaaagccactgcttctgctggccttggtgccgctggccgtcggattggtcctgatatccgtcgtgatcggatccaaaaaccgggaagagaacgcaaaaggactcttttgcgttctcttctcagcgctcatggtcgttgccggcgcgttggccatcgcgagacaactcgtatgacgcttcacgctgcggctcggcttcccggctatcggtcgaagccagtccacgggccctctgtgccattccccgcaatcaaacagcaacgcccggtctcaagcccatgagacacttggaaccatgactaccatcatcatgcgcacctcgcatgataatcctagccaactgtttttggctttgttccaaggctttcgatttttgggaaacctaccgattaccctcgtttctccacgaggcacccacaggcacccaagaataatctcaactgattcccaccccaccggtcggccaccatcagccggaacgctcgtatctcgcggcgttggcgatctcgttcgcctgaagcgtcgggcatcgcgttgacgatccgctcgaccttctcgcgcaccatggcgtcgagcttgctctcgaacatggcctggtcgaactgtatgatttccttggacatggctccatgcctctttccaatcgcggtttttcattgtctggcgactgaaaatcgtacccggtacggcccatgtccttttccatcaaggccggaatccaaaaatgcgcaagaattcggtcgttatccccttagagactaaaggaattctattagttcagcaaattcgtatatcaatttattttttagcatgtcggacaatacagtaaatcaaccactctatggctaagataccaaggtagaaaagcgcccatacggaaaaactaatcagctttactcctagtgtctgtacagttccatgcccgtccactgttcttatgaaaaggaatacactaatgcataagaacaatatgaattgaatgatttggaaaattctccaacctttgttttccacaatcaccctcctgtaaccccaatctctatatgctgattccaccattataagccgcccttggtgaaatgtcaggcgccccgttgtctaattgaaagtgcaacacccgttggattggagattgtccggataaccagtccgaagggatgttgcacctatgggagaagtatattcgcacctgtcggaagaggaacgccaggtcatccggatcgagatcggcaacggcaccagcatccgcaggatcggtctgatgctcggccgcaacgcctcgacggtcggcagggagatcgaacgcgacacgtggttcccgtccaacgagaacgagtcctgacggccgtaccggccgaaacggctgaagacgggcccgtggacgggcggatactacatcgccggccccgccgcggcgcaaggccgaccgcaggcgcgccgaaccgcgcaagcgctaccgcctgtcatgcgaacgcctgtgggcgcgggtggccgaatggctgggtcgcggctggtcgccgctgcccgtcagcggcaggctgcgcgtcctgttccccgacgactccgccatgcgcgtgtgcccgcagaccgtctgccgttggatctacgccgaccgccatcgccgtgaacgccgggcgcgctgccttccacgcggccacaggaggcgtcgcaggcgtggcggcaggaggacgtcgcgtttcccgattcccggacgggttcccatctccgagcgtccgccggaggccggcgaccgcagcggtttcggccattgggaggccgacggcgtgatcggcgccggatgcaacctgcacaccgaggtcgagaggaagaccaggttcctcatggccgggatcgtgcccggcaagaccgccggggaaagcgtcggggcgcagctggcgatgttctcgccgctgccggccggcgcgcgcggcggcgtcacgcacgacaacggcaccgagttcgcccgccacacgcgcctgcgcgacgagccgggcatggacacgtacttcgccgacccgtgctccagctggcagcggggaagcaacgagaacaggaacggcatcatccgccggtatctgcccaaacgcagcgagatccggatggacatggccggggaactgcgggagattgtcgacgaggccgacaaccgtcccatgcgcgtgctggactaccggacacccgccgaggcattcgccgacgaactgctagaattgcaggaccaacaggggtgttgcacctctaaatagacatcgggcgcttactgtggcgagaactggatctacagggccaacgtgacacaaattatcgaagaacacggcatctcagtcacggtccaacggcagaatgccggaaccgctcgccgcatcgttacccaatgcattggtctcaatcttggtggtcggctaccccatgcccctaatcacaacccgcattcctgcaatcaggcatcaccaccctgccggcgctcagcgtcttcgccgaccggcacggaaaagcgcaataccccctgtggtttcatgatgttccgcatgggtggtgcccagaagcattcacccggcagcatgtctccatggcggacaatagacagaacgatacgcagcccgtgcaaccgtcccagccgccaatggcatccaaatccatcccgaatcccacaggcccattgcagacagcccagatcagctggctcatggtccaaagccgcctgcgacgccaccgtcccaatagcaggaacggtcagctgcgcagtatgatttccgccctgtcggccagttcccgttcgcgcacacccatggcagacaggatcgcttggctccgcgatggcatggtggaggtcacccgtgcgaccaatgcggagaagcgaccgaacaattccaagtaatcgtccttgtcaagcaaataaccaagatcaccgatggcctgatacacgttctcgttagcgcgcccatcgtaccgggcacaatagcagcgctcgtcatgcgcgcacaggttgcggtagaacaccagtctgttgaagatgctgtccagccgcttgatggtgatgcgccgtggcctgtcgtgcgtgtccgcatacaaaccggtgaaactttcggcgaccgccaatcggacggccggggactggacttggaagaaccataccgtctggccgaaggaaagatcgttggccagcacccacaacgggacctggccgttgtggtcttccatgcaatggcggatatacgccttgccgccatagtcgcccctgttgcgc

SEQ ID NO: 535 - DNA, 28838 bp, Unknown
  R48_24m  MAG No. k141_60922
atcctgcgcatccggatcccagatatggaagtgggaatcgattacgttgagtgtcatgtcaggcctccttcagaccgatcttggaaccccagaatgcgtaccatgccacgaacaggaagcccgggaccatcaccaggatggcgatctcgatgcctgccgcatcctgaatcacaccgagcagcagcggaatcaacgcggcgcccacaatgctcatcaccaaagccgaggaaccggtcttcgccgcggaacccttgatacctttcagcgtcagggagaatatggtcgggtatccgatggaaatgaacagatacgccaccatgaacgcgatgacggagaccttgcccaggccaaggaataccacgaacatcagcacggctgaaatggtcatgtatacgccaagaatcttcgagggatcgaatttggccatcaatggggtggtggcgaagcgtccgatggtgaacagcagggaaagcacggaaagcatcatcgccgcggtgccggctgtgatgcccgcgccccagtgcttgagcgcgtaggcggagaagaccgccatgccggccacttgcaggccgatgaaaatgaactcggcaagcacgcccaatgcgaagtgcgggcgcttgagcaggccgaagaaggagctgttctcggaggaggcgccgcccgcggcctcctcttcgtctcccggaggcgtgggcagcttgaacagcgcgaacacggcgagcaccacgaccagcacaacgccgatcacaatgtatatcgtgcgggtatcattcaggaactgcgccttagcggcgtcgaagccggactcgcctgatgcgacggtggtgccgagaatctggccaagaatcagcgggccaacgatgttgccgacgccgttgaaactctgcgccatgttgatacggaacgattcgcccttttcatcacccagcttggtgatatacggattgcagttggtctccagcgatgccgcgccgagcgcgataacgaacatggcgaacaggaacaggccgtagctggccatgctggtggcaggaatcaccatgaacgcgcccagagcgaacaggagcagaccggagatgacgccgcccttataaccgaaacgcttggcgatcaagccggccggaatggccatgacgaagtatgcgccgtaataggccacctgcagtaatgacgcttcggcgctgctgagttctatgtagtttgcgaacggcgagttcaacgcgttcacgaggttcatggtcaaaccccagataaagaacagtgaggtcaccagcacaatggcgatggtcgccttggaaccggttgtgtttttggatgtcatcattgactccttagtgatacgagtttccccgatattgcctagcgagaagtggaccaccctgggccatgttggtaaacggatgacccagggcgcgggtgatacgggcggcatacgcggatacggcgtacggatggagcaatgatcaaagctccggaattgccgcgcgaatattcgggaaagggctgcttgtcagctcagcgcacggtcaaggtggacatagccgccatcgacgtacacccactgaccggtggtgtggctggagcggtcggagagcaggaatgccgcttcattaccgatctcttcggtggtggtcatacgatgttccagcggaatcttgtcggtgatcaccgacaggcgcgcctgctgggccgcttcatcgccaaaggtcttgatccaatcggcatagagcggggtccagcactcggagacgactatggcgttgacacgcacgctatcgtgcaccaatgcggcggcccattcacgggtcaggcccaggatcgcgcccttggcggccgcataggcgctggtcttgccttggccggtaagcgcggtcttggacgagatgttcacgatggatccgcggctttccttgagatacggcacggccgcgtggaccagctcgtaatagtgagtcaggttgccgtgaagcgattcctcgaactcacgccaagtagtggtctcgagatccttgttgtcgttctttccggcgttattcacaatgccatcgatatggccgtacttcttgtatgttgcttcgacgacgccggcgatcttgtcggtgtcgttgaggtcaagcaagtgcacatcataggtggtggtgtactgctcgatatccttcttgaactcgtcgagagcgctgtcgggtcgattaatcaccaccgggatggccccctcctgggccagttgcagcgtgatgcctttgccgatgcctttgaaaccgccggtgatgatgatgactttgccttcgagatgcagatccatgggaactccttcgtccatccttattctgcgtttcatgggtgttccatgtcacgcccggccggggcttcggcaccccagccggagtggttgtgtgttgttgtgttgagttgtgttgttcagttatgaattttcagttgcggtcagccgcgatacaggtacttctcggccgtctccagcgtcatttcggtaccgttgcccggagcggtcggagcgacgtagttgccgtccttgatctcggtcgggtggacgaaatgttcatgctggttatcgacgtattcgatcatgcggccgtccatcgtgccggacacggccacgtaatcgaacatcgcgaagtggcatacggcctcgcacaggcccacgccgccggcgtgcgggcagacgggcttgttgaacttcttcgcgagcaggtattcgagcacgatctcctgcggaccggccacgcgggtggcgtcgatctgcatgatgccgaaggcgttcgcctgcagatactgcttgtacaggatgcggctctgcatctgctcgccggtggccaccttgatgggattgatggcgcgcgcaatcgtggcgtggccaatcacgtcatccgggctggtcggctcctcgacccacgccagatcgaagtcgtggaacttgttgatccagtcgatggcggtgggaacatcccacacctggttggcgtccacggcaagacgcacgtcggggccgatggcctcacgggccttggccaggcggcgcagatcgtcgtcgatgttctggccgaccttgagcttgatctgcttgaagcccttgacctgggtctcctccttggcgagggccaccatcttctcatccgagtagccgagccaaccgggagcggttgaatagccggggtaaccgacctccagcagatgcttgatacgctcggccttgcccttctgaccctctttgagaatcgcaacggcttcctcagggcgcagggcgtcggtcatgtagcggaaatcgagcgtggagaccagctcctccggctccatctcgcccagcagcagccacaacggcttgcccgcacgcttggccttgatatcccacaacgcggagagcaccgcgccgatggccatatgctccacgcccttttcagggccaagccaacgcagctgggaatcatgcacgaacaggtcccatgcaatgcgcatgttgtcgagcagttcctcggtgttgcgcccaatcagcacctgcgacatcgattcgatggccttgcaaaccacgtcgttgccacggccgatggtgaacacgaatcccacacccgtgatgccgtcgtcggcgctggtggaaatctccacgtacgcagaggaataatccggatcggggttcattgcatccgagccggaaagcgtcgttgaagtggggaatcggaagtcatacgtcttgactttggtgatggtactcatgtgttcgggctccttcgcctggtgtgaaccaacggctatatcgtacgtccgaataaagaaatttgcaagcctatttgcgaaaatttttattcaaggccggacaaagggcaagaaaacacggaattgttacggcacaatgcgtcataatggtgggaacaacgacgaaatcgtctcagtaattgaacggcgaatatccaagagggaaacaccgatggttaacgatacatccacccacaagctcaaggtcggcgagctcgcaaaaatcgccggcgtatccgcatccactgtttccaaagtcatcaatggcaggtcaggcatttccgacgagacgcggagacaagtcgagcaaatcctcaaagatcacggttactcaaggcctctggtcaacaccaaactctcccccaccatagagctcgtcgtcgaatacattgagcacaacggcacgatggaactcatcaaatacgcctcatactgggcgcagcaggcgggcctcgccatcacggtcacccagaccaaccatggcgatgccacggaagactgtttccgcggcatcatcgatagaaatccccaaggtgtgattatgcagcagatgggcggtctgaccactcaagcgaagtctttgttgaaatcgcgcagtattcccgtggtcatcatcgacccaatcgataccgtcgattcggatgtgatgagcgtgtccatcgataactggaccgcaggataccaggccggcaaacacctgctgtcgctcggccatcgacgcatcgccgttatccgggggccggcgaacctacagaccagcatcgcgcgctatagcggattcaccgccgctctgcaacaggccggggtggatctgccggagtcctatatcgaacagggcgactacttccccgccgaaacaagctatgaagcagcctgccggctgctggaactcaccgaccgacccaccgcgattttttgctgcaacgacttatctgcagtaagcacgtatcgtgccgcacgagagcataagatcgcgttgccaaagcaattgtccgtcatggggttcgacgacattttccccgccggccaactcatgccctccctgaccagcgtgcatcagccgttcagcgaaatagcccaacgcgccgtgcagatgatcatcgacagccgcaagggcaatcagggtgatatgcacgtcatcctccccaccagtgtcgtcacccgggaaagtaccgtaccgcctcagtcatcggcccgataatcggccagattcaagctggcggccacccgattggacgcgaacgcacccaccgaaaccagcgcatagcacagcacaagcccgccgccgaagctggccagcgtggccggttcggtcatcgaagcggcgaacagcggtgccataagcagcatggaacacccaccggccacaagcaccacgacgttgagcggagtcaacacctcgatgaatcgcgcgtgattgagcgtcttgacatcagtgccttccagcaccagcatgcggtattcgccggcttgatcgtagacgctgccagcctgcatcacgccggagctgaccgcggcgagtacagcggcgaacacgagcgtcagaatgccgccggtgccgatgtcgcgaatgaacacggtgaacgggtcgttggcgtcaccgaccacggcggccgatccgaagaatccgcagatcgaggtgatgccggcgatgaacacggccagtgcaatgccggacacattgcgccacgcgcgcttcggattgtcgagaatacggcgcatggcaatcatcgtggccgcgtccttgggatgcttggccttcgccttggcacgagccgtgaccacccatgagcccgcgaggttcaccaacgcgaagcacagcagtatgaatccaagaatcacggcgtacatcaccgcttgtccggcctgcgccagcacggccgggttcttgaatacgaacatggccaccaccatgaccaccgtgaacagcaccacgcgagcgcccgaaggcaaagccgcggcggctcgggacgtgactcccagcggagtgatcaccacacggcgcaaagtgactagcgatgaaatcagcgccagcacggccacgccagcaagcgtgacgataagagccaacgcccccacccacaactgttcaaaggtaaagcgttgctcttggaacggaatcagcatgaccgccggcatcagcgcgcagtaaccggcgatgccaataagcgcgccgatcaccgcttgtcccgcagcatcgagcgcggtcagacgaacgacctgaccggtggtcgcgccggcgagacgcagcgcggcaagacgcgcatcgcgacgggatgcagccaatcgagcggccgatccggcgagcgccacgaatggcacgacaagcaacatgcaggcgaataccgccaatgccacataagcaccgtagaattgggccagattcgtcggatcactggcctgctgtttccaagcagccaccgtgccgggctggcaagcatcaagattaaacagacaggtgacggtatggtcggccgaggcacgccagataaagccgtgcactccacccagcacggtgaggaagatggcagtggctgcggcgaaagcgacgattgccagtatcgaggtatggccggtactaccacgcgaacccgggcggtggaacagcctccaaagggcgaaggtgttcatcgcttgcctcccgcgttgatgtcgtgaccgacggctgcagcagcgttggcgtcggcatccggctgatgcagcctaccgtcctgcatcattacggttcggccacagaagccagcgacgttgggatcgtgcgttacgaccactacggcagcgccgttatcacgcgctgcggccatcaggatgcccatcacctcacgtccggtggtctgatcgagggcaccggtcggttcgtcggcgaagaccacggcaggtttcacggcgagcgcacgggcgatggcgatgcgctgcatctgaccgccgctcatctcccccggccggttattggcgagggcacgcaagcccatgcgttccagccagagaatcgcggtgtcggtggcggtgcggtatggcatgccgtcgagcatcatcggcagtgcgatattttcgactgccggcaattcgggaagcagctggccggattggaagacaaaaccgaaagcgttgcggcgcagcttggtgcggccggcatcgctcatggcatccagattcgagccacggaaggtcactgtgccggcggtcggcttgatgatgccggcgagcgcgtgcagcagcgtggacttgccggagccagacgggcccatgacagcaaccgtctcaccctcacccaatgcgaagctcacgtggttcagggcaagtgtgtgcatggttggcatggcaaaaccgggctgaccattggcagcgggaaccgcagcacctgttccggccggcatcacaccggtaacgccatgaccagcctgcgcacgggccatactggcggtgtagtccatgatcaagtcatgtgcctcgatcaccggagaccactgctgccgtgcgtcctgttgttgcactgcttccggtgcggtctgagtctgctgagattgctgtgttgctgtattcatactcccgagagtacggatcgagcagaagcctgaccatcaggctgcggtatgaaccttttcaactgccccacccacctctcatccgcaaggattagagattcgcagtcgatgcgacaatacttttatcaatggcaatgtggataacttcggaagctggaaccacataggtcgattcggctggacatgcgaatcacgcgaacggtatgttcatggaatcagcgtgctgcgcgctcgcaaatcggacataccaagcaaaggagctcacgtggccatcgcattcgatatcccaaacatatcaatttcgtccgtacaaaagccgtacaataggggtatgactactgagaacaacaagaacagtcgttttgagatgaggctcactcaagaacaacgatccagaatcgatcaagcggccgagtccaaaggcctgacttcgtcgcaatgggcattgtcgaatctgctcgccgccgcagacagggatatccatgaagctcacatcattcgactgaacaatcaagcgtggaatgatttcaccgccgcattggacgaacccatgggaccacgtctgactgaattgttggaaagcgatccgatatggacgtgatcaacttcaccaagccccgacgcctgactgcaaacgacaacatctccggtttcgattgcggtctgccactggtcaatgattggctggcaagacatgccgccacggcgggtagacaaggcactgccgtggtctatgccaccttcaccaaggacatcaatggcgctgatatgctggctggattctacacactgagcgcatacagcattgaacactcgggggcttccggctggctgaaacgcaatagcccgaaccccatccccgcaatcttgctgggcatgatgggcgtggacatcagatttcagaccatgcacgtcggcagtcaactactccgagatgcggtacttcgttccatgaacgccgccgccatcattggagcgcgagcgctacttgtcgaaccagccaccaaccaagcagttgcattttacgaacgatatgactttcggcacatccccaagtcatccagaatgttcaccccactcaatatccgcaatcaccgatgatgcgcgatcggtaaccactattcagtgccggtcattatcggaatcgcattcaggcgtcgcagtcattcttgcacagcagccagctcgtccagacgggtggcgaagcggggccagtcggttttcatggcggtgaggagcttgcggttgggcacgtcgtcgatcggcacccagcagacctccatgctttcgtcgtcgttggccttgggctcaacggcgtggccggacttttcgaaggcgaatacggtggtgtaggcccatgggccgtgatcctcgcggtaggagccgaccacctcgatatcctcgggtgtgatattcgcctcctcatagctctcgcgcagcgcgccctcaatgggcgactcgccatccgccgtggcaccgccaggaatgccccatgtaccaccctcggcgctccatgcggcgcgatgttgcataaccacgtgggtcaccttgccgctcaccgaatcgcggcgagccagcaaaatgccagacgcaccgttggtgccccaatgcttgcgaccgcatgcgcaatccacccagccgtcgccaggctggtgcacattctccaccggcggcagaatgccggcgtgttggttgcccgaagccttgctttccggcgccagctcaccacggtctacgttccacaggtcagtccatttgacgcctaattcgccagccaaatgccgagccagcggcaggctgaggccgatgatgccgtgcggatcgccctcgatgctgtcaatgaacgcaccaccgaagccctcgagcgtgaacgaaccggcgacttccagcggctcgccagtggcgatgtaccgttcgatatcatcctcggcgaactcgccgaaatgcactttggcatgactcgcgccgcgcacagtacgtccggttgcaaaatcgataaggcagtggccggtccacagttcgccggtcgcgccgctcatacgcttcaatcgttcgcgggcaacggcctcgctgtgcggcttgccgtagcatactccgtccaagaggaacatcgaatcacaaccaagaatcagcggtccgaccgttgcctcggtgagtcccggctgattcgctatggcagtagcgataggttcggtgacggtcggcatatctacgccggagaaatcacgtgtggtggcgatttccgccttggaatagtcgatggattctccggcagcggccttgcgcaggtcttcgacggcggcttcacgctccgaatccctgacttccttggctttcagcgggtaggcgataacacggtcgccggtcgcggcggcagcggtatcagccacgtcacagtatgcgcgatgtacggcctcggctttggcggcggccagaatcatcacgcgctgcttgatgctcagatcttcgacggtgacgccttcttcacgggcggccgcttccagcgcagcaggctcatccacgtgcgagacgcgaattgtgggacagatacccgccgaatacagcacgtcacggcgaggcttggacttggaagcaagaattagcggaatggacatgacttaagtccttatgctcccgctggcgggagctgtcgaacgaagtgagactgagggtggtctctgccggtatggcggaccactctcagaccgcctgcggcggccagctcccgccagcgggagccttctcctcgacttagcgacgctcgatttcgacgccggcggtgttgatgggcaggtgaagcacacgccagtggccggaagcaagctgctccgatgcgatctggtcgatggcttcgcgggcgttgccgtaatgcagcacgagcacgcaggggccggcaccggagactgcggcggcatagcccttggagcggaagagcgcaatgagctcggtggacggcggcatcagggtaccgcgatacggctggtgcaacttgtcctgcgtggcggtgaacagtagcgcgttggactgggcctgagcggccgcaagctcgtcagcgaacggcgattcacgggttccgccagcgcaagcgcacgtatcggcatcctgagccggggcagcggcgacgccggacttgccctgctgggcggcctgggccagcaccatgggattcatcgcagcgggcagcagacccacgcgagacacgttgtagacggcgtccttgtatggcagttccctaggcagcgcctgacgggccttctcagtggacagctcatagtcgggcacgaacacggcggcggtgatggacgggtccaccgggtagttgacggcgtggaatccgccgtgcagcggttcaccaccaggaacggcgaccgagccgacgccttccgcggtttcgaagtcccaagagacggtcaggccaccgaacacagccggggccacattgtccgggtggccttcgatctgggcggccatatcgaagatggccggacggttgaggtcaccggtctgggcgaaggccgcggcggcggcgatgccggccacgatggcctcggcggaagagcccatgccacgagcctgagggatgttgttggtcgcttccagcgtgaagccgagtcggccgaggccgaacgtggcacaggcacggcggaaggtggagaccacgaggtgggtttcgtcgcgtgggagggtgtcggcaccctcgccgtggatgatcacgtgggcaatgccgtcgttcgggtcgtcgttgagcgtgaaagtgagctcgtcatggtagtcgagcgccagacccacggtatcgaagccggagccgaggttggcggacgtggcgggcacgcgcacgtgaacgctattgcagattgggttcatggttgttccttaaaaaggagctccccttgtcaggggagcttgggtattcagctttcaactcacgggcagccgttcgaccgcctcatcagagggagcctagacggtgtcagtccagcacgcgcaggatggacgggtcaccggtgacgaagtcgagcgcctgcacggccttgacggtgttgcgcagggtttcctcgtcggtcaggtgggtcacgatgcgcaactgctgaatctcgccgtcgtagccggggtcggtcatggtgggcttcagatcctggttcacaccgttgatggagacaccgttcttggcgaactcggcggcgatggcggccagcacgcccggcttgtcgtggatcaggaagcgcacggcgaatgcagccttggaggcggtaatcggagccttcggcagattcttgtacagcgggatggacgggccggtgcagccagcagcaatgtggcgggcttcggtcaccacgtcgcccacgacggcggaggcggtcggagcgccgccggcgccacggccgtagaacatgaggtcgtcggcggcctcggccttgacgaacacggcgttgaaggagccgtgcacggaggccagcgggtggttctcgtcgatcagggccgggtagacgcgggcggagacgccggcctcgccgttctcgaccacggcgagcagcttgatgaccttgtgctcggcggtggcggcggcgatgtcgtcggcggtgatcttggtgatgccttcgacggacacgtcgtcgatggtcacggaggtgtggaagccgagggtggccatgatggcggccttgttggcagcatcgtagccttcgatgtcgccggtcgggtcggcttcggcgtagcccttggcctgggcgtccttgagcacgtcgtcgaactggagacccttggtggtcatctcgtcgagaatgtagttggtggtgccgttgacgatgccgagcatgctggtcaccttgtcgccgaccagggactcgcgcagcgggcgcaggaacggaatcgcaccacctacagcggcctcgaagtagatgtcgacgcccttggcctcggcggcggagtagatctccgggccgtacttggccagcagcgccttgttggcggtgaccacggaagcaccggattcgatggcggcaagcacgaacttgcgggccacggtggtgccgccgatgagctcgatgacgatgtccgagttggtggccacgctcaaagtatcggtggtgacgatggactggtcgatccacgggaacttctcggtttccttcgggtcgaggcaggcgacgccggtcagttcgatcgggcggccgatacgagcggacagttcgtccttctgctcgacaatcaggcgggcggtctgggagccgacggtgccggcaccaagcaggcctacgcgaatcggggtttcgctgttgtgagccaattcagggtccttccaaaaagttttctatatcccacgcctattttacggattatttccgacagcagaccgaaagtactcatcaagctgacggcccttttcgtattatgacggttttggccgcacattacagactgtcaggcgctcacctctgcacgctgattactcgctgacgtcgaggttaagtaggtcgtctacggtctggcggcggagcatgacgtgcgcgccggcctcgctgacagcaaccaccgccgggatcagcgcctggttgtagttgctggccatggtgcggccgtatgcgccggtaaccggcacggcgagaatgtcgccgcgcttcaaatcggcgggcaactgcacctcgtgaaccacaatgtcgccggattcgcagtgcataccgcacacgcgggcgagcatcgtttcagcggaaccagtgcgattcgccagacgcgcggtgtagtcggcaccgtagagtgccggacgaatgttgtcggacatgccgccatccacggacacgtacacgcgctcggcaatcgaattgccggcactgtctttgacatcggacaagtgcacgtgcttgatggcgcccacgcggtacagggttacgccggcgggcgccacgatgtagcggccgggctcgaagctgatggccggggcgggcatgccgagcgcacggttggtgctgttgaccgcatccgccaagcgagtgagttccacgtcaatgtccattgaatcttcgccatcggtgtaggccacggagtagccgccgccgaggtcgatttcgggcaggatgtaggcgtcggtggcccacagggtcttgcgcagcagcatcatgcgcttggccgcgtgaatgaaggcgtccgcatcgtggatgttggagccgatgtgcgagtgggctccgaccagttcgagtacgtcctggttggcgaggatgatcttgagcacggcgatggacggaccgtccgcaatggcttccatcgcggcggcaagtaccttatccgtatcggagacttcctcatggctcaggtcgtacggatacttgacgtcataacgcagttcgcgtgccggtttgccgctcccgctggcgggagctatcggcgcagtcgactgagggtggtcattgccagcattaacgtccgactccgcaatacgcgcgttggtcgcggcaggtgtcacgtccgtcaggttgttcagcacgtcgagcactgcggcgtcggctccggccgccaacagcgggacgccgaacttctggtcctcgtgagcagtggagatgtactcgtggccgccggcgtggacaccgacggtgacgcgcagcatcacacgggcgcgtttgccgagcttgcgggcgatggcggcaacgcgctccggctcgtcgggctcgtcaatcacgattttggcgaagccctgttcgatggccagcgcgatttcctcatcggacttgttgttgccgtgcagtaccagacgacgtccgggaacgccagcggcgagggcgattttcatctcgcccatcgtgcaggtgtccacgaacatgccggcctcggtgaccaatcgcacgatttctttggacaggaacgccttgccggcaaagctcacgtgcgtagtggatgtgttgaatgcttcggcggcagcgcgcacgaagtgcctggcacgtgcgactacttcatcagtgtcgatgagatagagcggcgagccgaactcgtcaagcagcgattcggcggtacgaccgtggaatgtaatggcaccgtcggcattcacagccgtagcggccggccaaattggagaaatgggcataatcacatcttttcgggggcggtgacgccgaggaggtcgaggccgttggcgatgacctgctggacggcgtcattgagcttcaggcgggcggcggcacgggccggctccggattcttggcgatctccaaggccttgcgagcctcatcgtcgccacgggtttccggatcggtcagggccatcggcaccacgcgctctacgttgtaccacttgtgataggtggcggccagctcttcgagataacgggccaccttgtgcggctggcggtcgtcggccgcagtggcgagcacgctcgggaactgggcgagggcggcaagtacctcgccgtcggcctcggtgtcgagcagggccaggtcggcaccctcgtagctgatgccggcggcggctgcattgcggtccacgttcttggagcgggcgtgcgcgtactgcacgtagtacaccgggttgtcgttggtgtgcgaggcgagcagggccaggtcgatgtcgaagttctggttgtagtcggagcgggccagcgagtagcgggcggcgtccacgccgaccacggagaccagatcgtcgatggtcacgacgttgccggcgcgcttggacatgcgcacgggcttgccgtccttcatcacgttgaccagctggccgatgagaatctgcatgttcttgccgggctcgtcgccgaaggccgcgcacatggccatcatgcggccgatgtagccgtggtggtcggcgccaagcatgtagatggccacgtcagccgggttttcggcgcgatggcgcttgtcccagtagtaggcgatgtcggcggcgaagtaggcgaactcaccattggacttgatgatcacacggtccttgtcgtcgccgtgcttggtggattcaaaccaagtggcgccgtccttgtcgaagatgtcgccgcgggacttgagctcttcgatggcggcgtcgaccttgccgtcggcgtacaggctgttctcatggaaccagacgtcgaagttcacgcggaagtccttcatggacttctgaatctcatcgaacatcatcggcacagcgcgcttgcggaattcctcgcgcacttcggtgtcggcctcgccgagcggttcaccgtcgtcgttgaggccttgatcctggtgggccagtgcggtcaggtccacgccgtcggactcggcttcggcctgaacacgggcggcgatctcgttgatgtaggcacccttgtagccgtcgcacggggtttcggtctggtaaccggcctcgccgaggttgttggcctcagcccaagcggcgaccagcgacttggcgaagcggttgatctgctcgccgtggtcgttgaagtagtattcgcgcaccaccttggcgccgttggcttcgagcacgcgggccatggcatcgccgacggcagcccaacgagtgccgccgatgtgaatcggaccggtggggttggcggagacgaactcgagattcagggtctggccgcccagatgggcgttgcggccgtattcgttgaccttgttgagatgcttgtcggtgtcggtcacggcaccggcggcgagtacggtgtccaccacggcggcggccgaggcggagtcgagcgtgatgttgatgaagccggggcctgccacctcgaccttggcgatgccgtcggcttcggcgagcgcggcggcgaacggctcggccagatcgcgcggcttcatgccggccttcttggccagctgcatggcgatgttggaggcccagtcgccatgcgcgcggtccttcgggcgcatcacggcgagcttgtcgacgggcggaatcagctcgtcggtcaacgcgccggcctggccggcggcgacgaggttgtgggcaatgctggaaatcagttcacttaaggcttcagggctcattcttctaaggataccggcgatggcgacaccgtgccgcgtccggtcattgtcggcggccataatggaacgacgcgcgaaagaggtgcatatggccgggctcaacccccaatcattggtcacgttgtggcagatcgaacagtatggttcgttctccgccacggccaaggccacgggttggtcgcagccggccatcagccagcagatcaaaaagctggaggcacagtgcggttcgactctggtgcaacgcacctcgcatggtgtggaactcaccgccaccggttcgatgctcgcccgccacggcgaggccatcgccgatcggctggagcgggcggcccgtgaggtcgaggattatcggcatcatcggtttgctcacctgcatttggtggccccaccgtcaatctgctctactatcgcggcccgtaccgtggtcaagctcagtatgttcacggacatcgagctgagcctgattcagatggagccgccggaggcgatcggtctgatttcccaaggcaaggccgatgccgccgccgtgttccggtacagcagcatcccgaacttcctgcacatcggcgacgatctgaccttccagtcgctgggttacgatccgatgcgattgttggtccgccgctccagcgacatcgccaaacgattcgaggagaccggcgaacccgtgccgctgtccgccgccaaagacgagcattggatcgccggctgccccacctgccgcgcaaatttggtgaaactggccacccgtgccggattcaagccggatatccgccactgcacggatgattactgggccacgcagaacctggtcgaggttggcatgggcgtctcgctggtgccggcgctcgatacacatatcaatctgcaaggcgatctggtggcctgtcccatcgccgacgattttgcggcgcgcgaggtcggcatcgtgactcgtgccggcgaccatcgtcccgcgctcggttcattgctcgaagagctcgagcgcacggcactcaaatatttgagtgccaagtagtcggacagcgataagcaagcttgcgaacgccatcacgatttcggggagccagaccgttgagcggcccttctgcaccgggaacaatggcatgttatgagcatgaacaacattccccagtcaacgactgtgagcaacgcaaccgccggcgcctcttgctttgatgccaatcacatcgacgtgacgaccatcgaagatctggagcaggtcggttcggataaatggacccgttaccccggctgcatcggcgcattcatcgccgagatggattacggtctggcgccgtgcgtggccgaagccatcgaagaggccaccgaacgtggcgcgctcggctacattcccgacccgtggaagaaggaggtcgcccgctcgtgcgccgcatggcagcgtcgatacggctgggatgtggatccgacgtgcatccgtccggtgccggacgtgctggaggcgttcgaagtgttcctgcgcgagatcgtgcgcgccggcaactccatcgtggtgccgactccggcctatatgccgttcctgagcgtgccgcgcctgtatggcgtggaggttcttgagattccgatgctgtgcgagggcgccggcgagagcagcgggcgcaatgatgaatggctgttcgatttcgacgccattgagcaggcgttcgcgaacggctgccatgccttcgtgctgtgcaacccgcacaacccgatcggcaaggtattgacgcgcgaagaaatgctgcgattgtccgacctggccgccaagtacgacgtgcgtatattctccgatgagattcacgcgccgttcgtctaccaaggccacacgcatgtgccattcgcctcaatcaaccggcagacggccatgcaggctttcacctccacttcagcctcgaagtcgttcaatattcccggcaccaagtgcgcgcaggtgattctcaccaatccggacgatctggagctatggatgaggaacgcggaatggtccgagcaccagacgtccaccatcggtgccatagccaccactgcggcctatgacggcggcgcggcatggttcgagggcgtgatggcatatatcgagcgcaatatcgcgctggtcaacgagcagatgcgcacgagattcgccaaggtgcgctatgtggagccgcagggcacgtatatcgcgtggctggatttctcgtcactgggcatcgatgacccggccgactatttcttcaagaaagccaatgtggcgttgacggacggccgcgaatgcggcgaggtcgggcatggatgcgtacgcatgaacttcgccatgccctacccgctactggaggaatgcttcgaccgcatggccgccgcacttgaggcggacgggctgttgtaaaaaatcgcggctcccctcagagaggggagccgcggaacgcccgaattaatcgaagtcggcacccaacgcttcgagtttgccgcggaagtcggcgtagcctcggtcgatcaggctgatgccgtgcacgtccgaggggcctgacgcggccaaggccgcgatcagatggctgaacccaccacgcaggtccggcacgtcgatgtcgcgtccggtcagcggggtcggtccgaagatcacggcggaatgcttgtagttgcgctgccggaaacggcacggcagcgagcccaggcactcgcggtacaactggatggtggcacccatctcgaccagcggcttggtgaagccgaaacggttctcgtacacggtctcgtgcacgatcgacaggccgttggcctgggtcagggccaccacgagcggctgctgccagtcggtcatgaacccgggatgcacgtccgtctcgatcgccacgggcttcaagtccccgcccggatgccagaaacgaatgcccttgtccgtcacctcgaatttgccgcccaccttgcggaacacgttgaggaacgtgatcatctccggctgggtggcacccttgacgaaaatgtcaccgtgcgtggcgagcgcggcggacgcccaggacgccgcctcgatgcgatccgtcagcgacgtgtgcgtgtagccttgcagctccttgacgccttcaatgcggaaggtgcggtccacgtccacggaaataatcgcgcccatcttctgcagcacgcataccaaatccatgatctccggctcggtggccgcgcccgacagttcggtcttgccctcggccagcacggccgccagcagcgtctgctcggtggctcccaccgacgggtagggcaggtggatcttcgcgccatgcaggccgttgggcgcggtgatgtggatgccgtccttgtgctccttgtccaccgtggcgcccagcttgcgcagcgtctccaaatggaagtcgatcgggcgcccgccgatcgcgcagccgcccaatgcaggaatgaacgcctcgcccagacggtgcacgagcgggccggagaacaggatcgggatgcgcgaggagccagacagcgtatccacgtcagccacatcggccagctgaacatgagaggcatcgatagtcacaatgcccttttcgccgtccacatccacgtccacgccatgcaggcgcagcaaatcggacaccacatgcacgtcacgaatctccggcacgttcttcagcaccgacttgcccggtgccagcaacgcggcgaccatcgccttgctcacgaagttcttcgcgccacgcaccttgatcgtgccattcaaaggcttgccgccctcgacatgcaacacgtcatccggattctcagccacgccactctcctcaatcaatcaagattcaaaaaatgctaccgtccagtttgccataagccatgtgccgactccgtgaaatgcaccccagccgaactttgatcaccgtgcacaacggatcccataccccccgtcgaatcaaaccgataacgtgatcttcctcacatttgccgccacggtgttctccatacttctacgctacgattcagggcaatggcatcagacgccatggccacaagcaaaggagcattcatgaccacagtcgccgtcatcggctgcacgcacgccggcacgttcgccaccacctcgattctcgccgagcaccccgattggaccgtccatgttttcgagcgcaacggtacgctgtccttcctctcctgcggcatcgccctgtgggtgggcgaccacgtatccgacccgaagaaaatgttctactcctcccctgccgctctggccgaagccggcgcgaccatgcatatgcgcaccgacgtgacgtccgtggacctcgacgccagaaccctcacctaccgcgcgctggacgaggccggagaccccgccgaacagaccctcgctttcgacaaactggtcgtgaccaccggctcgcgcccggtcatcccgccgatccccggcatcgacagcccgcatgtgctgctgtgcaagaactgggatcacgccatcgccatcaaggaaaaggcgaaaaccgccaagtcggcagtggtgatcgggtcgggctatatcggcgcggaaatcgccgagcagttcagcgtcaccggcgtcaagaccacgctggtcgacggccttgatcgcccgctggccaataatttcgataagaccatcaccgatcaggtggcggccgcgttcgaggagcacggcgtcacgctcgcgctcggccagaaggtggtcgagttccgcgacaatgacgacgacaccgtcactgtggtcaccgaaaagggcgagtacacggccgaaatggcgattctggccgtcggcttcctgccgaacaccgacctgctcaagggcaaggtggacatgctgccgaacggcgcgatcgtggtcgacgactacatgcaggcgtccgcgccgggcgtgtacgccgccggcgactccgccaccgtgttctacaaccccaccggccagcacgattacattccgctggccaccaacgcggtgcgccagggcctgctggtgggccgcaacatcgagacgccgaccgtgaagtacatgggcacgcaggccacgtccgccgtgcagctgtacgatctctcgctcgccgcctccggcctgacccgcgccggtgccgaacgccgcgggctcacggtccgcgagacctcgctcaccgaggattatcgcccggacttcatgctcaccaccacaccggtcacgtcgatcctgacctgggatcctgagactcgtaaggtcaagggtggccagttctgttccaaggccgacatttccggcgcggcaaacgtgatttccatggcgattcaggccggcttcaccatcgaccagctcgccaacgtggacttcctgttccagccgaacttcgacaagccggtctactacgtcggagccgtggccatgaaggcggcggccgagtaagacggctgtacccaccgcaaaaaagaaaccccggcgtgatgggcgccggggagagaaaggagagaagaagaaagaggttaagttatgcagcttgttcggccgtgattacatataacagcaacagtttcaatgcaacatgggcactgtctgggaatcgtctgggaatcacggcccgtacaggctgttgcttgtttttggagccgatttaccggctggccttgatcttgtgggccagttcggcgtcccacatcgcgccggtggcggacatcaccgagtccgcgccggcgtcacggtacgcctggtagtcggcgggcgagaccacgccgccgacgccgttgatcgcgaaatcgagcccgagcttttcacgaatcgcggccagacgggcgaccatgtcgaggccggcgccacgaatcgcattgccgcacacgcctgagtgatcgcggcccgcgccgggcagggcctgattgccattggcatcgaccagtttggcggaaatcgtattgatggtgctgaagccctgcacggtgccgtggcccacggtggaacgcaccataagctccagagcgtcgtcgctggggatgtaggcgagcttgaccatcagcgggatgtcgccgatctcctgcttcacggcctcggtgatgcggcccacgagcagcggattgtggcatagcaggcggttgtagccctcgttggggcagctggtgttcatcaccatgagcttggcaccggtctccttgaccaggcgggcggtagtggcatggtcggcgatgtattcctcctcgctcatgccctccacacgcgagccttggaagctcgggaccagcacttgaccgggaccggcggcctcgatggcggcgcgcatgtccggctgccagacgtcagggctctgcgagggcacaccgaagctgttggagatggaaatcggctgttcatagttggtgtcggccagcacgccttcgtccagttcggcgctgcccggcgtcagtgaaccgtccgccgacttggggtgtacggcgagcacgttcgggaacgggttgcagccccaggcgcgcgaacgcacggttttgtaggtcgccagatcgaaacccatgtggaaagcggccgtggtgaaacggctgttgagcagcgggcctgcgggaatgccgaaaggcaggttgaccggctggcccaaaaaggtggccaaggcaccctcggaggcaccctcgctggtggttccggcggcatcggcaccgttgccatccttcagcgcctcggcgaacgcgccgaacggcccttgctcatagttgtcttcgtaactgcggctgacatcgtaaaacggctcaaaatcactcatgcttcaacgataagccaacctgcatgcgcacacgcacactcaacccatcatcgcgccgacaaacgaaataatggcgaaagcggcattggctaccacaaagatgatgaacgtcggagctgcccagccaaagtacgtgtctggaatactacgattcgtacggtgatattggcgcatctctttgccgtatatcacgaatatgataatcgatccgatcacgccgatcacagatagcgacaatgagaatatcaaatatgcgttgtcatcaagatagttgccggcaagggtatcgatggcgccggaaagaatcgcattgttgaagatgtgcagtgcaatcgaccaaaccaacgagtattccatggccacgaatcccagaatcaggccaaagaggaacgcgaatgtgccttgcactacgtcgtcatggaacaggccgaacaccattgccgaggtgacgatggcgaagttcttgcccaacggcttgagctccttcatcagtacgccgcggaacagtacttcctcgcaaatcggagcgaccagcccaacgtacagccacatgcttacggtgacgctggattcggcgatgctgtctgacgtgggagaggcaagatcggtgcccagcatggaaaaagcgacctgcaccaacataacgatgccttgcacgcccatgcccagcacgatgaacatcaacgcccagagaggctgcatgcgcccgccgccatattggctgatgtggccaagctgattgggctccccgtacgagtcgcgatgctggccaccaagccagaattcgcaggtgaagatgtcacggtggcgcatgagcagcagaaatccgaacgcgacgaacaccgatatcaggctgatgatgccatcccactgcacgccggacaaatcgctcgcggttattacgccgacgataatggtggcgaccattgcgcccaagagcatcatgccttcataggcgagagtcagtcccattacacgattgaccaccttgcgacgccacgtgcgccatacacggcgaggatcgatcggcatgaccacgggcattgctgcgggcatcgtggcaggcattgcgttgggcattgtgactggcattgccggagccgtttgcacgaatggttgcggcgcagcggaatagggttgtggcgcgtagcccactggttgagcgtagtacggatgagcgaggggctgtggagccgactgttgcgccgggtatggggaataggcggattgcgccggatacgtcggctgcgtgggatacatcggctgggcaggatacgtaggttggacgggatatgtcgggtatacgagctgcgcggcgtattgtgcaggctgcacagcaggtattgcggcttgcggcacaggttgtgaaacaccttgtgaaacaatccgtggaacaccccgtgaaacatcttgtggaggtagcggttgtgcccatgcctccggctgacccgcatattgcggctgcatgctcggcccaggctgaacatactgtggcgtctgtggcatcggcgtctgtgactgtgccgcagactgcggtgccggtcgaggtggcaacggttgcgctgacagcgattgcgccggagccgtatcggaatcgttcgacggattcatgtcattcatggtcatgatgctcaacctaaccgtcattactggatgaatcgtgattatgtccacaaatgtgtacgaattcaggcacagtatttcgaacgctaggacggagttcatgagtgttgaggaaagcgccgccacgccggtgttggtggctgcggtggataacgaccgtatggcgttgttggcgctgaagggaatattgccgcaactcctgcccgccgcgcaatggatgtggggcgcgggcaccagtgagacctttgtttgatgcgatgcgagcgacccaataatctcaatcagacacagagccaacggccctgggcctgcaattatggactcgcctttcggcgaggctcaatgctggcctcgctgctgtcgcagctcggcacagggcctgctgaaagcccaccgggctttcagcaggccgatcgcggctaaataatgccgcgatcggccaacggccctatccagtctgcgtcctcaggctcgcgggcggactcgattctttcttcggcccagtgtttggcggggatggtcttgggcttgaaggggaacttttcggcgcgcatcttttcgtaggcggcgatgtcgtcctcgtgctgcagcgtcagatcgatatcgtcgtagccgttcatcagacgccaacgcacgtaatcgttgacctcgaacggcagggtcacgtcgccgcaagtgacagtgcgggtctccagcgagacagtcatctcacgaccaggctcttcctccagtagcttccacaggagttcgacggactcctgcggcataatcgcggccagcacgccgttcttggcggtgttgccgtagaagatgtcggcgaagctcggcgcgatgaccacgcggaaaccgtaatcgtgcagcgcccacacggcgtgctcgcgggaggagccgatgccgaattcggggccggcgaccagaatctggcccttaccggcgtattccggcttgttgagcacgaagttcgggtctcggcgccatgcgtagaacagggcgtcatcgaagccggacttggtcacgcgcttcaagaacacagcgggaatgatctggtcggtatcgacgttggagcggcgcagcggcacgcccacgccggtcagtgtggtgagtttttccataacaattttcctttcggggatctctcccccagtcagtcttcgactgacagcccctcgtcagagggggctcacgtgtattgactcagagatcggcgggagacgagattgtgccgcggatggcggtggcggcggctacggccggcgacgccagatgcgtgcgcgagcccttgccttggcggccctcgaagttacggttcgaagtggaaatcgagcgctcgttcggcaccagcttgtccgggttcatgcccaggcacatcgagcagccggcgttacgccattcggcgccaaagtccttgaacaccttatcgaggccttccttctccgcctgcaaacgcacgcgggaggaggccggcaccaccagcacgcggtggatgttctcggccttgcggtggcccttcataatcgcggcggcctggcgcaaatcgtcgatacgaccgttggtgcacgaaccaatgaacacggtgtccacggcgatgtccttgatcggcatgcctggcttcaaacccatgtatgcaatcgcacgttcggcggcggcgcgcttggtggcgtcggcgatcttgcccggctccggcacggaggcggtgatcggcagaccttggccggggttggtgccccacgtcacatatggaccgagcttggtggcgtcaatatccaccaccttgtcgaatacggcatcgtcatcggtcttcagcgtcttccagtacgccacggcctgatcccacagctcgccttccggcgcgtgcggacggcccttcaggtactcgaacgtggtctcgtccggcgcgatcatgccggcacgcgcaccggcctcgatggacatgttgcacacggtcatacgttcgtccatggtgaggttgcgaatcgcctcaccacggtattcgatcacgtaaccctggccgccgccggtgccgatcttggcgatgatcgccagaatgatgtccttggccgtcgcgtccgcgggcagcttgccgttgacgttgacggccatggtcttgaacggcttgagggacagcgtctgtgtggccatcacgtgttcgacttcggaagtgccgatgccgaacgccagcgcgccgaacgcgccgtgcgtcgacgtatgcgaatcaccgcacacgatggtcatgcccggctgggtcaggcccagaatcggggcgaacgcgtggacgatgccctgatcggcgtcgcccagcgggtgcaggcgcacgccgaactccttgcagttcttctccaaagtcgtcaactgcaacgcgctcgtctcatccgggttcgggcgatcgatatcaacggtcggcgtgttgtgatcctcggtggcaatgagctgatccacgtgacgcggcttgcggccggccaagcgcaggccctcaaacgcctgcgggctggtgacctcatgcatgagcatcagatcgatgtacagcaaatcaggagctccgtcgctgcccttgcgcaccagatgatcggcccagaccttctcggccagtgtcgttcccatagtgattcctccaaaaaattccgcgcgaggtattgtgttcgcgccttgttcgtggtattagcctatgtgcttgcgatgggcccggccatgagcatgccggatattgagatacggtcaaatgatggcctcaatatgactcggacccgactcgaacatgacctagtcatgactcggttccgctccagacatgtctcttcggcatccacgaacgccctttcaacttcatggccaccctgtgagacacttccccaatttgccatttcactatgtgagatggcataatcgcccttattatgactgattcccgggaagaaccattgaacaacagcttgaccgagtccgagccggttgaagacaccaccgccaaggacgatggggaaatccattccggcgttggcgtccttgataaaaccgtaaagattcttgacgcactggaatccggcccgtctacgctgggccagcttgtggccgccaccggtctcgctcgaccgaccgcacatcgtttggctattgcactggaacgccaccgtttcgtactgcgcgaccagcatggccgattcgtactcggctcccgtttcgccgaacttgccgccgcagcaggcgaggatcgtctgctgaccgccgccggcccgatcctgcagaccctgctcgatcgcactggcgagtctgcgcagatttaccgccgccaaggcgatcagcgcgtgtgcatcgccgctgtggaacgcacctccggcctacgtgattccattccggtgggtgccatgctgtcgatggaagccggttccgccgcccagattcttctggcttgggaggattccgaccgtctgcaccagggattgcgccacgccaagttcaccgccaccaagctggccgccgtacgcaagcgcggctggtccgagtccgtgaacgaacgcgaagagggcgtgtgctcgatttccgccccgatccgcaacgcctccggccaggtcatcgccgccatctcgatttccggcccgaccggccgcatgggtgccgcccccggacgccgctatgcgccgctggtgatggccgccggcaagtacctcaccgaggcactggtcaaagccgttcgctgaaacataccagtcaatccaaccgatagcccaaccggcagaaatcccgcgtcacaacgaaagagacgcgggatttctgggctataggaacaagagtgtggtgttcgcgcaggatgggcaagatcgggtagccggcggtggcgatggtgacggacggtccgaacatcgtgtagtcgccgatccatatctccgcgtcgtcgaccatgctcatgaacgcgttgatgtagatgactttgccgaggtgtacgcgacggcatccgttgctcgcatgcaatggcgtttcgatgtgcacgccgtcgccgacttcggcgcacatgtctttgagcagttcggcgcgccgctcccgttcggtgggtttggtctggttgtattcccatagtttgttctgccatgcgagctgtccgtccatgatggccgggtcgtcgtagtggtatggcaatcccgcatccctgcgcgccgtattgtccatgtcgtagtcccttccgtatcggttcatcggtctcggcccatcccatcgtcctttgttcgggccggaacgcacacggcctttctcaccagcatgaggccgcccgcgctgaccgattcccatcgcaacgtcgccgcacgccccc

SEQ ID NO: 536 - DNA, 20480 bp, Unknown
  R48_24m  MAG No. k141_62934
cgggcggtggccatcgggatccagtcgccggtcagcgggtcgcggcgcatctgcggggcggcgtacggcacttcgttgccgtcggcgtccaggtgcggggcgaaacggtagtccagcgggcgcgggtccttgagctcgcgggtcttggcaccggagacgaactcggggtcgtcgtccaggtagaagaagtcacgaccgtcggcaagcgtcgtcggcgtgatgcggatgtgctccttcgcatactccccgggggtgtagttggcgaaatcagccatgggtttactcactttcctcaatgatctcgctctggtgggccagcacgagttcctttaccaaatccttggttttggcggcggagtcgggatcgagcccgtcgtcagtaatgaccgtgtccacctggtcgaagcgcgcaaacagcgacagcgatgtgcagctccacttggtgtgatcggtcaaaactatggtacgatcggcgatgtccatcatcgccatatcggttgcggcttccagcgaattcggcatcaggaagccacggggaatcgacaccgagtgggtgccgaggaatacggtgttgacacgcagcgaggcgacgaccttgtccgcgatcggaccgacaagcgagttcgatcgggtgatcacgccgccggtgacgatcacctccacgtccttggattcgagggcctggaccagttcggccacgggaatcgaattggtgaggatggtgatgccgctggactgctgcgattcgagcagatgctgggcgaagacataggccgtggtgccgccgccgatggcgatcacatcgccgggagccacatatttgatggcttcctgggcgatggcgtccttcaggccgagatccatctgggacttgacagagaacaggggttcgctgagcaaggtactggtagtcaccgcgccgccatggacgcgcttcagcagtcccttgtcggcaagttcggcgatatcgcggcggatggtcatcgctgacacacccagttccttcgatagcgccgtaatgcgcactgccccgcgcgtgcgcaacctgctcaagatgaggtgctgacgttgtgacgaaatcatgtgaacattatcgcacacaaaagctcacaaaccaaaccggcttgagcgttttggggacaatctctcgaaaattccgggcaattcaggtgttcatttccacaaaaccgcgcaaaatcgcacattgtgcgaaccgatattctcgcagcgaccactagcgcgatgactcacgaccgacgactctcccgagcgcgttgctcagcggcgagtcacgcctgatacctggtgcatcccgattcatgtatcttctgccgagccgacgcctgcgtgcgcctcgacacgcggtagccccttccccaattcgcctaggcaggaatcgcctagccgcaccagcccaagcgtgagacaataggcggtatgacttacgtttctgaaagcttctggcacgacgccgtcaacaaagccaccaccgatctgttcaccttcggctacaagcacatcatcaaaccgaacttcgtgttcaaccaccgccccgatgaggcacacgatcagatgatcgagttctgccacgtcgtcaagaacgtcccgccgctgctgctcgccgagcagctgatgctcgactacaccgaccccattctggaaacgaatgtgatgggcgtcgatttcaccaacccgttcggcctgtccgccggcctcgacaagaactgcgacatgcccgtggtgctggaccatgccggcttcggttttgaaaccgtaggctccaccacctcgcgtccctgcccgggcaacgccaagccgtggttccaccgtctgcctgaatacgattcgatgatggtgcacgtcggcctcgccaacatcggttcggacaaggtcatcgagcgcgccgagaaggcttggactcaggcccgccagatgcagctgtctgtgtcgatcgcccgcaccaacgacgaccagtgcggcgatttggacgaaggcattgaggattactgcatttcgatgcgccgcgccgccggccgcaccgcgatggtggaggtcaacgtctcctgcccgaacacgcgcgtcggcgaaccgttcaccgcgactccggaagcgctcgaccgtctgtttacggcgctcgacaagatcgaccgcccgcagcccacgctggtcaagatgccgttgaacaagccgtggggcgagtacaaggagctgctcgatgtgctggccgagcacaatgtgcaggggctgtccatcgccaatctgcagaaggaccgcaccggcctcgagattccgcgcgattgggagggcggcctgtccggcggcccgtgcaccaacgccagcaccgagctgattcgcaaggtgtataaggagtatggcgaccggttcgccatcgccggcatcggtggcgtctttacccccgagcaagcctatgcgaagattcgttccggctccagcctggtcatgttcatcagctcgctgatgtaccgaggcccgcagcagatcaccgtgttgaagcgcggtctggcccagctgctgcgccgcgacggattcgagcacgtctccgacgccgtcggcgtggacgtggagtgaactcacatattgccctattacccatggggcggtaaaaccctcatggggcggggattgtcccatggggcggttagccaaatttcacattccgcagaataccgccgttttgggttaccgccccatgagggttttaccgccccatgaggattcagtacgcaccggccacgtattgcggggcgtaggggacctctgtggacggtatgcccagcttgttggccgcacgcaacggccagtacggatcgcgcaatgcggcgcggccaatttccacggcatcggcttcgccacgggccaaaatcttggccgcctgcttcggcttggtgataagacccaccgcggtcaccggaatatcggccttggacttgacctgctcggcgaacggcacctgatagttcggcttgaccggaatcgacactcccgacatgatgccgccagtggacacgtccatcacatcgacgccatgctccttcagcaccttggatagtgcaatggtctgatccaaatcccaaccgccagcggcccaatccgtggccgaaatgcgcaccagaaccggcacgccctcggggacggccccgcgcacggcatccacaacctcgaccaggaaacgagagcgaccggtcaaatcgccaccatattcgtcatcacgctcattgctcagcgggtcaaggaactgagaaatcagatagccatgcgcagcatgaatctgaatagcctggaagccggcggccaccgcacggcccgccgccgcggcgaacgcaccgaccagaccatgaatctcatccacagacagcgcgcgcggcgtacgcagcccgccgaacgcgatttcagacggtgccatggtgggccagccgcccgcctcctccggcacactctgaccgtcgtaaccaacggcgaagcaaccggtcgaagccttacgccccgcatggttgagctggatggcaggcaccgcacccgcctcgcgaataccgtccacgatccagcgccaagcatcaatctgcccgtcttcccacaggcccagatcgcacggcgtgatacgcccttcaggagccacggcggtggattcgacgatcaccatgccgaatccgccgaacgcacgagacacgtaatgctggtagtggaacggcgtgggcctaccatcgcaggcgaacgacgaatacgtgcacatcggcggcaaccaaatacgattacgcacggtcacttcgcgcagcgtcattggcgcaaacagtcccggacggtccttgctggctttcttatctgccttgctcacagcttccctttcctcataatcctcataatcatcgaacgattcgctcgtcttgcccgcgccggcccgcttcttggaccgtgcgtcggattttgacttcttcttaccgtgcctacggttcctcgatgcatcctcgtgcttggtcttcggctgcttggactgttcgccgtccgaagacgaagccagcgtcaccgctttgagatccggcacgtcgaatccacgaaaatcaaaattctcatgcgtcagatcgtcgtcgctcatcgttcccctttccaatgcgcgttcatggcgaatattcgatgaacgcgctggcgttgtcattaagtattgtaaaacgggcgtcacctgaaacaggtaacgcccgcaaactacgtaatttgggcatcgcagtcgactatgttacgtagactcagccggcctgcaatcaccaaatgtcaaacgccaatcaccaatcactggccatcattcgaccgctctgaattggtgccctgggtttgggtgttgttttgcccagtgttctgcgactgagactgcgactgggattgaccattggtggtcgtctgcgattggctgttgccattcgtagtggtctgcggcacgctgaacgttcgtccgccaatgcccaggtacttgccagtcgtggtgtacttcgagacgggctggccgtaatcgttgtcaatcggtattttcttcttggaaatgtagctattgaagaagttggtaacggccggagctgcgattgtcgaaccatcccaatagctgttgtaccggccgttgatggcaatgttggaaatacggttggtgtacgggttctgtgcatcgccgaccacagcgaacgccgcaatctgattaggaatgaacgatccaccggacaccgcaagatcctcactggtaccggtcttaccaaacgacttacgcccgtcagccaatctgaatgaccaaccggcaccatccggccgcaccgtaccttggttcagggtataagcgagtgtttggatgatgtccttatccaccgcctgatggcagttcgcggatggaaccttgagatcgttgccgtccttatcggtcaccttgctgatggcaatcgggttgcattgcacaccattcgaggcgtatacggcgaagatgctcgccatggtcagcggggacacattcaccgagccgatcatcatggatggtgtatacacctgggttttgtcgatggtctcacccgtggcggcgtcatggtatcccagtttggtcgcggtgtccgccaccttgcacagtttgaggatggcgcccatggaggcctgggtggtgttgtgcgatcgcaccagaccgaggaacgggctttccgggttcaccgtgccggcgcccatggcgttcgacacgttccacgaatcggcaccgcccttgtagttgttgcaggcgaagtcggtcgtggggtacgtcgtggtggtctgtaggttgtcgttgatcgaatgacccgcctccatccacgcaatcaggttgatcggcttccaagacgaaccaatggtccaaccggagccgccgccgtccaccagatcgacggcatagttctggcccgacttggtcggatcgttcgcggctgccggagtggcgtcatagtaacgattcaggccaaagctcagcacctcgccggttcccggtttgactgcggccatggctatttccatgccgctgggatcgtccggtggaatggtattacgcgcggtctccatcatcgtggaattcgcttccacatccaacgtggtgacgatcttcaggccaccctcctgcagcagcttgttacgctccgcacgagtcttgccgaattcttcggagttctggatgcgatgcaccacgaaatcacagaagtatgcgtagtcgccggtgtcctggcagccgacgttcacggcctgcaccttcagcgtgtccttcagcggcgtgttcacggcttcggtgtactgcttctgggtgatgtacccctcctgcagcatcagcttgagcacgatgttgcgctggttctcgctttccttctggttctcctcgaccagcggatcgtactggctcgggttcttggtgatagccgcgatggtggcggactgcaccacgttcaaatcggcggcggacacgctgaagtagcgctgggctgcggtttccacgccatacaggttgttgccgaactgggcgatgttcagatagccctgcagaatctcggccttggaatacttcttctccatctgcacggagatcagcatctcgcgaatcttacgggcgacggtgtcttcggtggcatggtactgggcgatcgggtcgtcgtcctcgatcgcctgcatgagcagcacgttcttgacgtactgctgggtcagcgacgaaccaccctgctgggagcctttgacgaggtaggtctgcacgaacgcacgcatcacgccttgcacgtcgacgccggcgtgagtccagaatcgacggtcctcgcgcgccaccactgcctgctgcatggttttggaaatcttcttcagcggcacgacgatacggttttggttgtagaacgtcgcgataacggtggaaccgtctcgcgcgtacatcgtcgacttctggggcagaccggtcacgtcgaagtccacgttttctaccttgagcgacggaatcaccgctttggcggctttattggcaccgaccacacccggtacaaacaacacgctggccgccacgccaccgcagacggcaagcatgatataggccaagaggagaacaagcacacgttggagagtgagggacttctttttgggcatgggccccattctaaatggggtgccctaccaaccgggctcgcggtcagcttccgtgaacatatcatcacaagaaccgcactagcgtaacattggctggaagtcagccgaacggtcagcgccgcgagcgtcgaatcagcatgcctggctggaagatgatgatcgatcgaccgtcacgtgcgatccatccgcggttggaaaagtccatcaacgccttgttcacggtctcacgactggagcccaccagttgggccagctcttcctgagtcaggtcatgcggcactttgaggccctgttccaccggctcgccgaaacgtgagcccaagttgagcaatgtcttggccagacgcgccggcacatccatgaataccaagtcggagatgcgttcgttgttgccgcgctggcggttggccatgacctgcaacatgtcgatggccacacgcggatgctcatcaagccatgcgaacagggcatcatgctccagccagaccacgcgcgtgccatggctcatggacaccgcggacgcagtgcgcgggccaccatgagggtcgaataccggaatctcgccaagcacttcgcccggcgcgtggatggacagcagctgcacgcggtcatcggaagaagtgcgaatcagcttgacgcgcccctgctccagtagatacatgcgctgatcggtatcgccttcggagaagatatagtcgcccttatcgaaggtcgcacgcttcaaatgcggcagcagctcctcggcttcggctggcgatacctgcttgaacaatgccgtatgcagcaggatgttctcctcgtcagcaaaagcgtttggcgtttccaagctcatcgcaccatccttattgtcctacgaccgtcgtcggccatccgtcatattgtaacgcgccccacaggtttcgtcagaagcatgccatcattcgtcacttcatgtgtggcgcgatccgatagccgtacgacatgctgacgaatgtgttaccgcgaaaaacggcactgtcgcggttaccgcgctcgcccatgacaaaaccacgcacggccaccggcaaaatcgtatacggccatcggtgaaatcacgccgcaaaccagtcaataaggtgttcgacgatgtgttcgcggctgagacccgtctggcttttcatcgggtccacgcgtttgactgctgatttcaccgctttgtctgacatcttctcgcgactggtgttgagcacacggctcatcttggccgcatcgatgtcatatgccatggtcacatggtgcagcaccgcgccgcctgagcctacggggaagcgccgttgcgccgctcccccgatcttgccgtactgcgaggcgatatcattgaggcccgcgaaccgcacatccaagccaagttcgcgcagcgcttcgaccagccaccagtcacagagccggtaggattcttcgatgcttacgccctgaacgaaatcgagcggtgcatacagagaataggtaatggtgttgcccggttcgataaacatcgcgccaccacccgtgcaacggcgcaccacgtcgaaaccgagctgctcggcaatgtccagattcacctcgtcctgggccgattggaaacggccgatgaccacagccgggcccgcccactcccagaaccgtatggtcggctgtcgtgttcctgctgcgacttcacgcgcccaggtctcgtcaatggccatttgctcgtccggcgtacgcggatggtcgtggatcacggtgagttgaggtctgagggcgttccagcgctcccggtattcagagcttttgtcgggctgcttggtttgtgtattgatggatgccggggtgttcggcgcatcggggctgaccacccccacccgctgcgcgggagcccccaccagcgggggcaagttgctgcttacggctcggctatatgcggttttgacggcaacttcatctgtgccgataatttggcaactagggtgagcgtccaatacggaccgcaatgaatcatcactaattagagcctgttccaagtcacgcaacaaagcatgagattcggcatccgaaactgattcaataaagaaatcaccgctgatatggcatgactgtgcggtgccgtcatcatcgacggatacggtcacggcgactagtttgccgccaacggttttgcattccccatgtcgcatttgcatgcaactcagtataaacttggctcccctctggaggggagccaagtgggacatcacatgcgggccagaatgtccttgccgacctggtcggtggagcgcacggtggagccgagctcctcgatgtccgcttcgacggcggtgtgaatcttcttggccgcatcatcaaagccgagatgctcgagcagcatggcggcggagaggatggcggcggtcgggttggccttgttctgaccggcgatgtccggagcggaaccgtgaatcggctcgaacatggacgggaactcgtcggaggcgttgatgcagccggaggcggagtagcccacgccgcccaccacggagccggcctcatcggtcagaatgtcgccgaagaggttgtctgtgagaatcacatcgaaacggctcgggtcggagaccaggaagatggtggccgcatcgatgtgctggtagtcgtgggtgacctcagggtattcctcgccgaccttgtcgacgatgcgttgccacatatcaccggcgttgacgagcacgttcttcttgtgcaccagggtgacgtgcttcttgcgcttcatagcgagcttgaaggcgtaacgcaccacacgctccacaccgtatgcggtgttgatggacacctcggtggccacctcctgcggggtgttgcggcgcaccgcgccgccggcgccgcagtacagaccttcggtgccttcacgcaccaccacgaagtcgatgtcgccggggttggcgagcggcgaggtgacgcccttgtacagcttggagggacgcaggttcacgtactggtcgaggtcgaagcgcagcttgagcagcaggccgcgttccagaatgccggccttgatgcgcggatcgcccacggcgccgagcagaatcgcgtcgttggccttgatgcgctcctcttcgtcctcgggcaggatcgcaccatcgcgcagataacgctcggcacccaagtcgaagttctcatactcgaagtcagctacgccttcagcggccttttccaaagccttctgagcccacggagtgacttccttgccaataccgtcgccgggaataacggcgattttatatgtctttgccatagttcaaggagcctactcgcgcgaccacctgccggcccgaacccgctcagctagtggacacaaccaacatgcgtatcgtgtcgagacattcattaggtcattttagtgttcattaggtcggtgtgggttcatttcagggactgaaatggcggcatttcagtctcacatagaagaggacaccgacctaatgaacgacgaaatgacctaatgagcgagccccatcacatccatgcaccaagcgttctcataggaaacctcttcccattgtttgtaacgcccggatagaccgccgtgaccggcctcgacctcgatcttggccaccgcgtccacgccggcggactgcagacgggccagccacttgagcggctcgacgtacagcacgcgggtgtcgttcatcgaggtggtgatgaagattctcgggaattgcgcggcggcgagcgcgccggcggcagccccatcagcactgccgtcaccggcagcctcgtcgtcgccgccctcgagcacggtgaccggcacattctcgtatggcgtgtacgacttcatgtactgatacacctcagggtcatgcaacgggtctccccattcgtcccattcggtgacggtcaacggcaagtccgggtcaagaatggaggtcaacgcgtccacgaacggcacatccgcctcaacaccggcgtagcattcgggtgccatattggcaatcgcgcccatcagcaggccgccagcggatccgccgttggccacggtgcgccaagcatcagccaaatgcgccttctgcagcgcgcgcgtggcgtccacgaagtcctcaaaggaatgcttcttgttcagtctgcgcccctgttcataccaggcgcgtcccatttcgccgccaccgcgaatgtgcggcacggcgtacagcacaccgcgatccaacatgctcagacgagagaccgagaaccccggatcggaggaaatctcgtatgcaccatatccggtaatgaacatcggcgaatcctgcgccgggcaatcgcggtgccagacgagggaaacaggaatgcgttcgccgtcgcgcgcggtaatccacacacggcgttccatgtaatcgcgtggattgaagtcgcccaacacggtggctcgcttcagcagcgcatcttcaccggtggcgggatcgatttcgtgcagctcgcccgggcgggtgtagctggcgaacgagtagcgcatgcgcggcgcctcatacgaggggttgccgccgacgccgatggtgtacaagcgccgggtctcaccgggcaggtggtcgtcgctggcaccatcggaagatgacgtgtgatccgtgggggcctcatcttcggtccacaagatttcgccatgatcgccggtgaagttttcgcgatcggcggcgaccatgtcccagtcgtcctccagggcaggcggcagcaattccgtaaaccgccacggccgtccggccaggaagtcggcggcggccgcgctcttggtcatgtatgccacgtgcggctggccgtcggcacggtagctcagggacacaaagttgcgatgcaacgcgatgccttcgatgcccagaccgtgggcaccctgcaatatcgccggattggcggcgttgaagtatgcctcggtaatcggcttatccggctcaccatgttcacagccgtacggcgacccggcggcgatgcacacgccttcgccgagtcggtacggcggctcatggccacgcatgtcaatgacgtcgatttcgaaattcggattggcggcgttgtggtagaccacggcgagtggcacatccgcaccgttctcccccgcgccttcaaaacaggcaaagctcacatcatattcaatatcgttctgacgtggaatgaaggcttggaattcgccttcaggcgtggccaccggcagcatcagcacttcggtggtggttttggaaccggtgccgatcacgatattgcgctcatcaaaactgatgccgacgcccacccagaaccgttcatcggtttctcggtacacgcacacatccgattcgaccgccgtgccaacacgatgccgccacacggcgagcggccgccaggaatcgtccaattccacccagaacacccattggccgtccggcgtgaagcatgcgctgccaatgccggtgaactgttcgggcagttcgctgaccggctccccggtctccagcccggcaaggacgcgaatgcggaaatcatatcgttcgtctcccgcaacatccacgccgtacagcatccaacggccgtccttgctcagatccaagccgccgagccggaagaagtcatgcccctcggattccttgttcgcatcaaaaacgacctgttcaccgggcatggagccgggcgcgccttgcggatccacgaccggcgggtcccagtcatcggcatcgcgcacggggatgcggcattgcacgccatactgtttgccctgctgcgtgcgggtgaagtaccagtaatcgttgatgcgcgtaggaacagacatatcggtctcttccacatgcgatttcagctcttcaaacaacgtatgccggaaatccgccagatgcgccatgcgacgctcgcagtactggttttcggcagctacgtagctgcgcacatcatcggagtctttgtctcgcatccactcataatcgtcttcgaaaacgtcaccgtggaattcgcggcgcttcggctcgcgcttggcgtaaggcggcatcgcggccgcggcgtttgtgctctcgtcagtcataacacgcgattataggcgaggcaccacaccgggacgcattcggcgttcatcacgccgcgcttatcgcaacaccgtcttcagatacggcagcatggtcttcagaatgtttgagccggtggtgccggtgaatactggtacatcggttaccggagtcggctgggtcgaggtgagtcccgtcaccgacgccaatccggttgattcgcgcgggctcaactcacgaatgacgatagccagtacacgtccgggatatctgcgggcgatggtggcgtacgtggtcgggtccttctgcccgtcatcgcccaccagaatgaacttcatgtccgggaagtcggccataagttgttcggcaaactcaagtttgtgctgggggccggtgggcacgaaggtcttgggcctcgggtcgaggtcgcgcagcagcagcgggccttcgggaaaaccatggtcagtgatgaagttgcgaatcgaactctccacattccagggcgatgtcgaaagatagaagaacggtgcgccggggaacaagtcggcgatgcgggtgaacagcacgctcatgcccggcacggaggctttcttcttggggtcgaggaacagcaggttgtacgcggccttccatggcaccggggcctgtgtgatcatgatggtgtcgtccacatcggagatgatgccgactttggcactggcggggatggtgtacaggttggcgctcacgggtttgcggttggccacgctgtaggagacgcgatggataccgggcaccagacgatgctcggccacgaggtcgaggtatccggcggaatcggagatggcgtattcgctgccgagatcgcgcgtgcggtccaccttgtcatagacctcggagacgccgatctgcacggtgttgagcggcgtgtcatcaatgctggcctgcacgtgggtgcgcggcgcggatacggcaagcatgccgcggatgccgcggatcagttcgccggattgcgcatgcttgggggcgtataccgtgcggcagatcaggcgcgagtaatcgccggtgccataacccacatagggttccactcgcggataccagccccattggcgcaccacctgagtggagatgtgtgaccatacgccgaacacgcgggtgatggcacgacgtatgaatcgggtgatcggcggcttgacctcgatgcgctcacgcttggagggggtgtcgaacgtcgtggcagccttgcgtgcgggaatcggcacggtgggcatgtcatcggaatgttcagcattgctggcattgctggcattgtcggcaccattggcggatgccttgacgtcagagactggcgcggtggcggacagcgctgcattgcgagcagcagcatcccaaggcagtcgcttgcctgccgcctcaaaatcctcgcgtgggcttctcatagacaccaatataggccatacgcctcattttcttggctccgttgtagatgactttgttttagcttgtcgctagagcgaagtcatctgcatggcctcgttgccgaggccagctccaagactcacacggcttacgccgtcgcttggttcgcgtttcacaggatgccgcgttgcccgacgcgatgcgtcggtccgtcttccgcttcctccgcgcgcgtttaacgtctccggggcactcccggcgacttggatgttgatggccgcgttcagatcgcggtcgatgacaagcccgcactcctcgcaatggtagacacgttcggacagggacagtttggctttcaccgtcccgcagttcgaacatgtcttgctgcttggataccagcggtcgatgacgtggagcctcgcgccggtgcgtgcggtcttgtattcgagctgtcggcggaactccgcgaacgcggcgtcctctaccgagcgggcgagcctatggtttctcaccatgcccgccacgttcaaatcctcgatgctgatgtccgcgtaggcgcgggcgagcatggtggtggtcttgtccagtaggtcgcggcgtaggtccgccacgcgggcgtgcagacgcgcgaccctcgttctcgccttgcgtcggcggttggagcctttccgtttgcggctcagattcttctgttcccgcctcaatcgtctgaggttcgagtccaacgcgcgtggattgcggatgatggtgccgtctgacagtgtggcgagctgtttcacacccaaatcgatgccgacactaccgcctttcagcggcgtgggcatcggaccatccttgcgctcgacggtcaaactcgccatccagcgtcccgcatgccgggatacgctcatgcgcagcaccttcgcgccatccacccgcttggatacgttctccatgcaatgcacgcggcctatcttcgggagccgcagcgcataagggtcacagtcaatgagaccaaacgagcccgtcgtgtacgcgaatccgggaaccgccctgtccttggatttgaagcgcgggaagcccatcctgcggcctttccgctgccccttgcgggacttggagaagttcttcagcgcgtcggccaatgattcgaggccgctgttgtacgactccttgctgttctccggccaccacggcttgccggtctccatgctgacggcgagggcgtccttgttggcgttccaccacctgcgcagcgcgtagtacgaccattccggcttctcctgccgttcaagcatgtccttgacgtgcgcgagtcccgcgttgtacgcgaaccgcgccgcaccggcatgggactccaagagtcgttcctgccgtggcgtcgggtcgagcgccaccttgaccgcctcaagcatcacgcgccgccctcaacgccgcgtccgtcttatgcttggcggcacgacgcccgtacagtcgtgcgcagaacgaggtcagcacctcggccatgtcgcgcaccaagtcgtcgtccagctccgtgtcgtccaccacgatgattcggcgtccctgcgccttcaacgcgctctccaccagtcccgcgttcatgcgggcgagcctgtccctgtgctccacgatcagcgtgcccacggtcgggtcggacaatagccggttgagcttgcgccgcttgtcgttcatgcccgagccggtctccgtgaccacctcggggctcttgacgcccatgttgatggcgaacgccttcaaccggtcggcctgacgttgcaaatcgtccttttggtcggacgagctgacacgcgcgtaacacaccgtcctgccgttcgctgtgggggcggcgggctggttctcgtatttcgggtcgtggatgataatcgtgcccgtgttcatgcgctcgaacgggacgggcatacggttctcgcgacaccactgccacaccgtctgctcgttgaagccctcacgcctcgcccattccctgacacgcatgacttaattatatcacacgaaaacaaactaaagcaaataatcaatctagcaggttataacccctccataagaggcacgatgcatataggtttgatgccacatactggctcccctcagggaggggagctatgggtggaactaccgcacgaccttcgcgtattcgtcggcgctcagcagctccggctcatcgtcgtcaagctcgaccttcagcagccagccttcgccgtacggatcgccgttgaccacggacgggtcgtccgccacgtcacggttcacatacttgaccgtacccgccacggggctgatcaacggctggacggccttggaggattcaagctccacgatctcgtcgccggcctccacacgggcgccaggctcaggcaaatccacgaacacaagttcgccaagctggtcggcggcgtattcggttatgccgatgattgcggggtcgaccgaacggtccacccaagcatgctcctcggagtattcgaggtggtcgggaatgtcgaggttcagcggctgttcgttttcgttgtcatcactcatagtcataagcctaacctatcttcgcggtccgtcacagctcgcgaccgagccattcctcaatcatgtagcgggcgatggtggcgcggcccggcgccgccatacggccggcgatgagctcggccgtgtattcgtcgcgtgtgacccatcgcgcggtcatggtctcctcgccgtccacatgcacgtcggtggtgatcgcatgtgccttgaacgccatcatcagcgaagccgggaacggccacggctgcgagcccaggtaccgtacctcgccgagcttgatgccggtctcttccatggcctcgcggcggcaggcgtgttcaaggttctcccccgcctccacaaatccggcggacaccgaatacagcctcgaatccttccatgccgcgttgtgttgcagcagcagacgatcgtgcccgtccacgatggcggtgatgaccgccggctccacgcgcgggaacagcacacggttgccgtccgcctcgttggtgcatcgctgcgcccatccggcgagcgccggccggaccgccgcgccacaggtggggcagaaccgctggcggctgtgccagatgcttaaggtgatggcactggtggcttgcccagcctcgcgcgcgttggcgtgaggggcgaatccgcgcaggtccacccagtcgaaccgggtcacggcctgttgcagcagcgtgggcttcggggccaagggctgtacgggcgcgccgaccgaatcatcgaaggcatcgtccgcaccttgccctgccgaatccggtacaccgagcggcccggagattttggctgcggctacgccgccattgcccttggcgtttcccggctgccgtattccggcggcagcacctccgctgatgccgttcttgcccagtgcgccgtccacggtgccggaatcctgggcgccgagcacgccgccggcagcaccggaaacaccagcaatcccgccaacaccgggaacaccggcttccggcacgcgcgtgatatccacggcgaccacggattcgccgcgcgccccgacataggagccgaggaacatggcgaccgtttcggggtagcgtgccagttcggcggacacataggcgcccggcaacgtggcgagccgcattttcacgttctcatagtccacgagctcgccttggccgcgcggtacggcgacaagtccgccgcgcgtaagcacgactttggtggtcggctcggccagcagctcgtcgatcagaccggtttcacttcgccggtccacctgatagtcgatgtcaccttgcgcgagcggcaggaatggcagcgcatgggtcagtgccagaggtgagaaatgaatgtcagtgcccatcgaggtctcctatgcgttcttctgcgcgttctgcacgcgcctgacgagcgagagcagtgctcgcgccacggtatccggatgttcgacggcactgaaatggccacagtccggaatgtcgatgaattcggcgccggcgattcgctcggcgagcggacgcatcacactcggattgctggaggggtccagttcgccggacaccaccaggctcggtgcgctgatcgtttccggcaccgcccccagttcgggccggccataggtcatgcgctgacgccaggccagaccagccgggttctgttcgttgatccagccggtcatggtcgcgatgaattcaggagtcttcttgacggtggaatcgccatcggccggttgcgcgaagtgcatgaccggttcgaccgagttcgtctgttcggcggcgtccgccatcttcagtcggttctctccgcccacgccgtcggacgcggccatcgtgtcacacaaggccagtccggccaccgtttcggggtacaggcgctggatgtccatcgccacgtagccgcccatcgacagtccgacccagatcgcctgctcgtagccggcggccttgatcaggtccacgtaggctccggccaggcgatccagcgcctcgctgtaggcgccgttcgccatgcgggggccggaatcggcgtcgctcggcaccggggatgcgccggagccggccatatccggcgcccagatcgggaagtccggcacatcgttcaggtcggcggagtcggcgagcgccttcgcgcacacgtcccacatgcggtggtccaccgggtaggcgttcatcagcaccaccggcacgccttcgccatcgcgatagatatgattggccaattcgattgccatgaattactccttcacattcacgtcccaccagcgggaagcaaaacaactgtcagattccggcccaggccaacgcctgccgcacgatgcgaccatgaccgttgaccatctgcgccacgaacgtgttcattacgtcgctcttgggatccacccattccacgtccagcgtctcgtcctgcggcttgcagtcgccggcgatgggcaccatgtagcacagggcgatggcgtgctggcgcggatcgtagtattcgctcagtcccggcgtggggaagaattcggccacggtgaatggctggagtccgaccggcagcagcggcagggcgatgtcgcccaggtccttggccacattgcgggcgatggcctcgcgcagcgtctcgtggtacagcacacggccggtgatcagcgtgcgttcgatcgacccgtcctcggatacgcgcagcagcgagcccacctgggagatgcggcccatctcatcggtgcgcacgggcacgatctccacgtatgagatgggcatctgatgacgcgcccggttgatgtcggccggtcccagccagcccggcgggttgccgtggccggaaccgcccccgtggatgaagtcctcgggcgtgatgttgtcgaattcgccgcggccacggccggcatcataatcgccctcgtcgggcacttcatcattcatgactggcatggtctcattatcgcgcgcattgatgaacatgggcacaattcaccgaaaaattgtctgtgaattctcagcaaagcgcctcatcgcctccatgcgcccgcaatccattcagcttggggcacaaacttttgccgaaatgttgggtggtgctgggaaactggtacacagcatcaagcactgtgtttgaggaaggaacttcaatggccaccaccgccatcacttcagctgagtttgagaagaccatcaccgacaacgagatcgtgttcgttgacttctgggccacctggtgcggcccgtgccgtgcgttcggcccgattttcgaagctgcgtccaacgagccggagaatgcgaacatcgctttcgtcaaagtggacatcgacgccaatcaggatctggctcaggctgccggcattcaagctgtgcctacgctgatgattgccaagcagggcgaggtcatcttccagcaggccggcgcgctgcaggcctccgatctggacgacctcatcgcccaggccaaggcgctggatctggccgccgccaaagcacagcaggcagcgcaggagcagcagtaagccttatcacactgcggcaacggaagcgcggaaaagcccatatatagcgcttccttgcactgctaactactacatatgccatccgtggcgggtcgaacacccaccacggtttttttattcatccactcaacgtcctatgatggaaagcagtgtgtacccaaccaaggagcgcaatgtcgaagcacgctgaacggacctcattcgtcaaaaccctgtctcggggccagtgggcgaagatcgcggcggccgtggccgcagtgggtctcattgccactgcaggcgttatatcccgcgacttctatcagtcgagcaccgctacaccttccatcaccccaacctcattctccgccactgatggtgcggcttcccgttcggcatcccgcggcgcgctcaagagcaccacctacgtgacagtcaaggtcaatggcaagtctcgcgtggttctcggcgaaaaagccaacatgaccaccgtcaaggatgtgctggaaaccggcgatatcgtcctcgatccggaagacagcgtgactccgagcctggattccaaggtcagcgag

SEQ ID NO: 537 - DNA, 4136 bp, Unknown
  R48_24m  MAG No. k141_63031
aaagccggcaagcatcatcagaatcggcaccagggaagacgaccatccgccggttttctgcagccaaggggagacgtagctccaccagcagaacacgcctgcgttgccggtgaatacggcggccagaatcacccacggtccacggcgggtgaggaacttgaactgaccggcgatgcccgcgtctttaatcggtgcaacgtacggaatccacgccaacgccagcacaatcgtcattgccgcccaagcggccaaaatgccgaaggcaagacgccaggaaaggaactcggccatcagggtgcccgccggtacgccgagcatattggccacggtctgtccggtgaccatcacggatacggcctgcgcttccttgcctttctccgccagagtcttggcaatgagcgtggccgtgccgaagaacgcgccgtgcggcaggccggcgacgaatcgcgcgacgaccagcatggcggcattgacggaaaacacggaagccagattgcctaccaaggcaatcgccataaacaatatgatgaggttcttcggcggcaccttgcggccgaacaccagaatcagtgtgccgaagcacacgccgatcgcatacgcggaaatgtaatggcctgcggtggggatgcccacgccggtggcggccgcggcctgcggcagaatacccatcatcacgaactcggcggcaccgagaatgaacgcgcccgaagccagtgcaagcagactcttcttcatggttcctctaattacttcagtattacttacaaaaacagtgcggcaatcgattgattcgagcgatatattacggtggtccgccaacaaatacgggccttgccgcgacgcggtttgtcgctgtgcgcggcgggttgtttaccgctgtccgatcgcttggtctgattgttgggttaggaaacgaaaaaccggattgctgatttctcaacaatccggtccagttgtcgggctggcgggatttgaacccgcggcctcttcgtcccgaacgaagcgcgctaccaagctgcgctacagcccgtttggcaacagacgtagatattacattgtggtggtggacaatgcaaatcggcatgtcgcgagtgttgcgtgatggtggattcgccgtgtgtacaggtctctcaagccttgtgcagagccggttttgcgtcatgtgagcgggtgttcagatggccgtacggtctgccgggctcataatcgccggccttgcgtacactgatgaatcatggctgaagttgtcgaaaataccgaaaacactgagaatgaaaccccggccgtcccgcagatgagcaccgtcgaacgtgcggaaatgctgctcgagcaggacgccaccatccgcgagaagatcaagtccggtgccacgctggacgaagccgtggacccctccaacaaggagttcggcccgctggctcaccccgagcaggtgcagatgcgcgtggccaagcgcgcgatgatgcttgaggccggcatcgccccctacccggtgcacttggacgtcaccgacaccatcgaggcggtccgcgccaagtatgacggcaagctcgaggctggcgaagagaccgaagacatggtcggcattgctggccgcgtgctgttcctgcgcaacgcgggcggcctgtgcttcgtgcagctgtccgccggtgacggtaccaagattcagggcatgatctccaagaaggagattggcgccgactcgctcaagcagttcaagcagctcgtcgaccttggcgatcacctgtacctcaagggccgcgtcatcgcctccaagaccggcgagctgtccgtattcgccactgagtgggctatcgcctccaaggccctgcagccgctgccggccctgcacaaggacctgaacgaagacacccgcacccgcaagccgtacatcggcatgatcgcggacgagaacatccgcaacatggtgcgcaaccgctccaaggccgtggcctccctgcgccgcacctttgacgaccacgacttcctcgaggtcgaaaccccgatgctgcagaccctgcacggtggcgcggccgcccgcccgttcaccacgcacatgaacgccttcgaccttgacctgtaccttcgcatcgccccggaactgttcctcaagcgctgcctggtcggcggcatcgatcgcgtgttcgaaatcaaccgcgacttccgcaatgagggcgtcgacgccacgcacgcccccgaattcaccatggtcgaggcctaccaggcctatggcacctatgattccatcggccagctggtcaaggagctcgtgcagaagaccgccatggacgtctacggctcgcacaaggtcaccctgctcgacggcaccgaatacgacttcggcggcgaatggaagaccatcagcatgtacgattcgctgtccgaggcattgggcgaggaaatcgtgccgaacggcggccctgagcatcccggcacctccgttgagcatttgggcgccatcgccgacaagctcggcgtggagcgcgacgacgtggagaaccacggcaagctcgtcgaacacctgtgggagcacttctacgaggacaagctttacgagcccaccttcgtgcgtgacttcccggtcgaaacctccccgctggtcaagggccaccgcaccaagcccggcgtggtggagaagtgggatctctacgtgcgcggcttcgagctggctaccggctactccgagctcaacgacccgatcgtgcagcgtgagcgtttcgtggcccaggccaaggacgcactcgccggcgacgaagaggcctgcgacatcgatgaggacttcctcgaggctctcggcgtgggcatgcctccggccggcggtatgggtatgggcattgatcgactgcttatcgccttgaccggtgccacgattcgcgagaccatcaccttcccgctggtcaagccgctcgttggctgattaggcatactctggctcccctcagagaggggagccagagttatatatgaaagggattgcttatgtctatcggcttgtgggttcggggcgcgcgtcccaagaccttggtcacttccatcgcgtcggtgatggttggggcggtgatggcgtacgtgcatatcgagcggtcgggcacctgcatcgcaatatatccagaaccggcctcctgcgccacggcccgtgaacagcagaccctgctgatggaccgattctggccggtgaccatcctgtgcctgctagtcgcgctgttcctgcaaatcgccgtcaactatgcgaacgactattccgacggcatccgcggcactgacgccgggcgtgacacggacgaatcgaaatcaggcaaaccccagcgactgaccgcatccggactggtaccggccaagcatgtactgttcgcggcgatgatttgcgccgccatcgcctgcatatgcggtgttgtggcggtcgtgctcgcccaagcatggtggttgctggccgtgggcgcggcctccttgctggccggctggttctacaccggtggcaagcatccgtatggatacgtcgggctgggagaagtcggcgtgttcctgttcttcggcttggctgcggtattgggcaccgaatacgcgctgtgcggcacggtggacgtcggcggactattgggtgctgtggcggctggcctgttctcctgcctgatcatgatggtgaacaatatccgtgacatcgacgaggatcgtgagcatggcaaacacacgctggccgtacggctgggggagtccggcgcgcgtacgttgctgattgtgtgctgcgtcatcgcatggatcatcgccctgctgatgtgtggtacattatggtggccgtggggtgcggtgctgttgctctcgggcaccggaatacctgtgcgcatggtctccagcgtgaataaacgtcaattccgcccggctctgcccgccgccagcttccagaccttgctgtttgcggtggtgctggcggttgccgtggcgctatgagagcgaaataataagacgaatactcgtgtttgggcgcacgcggctgtagactgaaccgtatgacttataaactagtactgctccgtcatggacagagcgcatggaataaaaccaaccagttcaccggctgggtcgacgtaccgctgaccgagcagggtgaagccgaagccaagcgtggcggcgagctgctc

SEQ ID NO: 538 - DNA, 19433 bp, Unknown
  R48_24m  MAG No. k141_63057
cgccgagcttgcggtgatcgcgcttggcggcctcctcgagacgggtctggtaggccttgaggtcttccttggtggcccacgcggtgccgtagatgcgctgcatggtcgggttcttctcggaaccacgccagtaggcggcggcggaacgctcgatcttgaaggccttgatgtagcgggtgttcggcaggtgcggaccgcggcacaggtccttccaaaccacattgccatcacggtctacgttgtcgtagaagctgagctccttttcggagatctcggtggcggcggccgggtcgaggtgtgcttccttgtcttcgatcagttcgatcttaaagggctggtcggcctcttccttcagagcctcttcctcagtcacggaacggcggcggaaggactgggaggacttgatgatgcgctgcatgcgcttctcgatgtccttgaggtcgtccggggtgaagggctggtcgacctggaagtcgtagtagaagccgtccttgatgacggggccgacgccgagcttggcgttcgggtagacttcctgcacggcctgggccatgacgtgggtggccgagtgacgcatgattgcgaggccgtcttcggagtcgagggcgatggggtcgacggtatcgccctcgttcagcggcgtgtacaggtcacggttctcgccgttgatcttgaccgcgatgatgttcttgtcttccgcgaacagttctacgccggtggtggttgcttccacctccttcgcttcgccgttgacggttatggagatggtagcttgcgccatgatttgtcctttgctatcggggcccacggtactaatgtgcaggcctggactggttaatcaacgtaggacacgataggttgggcgtgcgacaaataccaccagcatctgaaccaatacgaaaaaaacctcgccgaagcgaggtttcgttgtggagcggacaacgggactcgaacccgcggtctcaaccttggcaaggttgcgctttaccaactaagctatgtccgcaaaggaatccgccgtgagaagcggaatccagtgggcgatgtaggaatcgaacctacgaccccttcggtgtgaacgaagtgcgctagccgctgcgccaatcgcccgaatactcggttcttcagttatatccagtcgaattgcttcgactttcgtgggcgatacaagattcgaacttgtgaccccttccgtgtcagggaagtgcgctaccactgcgccaaccgcccgggtcatatttcatcccattgaattgcttcgccggtctgagaggtgggtacgagagtcgaactcgtctatacggctttgcaggccgctgcctaaccgcttggctaacccaccgtaaggtctgtcaactcacggacctagagcggacaacgggactcgaacccgcggtctcaaccttggcaaggttgcgctttaccaactaagctatgtccgcgtgtgtttccttggcgaggtctccctgccgaagcacgagtgtttactatactcacatgcgtgtagttcgtccagctgcggcgtgtcgcctgtaattgcatactctcgcttatggctaaagcgtgcgcttcgggcaatgaattccagttactctagaggtatgagtgaagcagcgaaggacaccggcgcagtattgatcgccgcattcgagggatggaatgatgcctgtcaggcggcgacgaacgcggtgcgccatctggtcaagcgatatgagtcccgcgagattcgtcatattagatgtgatgatttctatgactatcaggttgcccgtcctatgctgtgccatgttgcgggacgcaccaatcttatctggccgcagaccacgttctacgacatcacgttggacgcaggcaagcatatctatgcgcagatcgcccccgaaccgaactatcggtggaaggaatactgtagccagagtctggccattgccgatgagctggatgtcaatcggatcattacgttaggttcgatgttctccgattgcccgcatacccgcccgttgcccatcgccgtcagcgacggagactgtcaatgcgaaggagaccggtcgtataacggcccggtaggcattccttccgttttggatgtggccgccgcgcagcaaggttttgctcattcctcgatgtgggtgtccatcccccaatatttgggcagcgacgaatgttctgccggcactatgcgattgctggatgcgttgggcaagcatatcggcttcaccttcgatacggcagatctgaagcagaaagccgaacagtggaaggcgcaagcctcgatactggttcgttgtaatgaccagcttcacgattacgtggagcatttggagcacgactacgacttgcagcagaaagccgaggcggaggcttccttgggagcgccccaggccgaacaactagtcaaagaagcagaagcgtttctgcgccagatgggcaattagcccatatatggtgtgctcccgctggatgaacagccctgtgggctgttcatagcagtgcaccatgtgcacgtcgcacaaaatgtcgggagctggctcgcgtagcgagactgagggtggttctgctggcatattccagtgaccacccccagtcagcttcgctgacggctcccgccagcgggagcaccattatattggagtcgtctatcgacccgtcttatgccgcagccgccacggagggatcgatggccggcagcacgcccacaatcagcagcaaggcgacgaccacagccaaaccgatgcggtagatggcgaaggccttataggagaagttcgatacgaacttcaggaatccgatgatcacgatgtagccgagtacgaagctgatgaccatggctacgagggtcggcccccagccggggaacatcgcatcggttttgtagttcttcacggccttgatggcttcgagcaaacctgagccgaacaccgcggggatggccatcaggaagctcagacgtacagcggcctcacgcgtgtagcccagtgcgcgaccgacggtgatggtgccgccggagcgggacacaccaggaatcagcgccatggactggcccaaaccgaagaggaacgcatcacgatacgtcatatcattcatggttttgttctggcgagccttggcatccaccatccacagcagaatgccgaataccaacagcacggttaccgtaatccacaggttgcgcaacgaggtttcgatgacgttctgcagagtgaagccgaggataataatcggaatcgagccgacgataatgttccagccgagtgtggcgtaattgtcgccgcggcccatgcgggccttccaatccttgccgttcttgccgaacaggcagctgaaccagtgagtaaggatattgatgatgtcgtgacggaaatacagaatcaccgcaagttcggtgccgatttggatgatggcggtaaacgccgcaccgggatcagagcccagcatcaaatcgccgaaaatacggatatgcgcgctggaggataccgggagatactcggtcagcgcctgaacgatgccgagaatgatcgcttggaaaaaattcataacccctcgtgatttctaagtatttgatgtgttatgacgatgaacaccctacccaagggggtgtagaacaacactaagaatcggtaacatccacggcttctacaatgaaagtggatatagtacgtaagcgacgaagggagcattatggccacgtatcgcaaaagcagggcattcgcaccggaaggattcttcgaatgcgagggtcgaggactcgaatggttgggagcggctcatgcgcagggcggcccgcgcgtggtgcaggtatacggctggggcaaggattatctggatatcgaacgtgtgggcagcgcgtcccccacgcctcaggcggcacgagcttttggtgcggctctggcccatatgcatgatgtgggtgccgaatatttcgggtctgcgcctgacggatataacggcacatgctatttcggaccattgcaggacccagtgaaaatggataccggcgagtggaccgacccgatcagctatttcgctgatggacgtctgcgcccgatggtcaaccttggtgtgaggcgtggcgagctggataagcgcgatgtcgaactgaccgagcgcgtgattgaagcgttgccggatctgatgggccgagccgcgtccgacaagccggcgcgcatccacggtgatctgtggagcggcaatgtgatgtggaccgccgattccgggcagcccgaggctgtgctcatcgacccggcggcacatggcggtcatcgcgaggaggatctggctatgctgcacctgttcggcatgagctatctgagcgaaatcaccgagggctaccagtccgtgcatccgttgaaggccggatggcaggagcgtatcacgctctggcagctctaccccatcgccggtcactgtgtcttcttcggcggcggctacgtcaacgaataccgctccatgtgccgctccctgctgaagtaacagacttggctcccctctctgaggggagccaagaacgcatccactctcagctcagcgcgtccttcaacttgctgaagaagcctttcttttggccagcctgtggacgggatgcctgggagacgtgcgtggcgcctgaatcatgcgaggcggcgaactgttcgatgaggccgcgctcggtttcgttgagcttggtgggaatcagcacattgacgtgggcgatgaggttgccgcgctcgtccttgttgcggatgttcgtgacgcccagtcccttaagcgtcacagtgtcctcaggctggcagccggccgggatggacacggtcttctcaccatcgaacgtgtcaatggacagatcgtggccgagcacggcccagctcatcggcacctgaatccagcagtgcaggtcgtcgccatcgcgggtgaattgcttatccgccttgatgcgaatgtcgatgtacaggtcgccggcagcgccgccgccctcacccacttcgccctggttggccaaacgtagacgcgcgttgtcgttgatgccggcgggcacggtgacgcccacggtacgtgtggtacgcacacggccgtggcccatgcagctggggcacgggttcttgatgatggtaccgtggccctcgcaacgttcgcagggggcggaggtcatcatctggccgagcatggtgcgcacgaccttctgcatgaatccctggccgtggcagtcggggcaggtgaccggctgtgcgccgccctgggcgccggagccgccgcactcctggcacagggagaacgtgctgatcttgacgtgcgcggtgccgccgaacacggcggtcttcaggtcgatggacgcggaggccagggcgtcgcggccgggctgggtacgcggcaccgggccctgtgagccaccaccgaacgcggaaccgaagaacgtggagaacacgtcgctcatatcgccgaagcccgccccggagaagccgccggcaccggcgttcggatcgttcgggtcgacgcccgaatcatacatacggcgcttgtccggattggacagcacatcgtaggcgttgttcacttccttgaacttgtcctcgaattcagggcccgcgatgtcggggtggtacttacggctgagcttgcggtatgccttcttgatctcgtcgtcactggcgccgcgttccacacccagcgtctcgtaataatctgccacttgattgatcctttgtgttcgtttggtctgcgggtcattgtgccacagacggcggtcagtcttgggtccggccctcggagaggaaggcggtcaaatatctggctacggccctgacggcggccatagtggccgcatagtccatgtgggtcggccctatggagccgacgaaggcgatgggttccgtgtcgttcgtctggctctccgtctcggattcggtttcgggttcgcctacgggatcgttccccgccggttcgcccgccgcaccgctgcgcccatagccactgctgaccacggaggcatgcagtaggccgggggtgtgcatttcggagccgatggccacgcccacgccggatgcattcgtctcctcgcccaggttgctcatgagcttcatcagcacgacctgttcttccagcgcgtcgaagagcggggccagatcggccagggaccgggagtgggccaggtgcgaggtgccggacatgtacagttcgtccgcgcgttcgtccaatgccatcgattcgaaggcgtcggccagcgcgtcggccacgccgcgcaccgactcgtagccggcgctggcggcgatggatcgcacggtctccgcggatttcgatagggacagtccgacacattgttcgttgacggtgttggagagccggttgatctcgtccacggcgggcatggatgcgatggtcaggccgtgctgggccacgcggccggtgtcggtaatcaccaccgcgagcaacgtggtcatggcaacgggcaccatctccacgtgccgcaatgtggccttggccagcgatggcgaggtgactatggccacttgaccggtgatttcggacaacagtcgtgccgaacgctgcagcgcgtccttgagactcaccgatccggacaggaagctgttgatgccgcggcgctgcgcctcgctgagcggcaccacggtagcaagtcggtccacaaagtatcgatagcccttttcggtgggcacacgaccggccgaagtgtgcggctgaatcagatatccttcatcctccagagcggacatgtcgttacggatggtggccgaactgacgccgagatcatggtcgcgcgtcagcgaagtggagcccacgggctcctgagaacggatgtaatcctccaccacggcgcgcagcaccagcatgcgtcttgattgcgtcatgcgcgcctccttatatatgcatacatattcatatcagtcacggttcactcagggcgtaccccgacggtcggttcgccacgccgcgacacgcgggaacccagaaatattgcctctttcttggctccgccacgtgcaggtggcgcacttcaccttagaacattgtattagcactccttaggcttgagtgctaatgcgttcgtttgcagcgtagcaatgttcactgtgaacgctaacagaacacaaactaccaaaacacgccaaaattgcaccgcaacgtcgcaaaccgacgctagcatggtaatcgcaatgtgagggcgtcaagcgcccggcacaagccggatacgcggcccgaccaattggaaggaaagtaatccatgaccgaattcaaggagaccgagctcgacgagcgcgccatcaagatggcgaaggtcctttcggctgacgcggttgagaaggcaggctccggccaccccggctcccccgtctccctggcgcccgtcgcctacacgctgtaccagcacttcatcaagcacgatccgaatgatcccaactgggaagtccgcgatcgcttcatcctttccggtggccatgcctccctcacccagtacgtccagctgtacttctccggctacggcgtgaccctggacgaccttaagaacttccgtggcggcgctgccacccgcaccccgggccacccggagtacggcctgaccccgggcatcgaaatgaccaccggccctctgggccagggcttcgcctccgccatcggctttgcctacggcgagcgtttccagcgcggtctgcttgacccggagaccccgaaggaagattccccgttctaccacaagatttgggccatctgtggtgaaggcgacatcgaggagggcatctccggcgaggccgcttccctggccgccaaccagaagctcggcaacctgaccgtgatcttcgacgccaaccgcatccagatcgaaggcgacaccaacctggtgctggccgaggacgtgctcaagcgcttccaggcctacggctggtacaccgacgagttcagcttcatccagcccgacggctcctacaaggaggacatcgagggtctggccgacgtcatcgccaaggccgaagccgccgccccggaccagccgaagctcatcaaggtccactccctgatcgcctggccgaccccgggcaagaccaacgacccgtcctcccacggctccaagctgggcgccgaggccgtcgccggcctcaagaaactcctcggctacgatccggaggagtccttccacgtcgacgaagaagccctggcccacgcccgcaaggtcgccgatcgcggcctggaggcccacaaggcctgggacgagaagttcgacgcctggcgcaaggccaacccggacaaggccgccctgtacgaccgtctgaaggccggtgaactgccggaaggcttcgacaaggcccttgacgaccttgaggccaccttcgaagtcggcaagggtgtcgccactcgtggcgcctccggctccgtgctcaacgccatcgccgccgtcatgccggaactctggggcggctccgccgacctcggtggctccaacaagaccgacctcaagggcgctgccaccttcgccccggccgagtgcgccaccaagcagtggccgaactgcaacgagttcggtcgccagctgcacttcggcgtgcgcgagttcaccatgggctgcatcaccaacggcatcctgctgggttcccacacccgtccgttcggcggcaccttcttcatgttctccgactacgagcgttccgccgttcgtctggccgccctcatgcagatcccgaacctgtacatctggtcccacgactccgtcgccgtcggcgaggacggcccgacccaccagccggttgagcaccttgcttccttccgcgcgattcctcagcttgaggtcattcgcccggccgacgccttcgagaccgccgaggcttaccgttacttcttcgagaagaagaacaccctgcctggcgccatggttctgacccgtcagggtgtcccggttcttgccgagaccgctgccaaggccaaggacggtgtcaagaagggcgcttacatcctggtcgacaccgagggtactccggacgtcatcctcatggcttccggttccgaggtccagtgggctgtggctgccgccaagaccctggccggcgagggcgtcaaggctcgcgtcgtgtccgtgccgtccatggaatggttcgaggagcaggacgccgagtacaaggaggctgtgcttccggccgctgtcaaggctcgtgtctccgtcgaggccggcgttgccatgccgtggtacaagtacctcggttcctacggcaagcctgtctccatcgagcagttcggcctgcagggtgacggcgctcagaacatgatcgacctcggcatcaccgccgagcacgtggtggaagccgccaaggcctccatcgccgaagtcgaagccgccaagtgagcaactaagcaataattcaataattgttggctcccctccctgaggggagctgtcaggcgaaagcttgactgaggggagcaatgcttgagcccactcccctcagtccgcgttgcggacagctcccctctcccaggagaggggagcctagggcttgaatccaaggagaaaataaatgactgaagcaactcagcgtacgtccgacaacggcgtttccatctggctggacgacctgtcccgctcccgcatcgagtccggctccctgcaggacctcatcgccaacaagaacgtggtcggcgttaccaccaacccgtccatcttccagaaggccctgagccaggtcggcccgtacgacgctcagctcaagaagctcggcaaggttgacgttgagaccgctgtccgcgagctcaccaccaccgacgtgcgcaacgccaccgacatcttccgcgagatcgctgaggctacggacttcgtcgacggccgcgtctccatcgaggtcgacccgcgtctggcccacgacaccgagaacaccgccaagcaggctgtggaactctgggagaaggtcaaccgtccgaacgccatgatcaagattccggcaaccctcgaaggcctgccggccatcaccgccaccctggccaagggtatctccgtcaacgtcaccctgatcttctcgctcgagcgctacgagcaggtcatcgacgccttcatcgagggcatcgcccaggctgacgccaacggccacgacctgaagcacatcggctccgtcgcttccttcttcgtctcccgcgtggacaccgctgtcgacaagctgctggaagccaacggctccgacgaggccaaggctctggagggcaaggccgctgtggccaacgctcgcctggcttacgagctcttcgagaagaagtttgccgaggatccgcgttgggccgacctggctgccaagggtgccaaggtccagcgtccgctgtgggcctccaccggtaccaagaacgccgcctactccgactgcaagtacgttgacgagctcgttgccaagcacatcgtcaacaccatgccggagaagaccctgaacgctctggccgaccacggcaacggcgctccgtccatcgagggcacctacgaggagtcccacgccgtcatcaacaagctggctgagctgggtatcaacctcaaggacgtcactgacaagctggaggccgacggtgtcgccgccttcatcaagtcctgggattccgtgctggctgacgtccagtccggcatcgaccgcgtgaacgcctgagattattagctgatgcgcatttcgcgcattaactgattagctcacagaagctccgaccccaaccggtcggggcttcttacgtttgttgctacagtagtacgagcacatgagagaaaggccgaaccgtaatgaacaaacttgtcgcacgccagcggctggtgatgacctttaccttcttttcgatgttcttcggagcgggcaacctgatcttcccgccgtttgtcggagctcaggccggttccgcgaccataccggcggccatcggcttcatcgtctccgcggtcggcctgccgattctcggcgtgctggcggtcaccttcgccggtggcttcgacaaactcgccggccgggtctcccccaaattcgccttgttcctcggcttggcgatcatgctcaccatcggcccctgctttgcgattccgcgtacggcgaccacctcgttcgaaatgatggtggcgcctttcgtgccgtcctcctacggctggctggcccaactcatctactcgctcgtgttcttcacactggcgttcctgttcgcccagcatcccgaaaaactctccaaagtgctcggccgattcatgggaccgttgctgctggtgctgattgccgtcctgttcatcgcctgcctaatccacggtatcggtaccccggccaaaccgatgggcgactactccacaaaccagattgcacgtggcttcctcgacggctaccagaccatggatctgctcgccgcactctatttcggcatcgtgatttccgcgaatatccgcacccagcaggtcgatgacgaatcgcaagtgcagaaggagaccgcgtatgccggactcggcaccggtgtgctgctgatcgtgatctacggcgcactgagctacgtgggcgtggtgtccggtgccatcgccaccatcgatcccgccaaagacacgggcgcgaccgtgctcaccaatctcacctcgtccttgttcggcgcgttcggtaccgcgttcctcggtatcgtcttcgtcatcgcctgcctcaacgtatgcaccggactgatcggtacctgcgccacctacttccacactcggttccagaccgttgcagggagaacgttgagctaccgcacctggcaggtcatcttcaccgtgttcagtttcatcgtgtccaacgccgggctaagcgcgatcatcaaggtttccgtgccggtgttgtccgcactgtatccgatcgccatcgtgctggtgctgctggcgctgacccacaagtcgctcggcgcgcgattcccgcatgtctacttctggaccgtgctgctggtgggcatcgactccttcgccacctgcatctccagcctgatcaccgtcttcggcggctccatcggctggctggacacgacgctggccatgctgcccttgcagcaataccagctcggctgggtggtcccggctatcctcggtgttgccattggtatcgccgatgctccgcgacggtagttcttcccggtctgtgccggagtctggcggtcggtcggtgatggcggttgttgcgacgctcagcggtgccggtgtatcgttcgcaccactatatgagcgcatttggggcggcatgatgctgcatccgaactgtccggcgattggcagaatgacctactatctctcgggccaagcaactgacgattatggagtctgcgtcacctcaccactgtggtttatgacggtgactgcgctgagtgttgtcgcgattctctgtctgaccgttgcgggagtacagggcttttcgcgccatcggctctgttcccgttgccctgttctggtcaggtctcacgttctttacctacagctacaacactggtagacacaccgatttctgcccagcgctatcggcaactgacaatgcaggtcttgtcgcttattgcatcggccgtgaagctttgggactgctgaccgtcgtgttgtgcgtgctgccattgttctccctgctttcggcgattatggccatcacgttggctgcgtacgacgcgacaccaccggcataaaatctccttcatatcacgaaacaacgggcacccgttttgcgaggcattctatccgtcccgtgtttcgcaacgcatgagacggcacatccattgaatcaggagtctagaccatatctcgccgaatcttgcggtaggtggcatagaacaggaagccggccacgatgccggaggtggcgtcggagatgggttcggcgatgaagatgccgttgacgccgatccagtgcggcagcagcagcgcgagcggcacgagcaggatgatcttgcggaagatggccaagaacaccgactgtttggcctggcccatgccgacgagtgcgcattgcgcgcccatctggatgccgaagataccccagccacagacgaaaatcggcatcatgcgggtcacgatgtcgatgaccgtctgttccgaggtgaaccatgaggcgaagaagccggggaatgtggcgagcacgttcgcggcggccgctcccctgacgccccatccgaacacgaaaatgaacacggggtcaagaaggatggatatgccggtgccgatgagtacggagaccatggccacagtggtttcgccaactgcagcagcacggtgagggtcagggctatggcgatgaggaacgcggcgctggtgccgaggatgcgttcggctttcttgaagttgccgcgcccaagttcaatggaggcgcgcggcgcgccgcctgcgccgatcagcgaggcgaaggcggtgacggccggcagaatcgggaagcagatgcccacgccggtcatcgccgcgttgcccacttcggggatgtgcccgatgaacagtcggtcgatgatcgtgtacgaggcgttcgccgcctgcgccacgatggtggggaccgacatggtcagggccagacggggcaccggtttggtgcccagcccggcatcgatcgtgttcgcctgtaccaaggatcagctctgccagtagtagctgaagaagtcggcgagctcccccatggtttcgtgcagcatgcccatgcgcggcaggtacaccacgcggaagtggtcggggcgatgccagttgaacgcgccgccgtggctgatgaggatgtgcttgtcatgcagcaggtcgagcgcgaactgctcgtccgagtggatgttgaagcgtttgacgtcgatcttcgggaagatgtagaacgcggccttcggcttgacggcggtgatgccgggaatctggttgagcatgtcgtaaacgaggtcacgctggtcgtgcacgcggccgcccggcacgatgtagtcgttgacgctctggtggccgccgagcgcggtctgcaccacggactgggcgggcacgttcgagcacatgcgcatgttggcgagcatgttgaggccctcgatgtagtccttggcgatacgcttgttgccggacaggatcatccagccgatgcggtagccggcgatcatgtgcgatttcgacaggccggagaaggtcacgcagaacaggtccggggccatcgaggcgatggagatgtgctgcaggccgtccatgacgaggcgatcgtagatttcgtcggagaagatgatgagctggtgttcacgcgcgatgtcgacgatctgctggagcacttcctttgggtaaagtgcgccggtggggttgttcgggttgatgatgacaatcgccttggtgttgctggtgatcttggagcggatgtcatcgatgtccggataccattcggactgttcgtcgcacaggtagtgcacggcggtgccgccggccaggttcacgcaggcggtccacagcgggtagtccggggagggcacgagcacttcgtcgccggtgtcgagcagcgcggacatggacaggttgatgagctcgctgacgccgttgccggtgtagatgtcgtcgatggtgacgttcgggatgttcttcagctgcgcgtactgcatgatggccttgcgcgcggagaacaggcccttggacggcgagtagccttcggtgtcggtgagctggtgggccatgtcatagacgacttcgtccggcgtgcggaagccgaagggtgctggattgccgatgttcaatttcaggatgtgggtgccgttggcctccatgcgcatcgcctcgtcggcgaccgggccgcgcacgtcgtagagcacgttgtcgagcttgtgcgatttgccgaaggtacggcggcggcccacgggaatctcgctgtccgtcaggggcttggcggtgcccgtggcaagcggcgtggcggcgtgttcgccgtccgtgacgctgttggaagcgtccgagttcaattgcggggtggattcctcgccgcgcagccagttcgcgtcgacgtccagttcgctggccaggaattcgagcacgtcttcgcggggcatggtcttgccggccacgtattggctgatatggctcttgcccatctttacgccacgatgttcggcggcgtgcaccaaatcgacctgcttcaatcccctactgttcatcgcattgcgcagacgttccgcaaacaccgatacgctcatatccttatgcctccaaccgggagttcaatttatcttttgaacaacagttcaaagcatactcccggttcaacacaagttcaattttggcgtgttctcgagtctcggccggctcagcccaactgcgcttcaatccattgggcgacgccgtcctcgttgttgggcgggcagatctcgtcggcgatagacaacaccttggggttcgcgttggccacggccacaccccggccggattcgctcatcatgttgatatcgatgaggtcgtcgccgaaggcggcggtctgttcgagcggcacgtccagtcgttcgcacagcaggtgcagcgcgtgctccttgttggcctgcgggttcatgagcatccacatcacgccttcgctaatggagatgtcgaagtccggcggaatcagcgcacgcagctcgttccactgttcaggctcggggaagatggtgatcttatccgccacgccttcgggcacgtcgtggaagttcgtgtattggaaggcctgtgttttccaatacacgcgcacatcgaagttggtgtagcgcacgtcgttcatcacgatgccgagcttcaggccgggcatgcgatcgagcaggaacagacagacttcgcaggcacgccgtgaggagaagccaatcttgatcaaatggttctcatcggccggcgtggcacctgaggtgagcaggtcgaagtcggagtgggccgggtcgaaatcgatgagggcaccgttcagatagattacggcgtccaccggcagtttttcggcgaactggaggccggtactcaccggccgcgcggtggcgatggcgaatttcagtccggcatcgtgcgcgcggttgatggtgtcgatgctgcgctgggtgatgaaccggtcctcgaatacctcggcgtcgtgcagcaacgtaccgtcgaggtcggcgaccagcagtcggggttgtttcggtgtgatggcgtcgagaatcacagcagcccctcgcagtgttcacgcacgagttcggcggaatggtgcaatttggcctgctcgtcctcgctcagatcgagttcgacgatctcgttggcaccattggcgcgcagttcagtggggacgccgaggaacacgtcatgttcgccgtattcgccgttcagcagggtggagacgggtacgatgcggcgttcgtcccacaggatggtctgcacgatgccggccacggtggaggcgatgccgaagttggtaccgcccttggccgcgacgatctcatcgccacgggtgcgggtcttctcttcgatttcggtggtggacacggaggcgaaacggtcttggttgtcggccaggaagcgggcgaatggcttgccgccgagcgagacggtggaccatgcggtgaactgggagtcgccgtgctcgcccatcacgaagccgcccacgttacgcgggtcgaggccggtctcttcgccgatgatggtcttgagacgcgaggtgtcgagcgcggtgccggtgcccagcacctgggtgcgcggcaggccggaacgtttccaggcataccaggccatcacatcgaccgggttggagaccatgacgatcacgccgtcgaagccggaggccatgacgttgtcgaccacttcgcccacaaggcccacggtgaagccgagttcggccatgcggttggagttggccggcggcttgcggcccacggtgatgacgacgatgtccgcgtccttgcagtcggcgtagtcgccggcgcgcaccttgacgtggcggtcctggaattcgctgccgtcatcgaggtcgcgggcctcccccagggctttggcggcggagcggtcgatgagcacgagctcattgcacaggccgtgcgtgacgatgccgaaggcggcggtggcaccgacctggccagtgccgacgataacgactttgttgcggttcatagtgaccatggtgatgtcctttcgtaatactcgatagaacgcatacgacccatgaccgacggtaacggtcatgggtcgcgagcgacaagtctatatggcgtgcaagccgatcagccgaggttgaacttggtcatcatgtcgaggccgatgatcaatgccacccacacgagagcgatgataacggtccaacggttcaggttcttttcggcgacaccggaagtaccggcgttctgggtcagaccgccgccgaacatgtcggacaaaccgccgcccttgcccttgtgcataaggatgagcagggtcagcacgaagctgagcagcacgacgatgacttgcagcgtgatcttaagagcggtcacagggtacctccggattgattggactgttgaccagcatagcgcacacacgggaaaaccgtggtattagttccgtgatttcgtggatttcagtgccagtcgagcgattttggcgagttcctcaacatccagggccgcccctccgatcaggaagccgtcgacgtcgggttgggaaatgagttccgccgcgtttttcgaggtgaccgatccgccgtacaggatacgtacgctatcggataccttcgtgccaaaagtggtcttcaaatcgttgcggatggcgtttgcggcatcctgggcggattgcggagtggccaccatgccggtgccaatggcccagacaggttcgtaggccacgatgagttcggcggcttgttcttcgttgagatcgcgggtgacgtctcgtacctggcccacggcgaaatcgagttcaatgccttgacgtcgttcctcgaagctttcgccgacgcacaaaatcggctgcatgccggcggcgagcacggcacgtacctgatcgacgatattggcgtcatcttcaggatggtatttgcggcgttcggagtggccgacgatgacgtacgagcagccgagatgggcgatcatgtccgcggacacatcgccggtgaaggcaccttgggtggtcacggaaacggattgtgcgccgtaggcgacatggagcttgtcggcttcgaccagcacctgtacgctgcgcaatgacgtgaacgaggggaaaagcgcgacttcgcagcgtttgaagtcaaagcgagcgtcacgcaacagccataccagcttctgcacgaagtaagtggcttcaagatggtcgaaattcatcttccagttgccggccaccaacggaatgcgtttggacgccatatgtttcccctctaaaaaatacgtagctcccctcaaggaggggagctagaaaatggattactcaagcaccttcagaccagggagctccttgccttcgaggaactcgagggaagcgccgccaccggtggagatgtgggagaagccgtcctccgggaagccgaggttacgcacggcggaggcggagtcgccgccaccgacgatggtgaacgcaccggctgcggtggcgtcgaccagaccctgggccacggccttggtgccggaggcgaactcaggaacctcgaacacgcccatcgggccgttccacacgacggtcttggagtcgacgatcttgtcgtggaagagcttctgggactccgggccaatgtccagacccatcttgtcggccgggatggcgtcggcggcaacgacttccggagcaaccggggtgtcaccggccgggaagccggcgttcacggcgacgtcggtcggcagcacgagctcaacgccgttcttctcggcggtctcgatgtagcccttgaccttctcaagctggtcctcttcaagcagggaggtgccgacctcgtagcccttggccttgaggaaggtgaacaccatgccgccgccgatgaccagacggtcagccttgtcgagcagattctcgatgacgccgagcttgtcggagaccttggaaccgccaagcaccacggtgaacggacgctccgggttctcggtggccttggacagggccttgacttccttctcgaccagcaggcctgcggcggccggcagatcggcggcaacgtcgtagttggagccctgggcgcggtggaccacgccgaagccatcggaaacgaaggcctcgccgagggcggcgatcttcttggcgtaagcggcgcgttcgtcggcgtccttagaggtctcctccgggttgaagcgaacgttctcaagcagcacaacatcgccatcgttcatggcggcgaccttggcctgagcgtcctcgccgtaggtgtccttggccagcggcacgttggtgccgagcagctcgccgaggcgggcggcaaccggggccaggctcagctcaggaacgaccttgcccttcgggcggccaaggtgggccatgaggatgaccttggcgccttcttcgcgcagggtcttgatggtcggcagagcagccttgattcgaccgtcatcggtgatggtggtgccgtccagcggaacattgaaatcagcgcgaacca

SEQ ID NO: 539 - DNA, 10702 bp, Unknown
  R48_24m  MAG No. k141_64590
atcgacatgactacctcccgacatcggaaaacgattcgcgcgtctcgctgtgcgcttgctgattccagtctaagggcatgtcccgttcgccaagcgcgggtacaacaaaccgttgttcgcacttgcatcccggaggaagaaacggctcggtcgaacctatttcctctccgcacccttcaatgctcccggttcctctgactcctttgcaagcgcggcggacgggataggcacgctcacgtatggggttgcaccggataggacgttgtcgtagaagcgctgtttggcgtcgatgaagtcgatggaatcctggatttccgcgagctgttcgaccagccgcgcccgcttgtcggcaagcatccgcttgcgctcggggatgctcggctcgtggaggagcgtaaggggcgcgagtaggggttcgcggctttgccgcggtctctccctcacccggctacaccgggagctccctcgtcagagggagcttaaattcggtctggttataggcccatgggcttcttgggctttttgtcgctcatgagcatgaggaagctgcgggactgggcggtgatcatgaagcccgcctcatagctcagttccggcccattcgggttgtgcgtatccacgaccagctgccatttgcggccgtatcgctcatccggcagggtgaacataatcggctcgtaatgcgcgttgaagatcaggatgaagtcattgtcgaccatccggttgccgtaccagtctacctccggaatatccgaaccgttcagatagatcatcatggagaacgcatgcgtgttctgccagtcgtccatatccatgatcgaaccggtgtggtcgaaccattcgacctgcggaatcatgttcgaatcgtcgccgggctcacggcctgtgaagaagcgacggcggtgcaacaccggatgatccaaacgcagatgaatgagtttggaaacgaaggcgagcagttccttgcgtcccttgtcaagatgccagttggtccaggagatctcgttgtcctgacagtaggcgttgttgttgccctgctgggtgcgggccacttcgtcgccaccgcaaatcatcgggataccctggctgaacagcaacgtggcgaacatgttgcgcatctgacgctgacgcaagtcgttgacgtccggaatattggtcgggccttcaacgccgcaattccaagagcgattgttgctctcgccgtcgcgattgccctcgccattggcttcgttgtgcttttcgttgtagctgaccaggtcgttcattgtgaaaccgtcatgcgcggtgatgaagttcacggacgccaccggtcgacggccgttgacctgatacagatcggaactgcccatcaggcgcgaggcgaattcgggcagcgtggagggctgcgagcgccagaagtcgcgcacggtgtcgcggtagcggccattccattcggaccagctggacgggaagccgcccacctgatagccgccggagcccagatcccacggttcggcaatcagcttcacgcgcgagatgatcgggtcctgctccacgatgtcgaagaacgcggacagcttgtcgacctcctggaactggcgtgccagcgtggcggccagatcgaagcggaagccgtcgacgtgcatttcggtaacccagtagcgcagcgaatcggtaatcaactgcagcgcgtgcggcgagcgcataagcagcgagttgccggtaccggtggtgtcgaagtagtgctgctggtcgccttccaccagtcggtagtaggaggcgttgtcgatgcccttgaagctcagggtggggcccatatggttgccttcggcggtgtggttgtacaccacgtcgaggatgacctccatgccggcgtgatggtaggccttgaccatggacttgaattcgttgacctgctcgccgcgctctccggaggaggagtaggcgttgtgcggcgcgaagaagccgatggtgttgtagccccagtagttcgacaggcccttctcctgcaggaaggagtcgttgacgaactggtggatcggcatgagttcgatggcggtgacgccgagcttcttcaggtattcgatgacgctcggataggccaggccggcgtaggtgccgcggatgtccggcggcacgtccatgttgaggttggtcatgccgcgcacatgcgcctcgtagatcaccgaatcgtggtacgagatgtaggggtgctggtcgttgccccagtcgaaatacggattgatgacggccgacttcatggtgtgggcggccgagtcaaggtcgttcatcgccgaggtgtcgtccgggcttttgaaccagtaggagaacaggctttcgtcgccgtcgatgttgccttcgatggccttggcatacgggtcgagcagcagtttgttggggttgcatctgaggccgtgcatcgggtcatagggaccgtagacgcggtagccgtagcgttggccgggctggaggccggggatgtagttatgccatacgtatgagttctgttcggtcatttcgatgcgcgtttccgcatcgtgctcgtcgaacaggcatagctcgactttctgcgcaacctgtgagtacagcgcgaagttcacaccggcgccgtcatagctggcgcccagcggatacattgatccaggtctgatctgcatagttttcagtatcccactttcttgtgtcactgatgtgccggggagttgaacgtcaggagaacagcgacggcttgtctttgtcggagttcctggcgatgagtctgcgtaacgcctcatgctggatggcgatcatcgaattggatgaggtgatgcgcgtggcggcaaggtcgctccacggaatccacgcggattccacgtgctcgtccgcgtcgaaatggcgctgctcccgtctgaacgggcccaaatgcaacaccatgatgtgggccagttcgtcggtcatgccttcggacgagtagaaatcgcccacgaagtcaacacccatggtgtcacggtccggcaccacgccggtttcctcggccagttccctcagggccgcgtccatgatgtcctcgccctcgtccatgagaccggcgggaagcccgtaggcgaacatgtccgatccggcacggtattcgcgttcgatgaggtaacggtcggtggacatgtcgtgcacgagcatgaccacacagggggcgtgacgcagcacctggcggccgatctcgtgttccttgccctgcttgtcggtcagagcgatgcgcatgtcgtccacgtggaagatgcgcccggtataaacggtttcgctactgatcactttggcgggcacgtccatgtcgatgccgtccgaggaggcgttcagcttatggtcgagccgatgctccagttgttcctgcttgcttcccccaaacatgtcatctcctcggaaaaaacgttttcgccacgtcactatagcgccttaatcccgatgcgcggtaatggacagcgtccatggatcggtcgtgtcgtggaaccactcgacttcaggccttgctccggtcgcttgttcgatggcggccggcacgtcatcgatcgcgtagttgaaccacatggattcgatggcggcatgaggggtgttgatgaagcagggacgcacatggctctcccccgccattccatggccgagcatgatgccttgggtcctcatacgggcttcataccgggcttgttcgatggcgtcggtcaccgggtggtgacgcaaatcgctggttacgtacacgtccgcaccggtggcacgcacctcgttgaacagggagtcaccggagccaggcagaatggccacatactgaacaaaagtgtccgaatcgccgcatacctggatgccgagcgcggtggtcatgccatgatcggacacttcgtcgaatacacactgagcgaaatccttcagggcaacaggcttcggcaaacgacccacacgccccaagccgaccggatgagaggcgttggcatcgtcaatcggcacgagtggtttctggtcgatgagtccgaagtagtcggccgccgcctgccccacgccgcgatacgcagcgtcagcattggtgtgccctacccacagcccgcagccgtgctggtagagcctgcggacgatgtcgccccggaaaccgagtccgctcgtctcgtgtacggaacggaagaacaacgggtgatgggtgatgagcaggtccgcgccagtagcgatggccttgtcgatgatggcggaggtcgggtcggcggcgaacacgatgcggtgcacgtcgtggctcagatcgccgacgatgagacccggctcatcccattcctcggcgtagcgcaatgggtacagggtctcgagaacgtcgatgacttgcttgagattcggcatatgtcccattgtagtgggctattgcggcaagggactcattctgcaattgcggacaagccatgctcgtgctcttcattgctcgactatcggctcgccttcgcctacaaacaatccactggactgtttgctcaacggctcagcacccctcacccgaggggagctagaaattgtcagtgtgcagcgagctgccagtcggaaccgatgccgcacgatacgtccagcggcacggcaaggtcgacggcgtgttccatggcgttgcgtaccagttcggtgacctggtcgccttctcccggcgcgatttccactaccagttcatcgtgaatctgcagaatgatacggctcttgacgtgggcctctgccaaggtctgcgcggcgcgaatcatcgcgatcttcatgatgtcggcggcagatccctgaatcggtgcgttgagtgccgcacgttcggcggcctcacgcgcaacacgattggtcgaatgcagggccgggaagtagcgacgccgtccgaaaatggtttccgtataccccttctctcgggcattggccaccagcgattcaaggtaatcgtgcaccttgccgaaggtatcgaaataccggtttttcaacgcttccgcttcacgtggcgcgatcttgagctgctgggcgagaccatacgtgctcagaccataggccaatccgtagctcatggcttttacgtggctgcgctggtcgccggtgatctggtcgaccggcagcttgtagaccatcgaggccacgtatttgtggaagtcggctccggagcggaacgcttcgatcagcgcctcatcaccggacagatcggccatgatgcgcagctcgacctgtgagtaatcgcaactcatcagggcctcgtacccctcccccggcacgaacacgccgcgaatctcacgaccggcggcgttccggttgggaatattctgcaggttcgggtccacggagctcaatcgaccggtggcggcaacggtttgctcgaaagtggtgtggatgcgctcatctgatgtgttggtggcatcgatcagcgtttggacgatctgcttgagcttgttaatctctcggtggcgcagcaacgccccgaggaaaccgttggcccgctcattgtccactgatttgacatacagatcctgcaatgcggccgcattcgtggtgtatgagccggacttggtgcgtttggtgggcttcaaacccatatcttcgaacagcaccttctgcagctgcttggggctttgcaggttgatttcggtgccggcatactcccaagccatttcctgcgcctgacgagcctcggcggcaaactggtcacgcatggaaacgagtcgaacgctatcgactttggctcctgtgtgctccatgccgtgcagcacgcgggaaacaggaagttcaatcgcgcgcatcagccagcattgttcacgctcgtcgataatcggcccaagcgtgacggcgaggctgcggataatggccaaatcgcgcagacgatgttcgttcggatcttcttcgacctgatcgtcatcgaagtccaacgtgccttgcgaaggctgttcggtttcggtgaagtggatgtcgaggaagtgctcggccgcctgcttgaggctatcggcgtggaaatccggttgggccagatacccggcaagcttggtgtcgaacatcggcaggtccatgtcaagatctaccgcgcccagaagatgcagcaactctttatacccatgcacgatggtgcgggagtgctcgctttccaggaaccgcgcaagctgtgctcgcagggtatcggtgattggaaggggcactatggccgctgatgttgccgtggccacggcaatggtttgtgccgtggcacgccccggcctttcgtcgccccacgcggccacggtccaagcgcggccgaccgcgtcgccgcagacggcatgccgctgcgatccatcgccatagtcggaaaccgtgaaatcggcgatttcaccgggaactttgacctcggcgcgatgggccttgacccattcgtcgaactgctccgaagaggtgatgctcgtgggttccggcaggttcagatcgagactgttatcctgctcgtcctgttcattattcgtagactcgccggctccgtatgtgttggaaaccttggcaccggtattgaaggttttcagtacacgactcctggtacgcggtccgaattcaagctccttgaacagggcgtcgatttgtgccacgtccacggtgccgaatgtcagatcctcaatatcgacgccaagatcgacatctcgtaccagtgcgttgactttgcgattgagcttgacctggtcgatattggcccgcagcgattcgccttttttgccgccgatttcatcggcgtgctcgcaaatgccgtcgagggaaccgaattggttgatccacttggccgcaaagccatcgcctacaccgggcacaccgggaatattgtcggcggtttcgccgcggagcgccgccagatccggatattgtgcgggagtgactttgtatttgtcgatgatggactgcggcgtcatatgcttcaggtctttgaagtgatggcccgggtacaacacggtgacgttgtcatccaccagctggaaggcgtctcggtctccggacaataccagtgtgtggtagccggccctgtctcccatggtggcgagggtggcgatcacgtcgtcgccttcgaatcccggcttctcgatgtaggtgacgccgagggccgtgagcatgcgttgaatcaatggcagctgggtgagcagctcttcgggagccgcctcacgggtgcctttgtattgcggaagcatctcattgcggaatgtgccgcccttcacatcgaaggcgacgcccagatggtcggggttctccgcatcgatcacctgcgcgagcatggtggcaaaaccccagacggcgttggtggcctggccgctggaagtactgaagttgtcgaccggcagggcgaaaaatgcacggaaggccagcgagtggccgtccaccaccagcaatgtttcattggtgggtacggtcacgctggcctctcccatagtgtgtttgtgttgctttacgactcagcacggtgatgccgataatcagcgttcgcccgaatcagaaggcttcggatcgccgtacttggcgatgatggcctgagccaggcgcttcttggggatgcgctggtccatggaggtcttctgaatccaacggaaggcaccctgctcggagaagtcagccttgtccatcagcagacccttggcgcggtcgacgagcttgcgctcctcaagcgtgtcttcggccttcttgagcttctcttcggtttccttgagctggtcggtggtttccttgagcttgcgttcgctgcgctccacgttgtccagcagatcgttgatctcggcgaaacggcccatggccacctcgagggtcggcagcaacttggattcctcgtacggcttggtgacgtatgccatggcgccggcaccggtggccttcttcaccagatcggtctgggagaatgcggtgagcatgacgacaggggcgatgttctcatcgcagataatgccggcagcggcgatgccgtccatacgcggcatcttgacatccatgcacaccacatcagggcgatacttgcgggtcagttccacggcttcctcgccgttggcggcctgaccaacgacctcataaccgttgtcttccagcatggcgaccagatccatgcggttcacggcttcatcctcggccacgacgacggtacgcggaccatcctcggccacggccttgcgctcagcaggttcgctttcatcggctacggccttgagttcttcgtcggtcagcacctcatcgacgttgatactcggttcttcggacttcttccttgcagccatgccaacctctttcttgaattacccaacaatggggttcgtaataatttcagcgaactcctagctaaagtgccctcggtgggactcgaacccacactgcgcagattttgaggctgcttcctctaccaattgggatacgagggcgtgcctaagcactctgaagagagtagcataccgattcgactcctgcgacacaagacacgcgccagtcctccattttcccccggtaaaacaggcgaaacacgtcgatatcgtggacggcgtacccgtgtgttgcccgttcttctgcgtggtttcaccgcttacaatgggctgtagtttcgatgtatcgcttttgttaggagggcttatgagcaacgaaacttaccgtcagttcgatccctggcgcccctctccggtcaaggagatttcccgtagacagattgtggagacgcattatttcaatgtcgatcacgtctcctatgagtcgaatcagatcggttcgtttgaacgctactttgttcaggagaacaatggcgacactgtggctgtgctggccgtcaccgatgacggcatgattccgctggtcgagcagtatcgcatcgccaaccatcgttggacgttggagattccggcaggccacgccaacaacccgtccgaacgcccgaccgatgtggctaagcgcaagctggccgaagaggctggtttcgatgcctccaagcttacgcagttcacccgttttatgaacacgccgagctattccacccagcacaccgcaatcttcttcgccaccggacttaccccggcttcccgtcaggaaatcggcccggagactccgcgttccgacgtgcgtatggtgtcggtggacgatgcctatgagatggtggtcaatggcacgattgtggatgccaagaccatggtcgccattctgcgtctgaagagcggcacgctcgatcatctcaacgactagtcaccacgctcgatcatcgcggtgactacgtgccattgcaatcaccgcacaatcgcaacataacggataacgaaagcccccatccactttctggatggggggggctttcgcgtgctatgtgctagctgtcagcagctaccagcggcctgaaatcagtcgcaagcgccaacggtgtgcacgtagatggagtcggtgcggcccggctggtgatcgccctgagcagagctcaggatgacgatcttgtcgccgtcagcaaccttgccggcatccttgaggaccttgtccgtgtagatcatcagatccttgcgggacttgtcgtggtagtcctccttgagcaggaaggcttcggtgccccaggacagagccagccagtggtaggtgtgctcgttgctggtcaggccgtagatcggggcggccggacgctcacgggagacgcggtgcacggtggcgccggtctgggtgtaagcaacgatggccttggcgttgagcttgtcggccaggtccacggcggcggaggagacggcgccggtggaggacatgtcgaggttcttgagctccgggatgcggtcgaagccgtggtcggtggcgtagccggagatgcgcgacatggtggccacggtcacatccgggtacttgccgacggcggtctcgttggaggtcatggtggcgtcggagccgtcgaggacggcgttggcgcagtcggaggcctctgcacgggtcgggaccggggagttcaccatggagccgaggacttcggtggccacgatgaccggcttggcatactggcgggccagctcgatgatgcgcttggtggccagcgggacctcttccagcgggcactcaacggccatgtcgccacgggcggccatgacaccgtcgaaggtcttgacgatctcttcgaggttctccagagcctgcggcttctcgatcttggcaacgatcgggatgcgacggccttcctcgtccatgatctcgtgggcgcggtcgatgtcggtggcgaaacgcacgaaggacatggcgatgatgtcggcaccggtgcggatggcccaacgcaggtcagcctcatccttctcggtcagggccggcagggagacggcgacgcccggcaggttgatgcccttgtgggaggacacggggccggccacgatgaccttggtgtacacgttgttgccctcgaccttggtgacctcgagacggaccttgccgtcatcgatcaggatcgggtcgcccggatggcaatcgcccggcaggcccttgaaggtggtggaggtgatgtgctcgtcgccctcgacgtcgtcggtggtgatgatgaattcctggccgagctgcaactggaccttgtcctcaccgtcggcgttcttcttgaaccagccgcaacggatcttcgggccctgcagatcaacgagagcagccacgttgcggccggtggcctcgctggccttgcgcacgttgttgtacacattgaggtgatcttcgggggtgccgtgggagcggttcagacgagcgacgtccatacctgcttcgacaaggctggtgatgccttccagggactcggtag

SEQ ID NO: 540 - DNA, 6709 bp, Unknown
  R48_24m  MAG No. k141_65547
cagcacggacgagccgatgacctgtatggctatgctggctctggtcgcgcccagtgcgcggcggatgagcagctcgtgcgagcgttgctcgatgccggccaatccgatgttgatcatgccgatggcggataccgacaacagcaatatcgcggtgacggtgacgccgagttggagaaaaccgataacctgctcgtaatcatcggcattgtcggaacggttccatgacgatatgctgccggtcccgacgtcggacaacagatcgtccaacgcggttttggcgtgttgatcgtccacgccttcattgggatggacgaggatggtcagcccatccggttcccaggcttgcggccagtagcgttgcagtgtggtcgcgttgacgtagatggtgggtgtgtccgtcccgtcggcgatgacaccgttcacccgtgccggcacctgttgcggatttcctgtccgggcgagtgccacggtgccgtcatgcacgtattggcgggcgctttcgttgactgcggtttccagcgtggcgggttcgtccgctccggtcagccatgtgccctcgatgatgggggcgggcatgattcttgtccgttcggcgtcggtgatgatgatggtgacgcggcgtatctccgtgttgccgtcaccggacgacgcccatatggcgaggtcgttgaggtgatattgcgccgatgcgattcccggacggaaatacgcgaggcgttcctgcaaagccgtgacgacttgcatgttcgccgatgatggcacgtcgacgatggcgctataggtgggtgacttgcctcccagtcgcgcgttgaccgcttccagatagtcgcgtccgagcgtgccgacgagaacgccggcgatgagggcgatgatgccgatgaacatcgacagggcggtgaggctggtacgcaacgggttgatgcgcagatccttggcgatcatgcggatcacgacagtcgccccctgtcgatcgtcagtcggcgttcgcatcgggcggcgagctgcgggtcgtgcgtgacgaggatgagtgtgaccccgagttcacgaacatgtcggaacagtatgtcggcgaccatgtcgccggtttcggtgtcgagcgcgccggttggctcgtcgcagatcagcaggtcgggatctcccaccagcgctcgggcgatggccacgcgctgctgttcgcctcccgacaggcgcgacggcatgctgcacaccgtccggctcccgagcccgacggtgtgcagcatgcgcgaggctcgtcttctgatgacccgcagggggatgcctccccggtattgcaatgggagtgccacgttctcccatgcgctcagatgcggtatgagggagtagttctggaacacgaagccgacatgccggcagcggaagcgcgcccggtcggcgtcgttccacgcggcgcagtcccgcccgtcataggagagcgttccgtcatagtcgttgttgagcagcccgacgatggaggcgagactggttttgccggatcctgatttcccgatgatggcggtggacgttcccctctcgaacgatgcgctgacatcgtccaccgtcgtcagacgttcgccgtcgggcagccggacttcggcgctcagatgttccaactggatgagtgtgctcatgattgcgctcccggtgtgagattcggagctgtcgcggacaccatgtcaccttcctcgagaccgtcgaggatgatgatcgacgtgccgtccgatgcccccaacttcacgttcacggtggcgaacgaatctccgtcacgcctgctgacctggccggaggcgagcctgccggcgactgcggtgacaggcaggatcaaggcgtcctcgaccgccgtcgcggtcagtaccacggtggcgttctgcccgggacgcgcctgcacgtcttttgggaacaggcattgcagtgtgcgagtcgattccgtcccatgcgcagtcgtcgccgatccggccgtatcttccgctgatgagggcggagtggcgacgccgtcattcactaccgcggcacagtccgtgggcccctgcgcgtcggtgatctggaatcggcccgtcaacggctggtccgggtctatggtcgccagcagcgcggtcgcgtccacgctggcgctcatgccgccataccgtatcgagaacagcggatagtccgcggccatgtcgttgtcctgcgcgaccgtttcgatcacgccgtcgaccggagccgtgacctgctgatcgccgacggtacccaacacgtcgcccgcatgcacgtatgctccttgatcagtcgtggagtggaaccagcctttcgccggagtcgtaagcgagaacacaggagccacctgcacgccggtggaggaagaggataacggcgtgatgccgcccctacgtacctcgaccgtggatgctggccgcttcgccgtggaggaggcgtcggacgatggcgtccgcgacggcgagcaagccgtcatcatcgcgcacatcgtcgtggccgtcacgcacgccaacaggcatttgaacggtgcgatcgcattcatttcgtcggtccgttctcatgccggtaccatgtgcagtccgtggtgtagaagtcccgcatggtcgaatagtcgccgagttcggatttgccgatcacatcgttctcgtatatgccatccttgtcctcgtagtagttcttgaaccagtcggtatccagcagcttgcgcagctgctggagggcgcctcgggctgcttccgcgttggtctggctgttgtcgagaatgtcgcgttccaccgagcactgccagtagacatacgcctgtccttccccacttcccttggcatacagcgaggacgcggcctgcgccttgggtatattcgctggaaacgcatcgccgttcatcagttcaaaggggaaatcctcgacggtcgccttgtattcctcgttcgcctgctgccaggtcagcatgccgccacttcccgaggtgccgccgttcggagtcgtcccgcaaccggacagcagcagcatcactgcggtcagaatggcggccctgcgtcgtgttcccgatttcatcatcatgctccttcggacgattgcacaactgtcgccaaccattagcccacagacggcgatccgggagcaaaagactgtcatgcgcgcgcatgacaacgatacgtcgaggagcatgggatgcgcatacgatgggtggcatgacagacctatcggactcgcataccatctccatcggggtgctggacaacgattcgctcgccctcaacgccatagccgtgatgacgagccgtctctccccgcggttccacatcatctggagcaccacgtccccggcgatggcattgcagcgctgcatgacccacggcgcgcgacccgacgtgctggtcgtcgacatggccttgggaggcatcaccggcgcggacatatgcgccagaatccgtcggcgcactccgacgatcggcttggtgtgcgtcacctcctatgaccttgatccatatcggcaagacgcggtcgaggcgggcgcgcaatgcctgatagccaaagatgacatcgtcaaagagctcccgcaggccatacgatgcgcggcacagggcgagcccgtccccggcaccggattccccaccgcacgggaagccaatcgcaaactcaacgaaggacacgcgaccgagggccggctgccggaaaacgacaagccatcgctgtcctccagggaacgggacgtactgcgcctctacgcgcatggatcatccaccgacgagatagccgcgctcctgaatgtcagcaagggcagcgtcttcacctacgtcaacagggcatgccgcaagctccatgccgccgaccgcaaggaggccctcgccatatgcgcccgatacgatctgctttgaaccgtatacaccacccagccatactggccgcggggctggtcctcgcagtggcgatccccgtagagatgggcgtgtactcatcccagaacctgctgtcatggtcgaccatacgcatatcgctgctcgtcgccgtcctgtgcgccatgctcggagcggcaccggtatgggccgcctgtctgctgttcgcggtctcaggatacgcgttgctgtggctgttctcgccgttgacgaccatcatgatcgccgcactgacctccatagcggtcctctcgttcgtcaaaccccgccttggagccgcttccgcactggcggccctcgccgccctcgccgcgaacaacatgcagaacaacctcacctcgtcgaacatcgtaggcatgatcatcatgtgcctatgcccattgtcgctggggttcagtctcaacctgctgttcgcccaacggcaggcgaccgcgacactcaggcaacgactcgaccgcgaacacacggcgcgtcacctgcacgacaccatcagcaacgacctcgcctacatgatcctgcgcatcgaccaggcaagccgcagtgattgccccgccgatcgggagcaatatcagcaccaactcaccgatctgcgcgccatcgccgaaacggcgctcgaccacacccaccaggtgatacgacaacttgaacgcaccgacaaaccagacgatcgcagccgcatcgtcaaaacaaataacgacgacaaaaccgacaggaaaatcgaacagcagcgtgaacggcttgacggcatcattcaatcgcaacgacgtcgccttggcggcctcggattccaaggtgacgacatcctcgggacgttcgaccatccactggcggacgacatcctcgaccttctcgaaggactgctcaacgaactgtacgcgaacatcgccaagcacgccgccccgcacgaatggtacgccgtcacgatctccttcgaccggcggcacgtcatcatttcggcaagcgacgtactaaaggacgaagcggtacggctcggactcggcagcggcctcaagagataccgaaccgttatcgaatccatgtccgggacgttcgacatcaccgatgattccgacaactggaacgcgaacatcaccattccattgtctgtaacacgccggtaaagggaatgacggcctccagctgccagtgggcttgttcggtgtccggctggcttgcgctggtgtgtgttcttcgagcgagtcgatgacctcgtgcgtgtggcccatggcccggctggcggcgtcgcgcaattcgtcgagctgttgctggtattcgtgttcgtcggcgggcatgccgtcggtcccggcgtgaccatcgggacatccagcatgaggattacgcccgtgacaagcgccggccacaggaaccggtccgggcggaacatgccgccgaccaagccggcaagcacagccagagccaacatgatatcgcgcacggtcgcggtgccggggacccgtgccgccatcgagaacacgtactccgcgagcaccgccacggacaatacggcgcaggacgccgcgatcaccggatgcccggcatgccgcaggccaagccggtcggaaagccggggcagagcagatcgtatctggcgcatgcgtccagcacctccttgcggctggcgactcccagcttgtcggccacgcggtgcacgtacgtgaacacgctgcccgtcccgccgctcctgcgacggatgcgccggcacacgtcagcgcccgtgatttttttcccaacgccatatccaacaccagcgcatccggcctggtatgcgggttatgacaatgctcgatcgccaccgcgggcgaacccgtgcccccgcattacataaaagtccttggaaacggccgagatcatcgcgcacatcgcatccagggcgaacggatcattgtccaatacgggcgatacggatcgaccgcgccgcagccccggtcatgtcatcatgtcccatgccgctcatcgtggccacggtcgcagccggacgaaacctgctatcatgcgattacttgacacgatgttgcgcttttggccatgcgcaggttgaatgggattgcgccacgaaaggatatgccatgaacgatctgctgattatcgacatgctgcccacgtacgggctgctgttctacctgctggtctcggtatccgtcttcgtaggatgccgtggcctgcgccggaggacctcggatcgtggcctgctgcgttttgccgtaggcgcgttcttggttgtttccgcgctcggcgccgtgttcgctgcgctggtgtatatcatggcagcgcctttggcgcagccggatatggtcgacttctaccgcacgtaccggccaggagctctgatcttcctgctgggattgttcatcatacaatttgtcttcggcgtcgctgccgtgtatgggggaaagtaacctggtatatcctgcgataaacgcattggcagacacttgctgcctatctgtaaacacactctagataaggcttgcggccgttggccgagcacagtagtagtgtggtctgctgtgtcaacaggaggagtgtgaccaatgcggctgattgagacatggctggcggaccaggaacgcgcgtttgacttgttcgcgaaattcccggcggaggagacgggattcgaaaacccagcggccggcatgaatcgtgaacggttcgccgcatatgtgcgagggttgcgtgacgagtcgatgggcatcggcctgcctgacggctgggtgccggccaccaagtacattctcgtcaacgatgagggcgactatgtgggcatcttcaacctgcgtcaccggctcaccgacttcctgcgcaacggtccgggccacatcggctacggtgtcgcccgcgaa

SEQ ID NO: 541 - DNA, 2699 bp, Unknown
  R48_24m  MAG No. k141_66057
caggtcgttgaggtcggaggtggcgaaacgtccgccgtcgagctggaccatcgggcgcaggtccggcgggatgaccgggatcacgtcgagcaccatggcctccggcttgttgccggtggtcaggaaggcgttgacgaccttgagacgcttcagggccttggtcttacgctgttcggaagcgtccttgatctcctcgcgcagttccttggagatggtctccaggtcaagggactgcaggcgcttcttgatggcttcggcgcccatgcagccgtcgaagtaatcgccgtagcggtcctgcatctcgcgccacaggtccacgtcgtcgaccatgtcgccgggcttgagcttcttgaacttgtcgaagacggcgtccacacgggcgatctggtcgttgtagcgggtgcggatggcggccatatcgcgctcggcaccgttacgcagcttggtgcgggccgggcccttggcctcgccggtctcctcaagggcggcgagatcctcttcgaccttcttggcgcgggcttcgatgtcggagtcacggcgctgctcaaggcgcttgatctcggaatcgaactcgtcctgcaggccgggcagatcgttgtggcgctcgtcctcgttcacctcggtgaccatgtaggaggcgaagtagatcacgcgctccagatccttcggggtgacgttcagcaggtagccgaggcgggaaggcacacccttgaagaaccagatgtgcgtcaccggggcggcgagctcgatgtggcccatgcgctcacggcgcacgcggctgcgggtcacttcgacgccgcatcgctcgcagacgatgcccttgaagcgcacgcgcttgtacttgccgcaggcgcactcccagtcacgggtcgggccgaagatctgttcgccgaacagaccgtccttctcaggcttcagcgtacggtagttgatggtttcaggcttcttgacctcaccgtggctccaaccacggatgtcatcggcggtggcaaggccgatgcgaatcttgtcaaatgcgttgacgtccagcacttgttaatccgtttctgttcttgagaccttcccaagctccccttgtcaggggagctgtcagccaaggctgactgaggggtagtgcaaaccggaaaggtctctgtacgttatctatttcacgttggcggggctacacgcggcgtattgaccgcatgcagcccgagggatcactggtattcgggctcttcggccttctggtcttccttggcggccgcgtcggggcgggcgccaatgttgaagccgaggtcgtcagcggagctggccggatcgtcatcctcgtccttcatgtcgatggccacgccttcggcgttgagcacttcgacgttcagggacagggactgcatttccttcaggagcaccttgaacgactcagggatgcctgccggcggcaggttatcgcccttgacgatggcaccgtagacgcgcacgcggccgtcgacgtcatcggatttggtggtcatcatctcgtgcagcgtgtaggcggcaccgtaggcctcaagggcccacacctccatctcgccgaagcgctggccaccgaactgggccttaccaccgagcggctgctgggtgatcatggagtacgggccggtggagcgggcgtgaatcttgtcgtcgaccaggtggtgcagcttcagcatgtacatgtagccaacggaaatcggcttggtgtacggctcaccggtacggccatcgaacagggtggccttgccgtcggggccgaccagacggtcgccgtcgcggttcggcagcgtggtggacagcaggcccttcaggacctcgggcttgacaccgtcgaacaccggggtggcgaccggggtgttcggctcggccttctcggcaccggacggaaccagcttcttccactcggcttccatgttcgggtcaagggagatatcccaaccggagtgggcgatccagccaaggtgcagttcgagcacctgaccgaggttcattcgggaaggcacacccagcgggttcaacatgatgtcgaccggagtaccgtcggcaaggaacggcatatcctcttccggcaggatgcgagagatgcagcccttgttgccatggcggccggagagcttgtcgcccaccgtgatcttacggtgctgggcgatgtagacgcggatcatctggttgacgccgttgggcagctcgtcgccgtcctcctcggcatcctcgcgggtgatctccttgacgccgatgacggtaccggtctcgccgtgaggcacgcgcagggaggtgtcgcgcacctcgcgggacttctcgccgaagatggcgcgcagcaggcgctcctccggggtcagctcggtctcgcccttcggggtgaccttaccgaccaggatgtcgccggcctcgacctcggcgccgatgcggatgatgccgcgctcgtcgaggttggccacagcgtcctcgccgacgttcggcaggtcgcgggtaatctcttcggcgcccagcttggtttcgcgggcgtcaatctcgtactcctcgatgtggatggaggagagggtgtcgtcctgcacgaggcgctgggagatgatcacggcgtcctcgtagttgtagccgttccacggcatgaaggcgatgagcaggttcttgcccagggccaggtcgcccttctggatggcaggaccatcggccagcaccgagccggcctccacacgctcgccatc

SEQ ID NO: 542 - DNA, 3835 bp, Unknown
  R48_24m  MAG No. k141_66869
actgttcggcccgggacgcggcgaggattacgttgagcctaccgccgacgattgggcccgcgccgccgacaccatcagctacgagatcttcacctgcctgcgcaaccgtatcccgcgcctttacgagcatgccgccgaagtactgcccgccgccgacctcgccaagctcgaccccgccacgctgctataaggtgcattaccgccatacggtggcaccccgtaatcccttcttcccgaatatgtgccgttgacatgtgctgagcgtcacatattcgggaaatcggccccaatctcccgaatatgtgccgttgagttgacgtcagtggcacatattcgggaagtcgggattactgcggccgatatgtgtgcctatgcttggcatatggaaacgacgttggatggggaacaggtgctgagcgatgagggctacagcgccttcgacgaggagcggtgggcacccgagccgcccaaatccaagtcgcgcacggctttcgaacgcgatcgcgcgcgactgattcattcgtccgctttgcggcgtttgggcgcgaaaagccagattctgattgccggtaccgacgatttcgcccgcactcgactgacgcatacgctggaagtcgcccagatcggtcgccaaatcggcgcattgctcggctgtgatccggacgtggtcgactgcgcctgtctggcccacgaccttggtcacccgccgttcgggcacaacggggagcgtgcgctcgccgacatcgccagcaatatcggcggcttcgagggcaacgcacagaccatgcgtatcctgacccggctcgaacccaagatctttcacccggacgggcgttcggccggcgtgaacctgacccgtgcggccttggatgcggccgtcaaatacccgtggaccttggccgaagccgaccgacacccgaagggggagcggtcgaagaagttctgcgtctacccggatgacgaaccggtgttccgctggctcaaaatcggcgcgccccaggccgccaaacccatggaatgccagatcatggacctttcggacgatgtcgcctactccgtgcatgatgtcgaggattccatcgccaccggcgcgttcgatccgattgtgctcgccgatccgaagatgctggaccacatcatcgagcagacgcgcgcatggtatggggcgaagtgggatgccgacaagctgctggccgcgttcatgcgattgcgccgagagcatttgttccctgcacatttcaatggttcgcgcgaatcgttggcacagctcaagaacatcacgtccgatttgatcggtcgcttctgctggtcggtggaaaccgccacgcgcgacacgtatgggcccgggccgttgacccggtattccgcgaacatcgtgattcccgaggacacgaattacgagatcgtggcgttgaagggcatcgccgtgtacttcgtcatggcgcctcgcgagcgcgagccattccatcaggaggagctcaagatcgtatcggatttggtcgatgtgcttatggccgattcgccgctcccatccaacgctttggaaagccagttcctggccgattggaatgaatccaccaatgacaacgagcgcctgcgcgtcgccatcgatcaggtcgcaagcctgaccgacaactccgctctggccctgcactccatcttgtgctgagggcgtgttggacgggtgcttccctcagtctcgctgcgcgagccagctcccctcgggtgaggggagctgtcgctgtaggcgactgaagggagtttcgcggaagaaatgataaccgacggtaaaaatttaccgtgtctcaggtgaggcggtactctagagacttatggtcggaatgattaagaaagaagatgtcgagaaggtgcgcgccgccgcggacctgtatgacattgtatctgcgaccgtaacgcttaagccctccggcaccggcaccttcgtgggcctgtgcccgttccacgacgagaaaaccggcagcttcaacgtgcgcccctcactcggcgtgtggcactgcttcggctgcggcttgggtggcgacgtattcaaatacgtcgaacaatccgaaaacatcgacttccgcgaagccgtggaactgctcgccgacaagtaccatatcgagctgcactacgagagcagcggcaacggcccgaaccgcgagaacaccggctccaagcgcacccgactgctggaagcctgcgaggaagcacagcgcttcttcgtctcccagatcctgaccaaggaagcactgcccgcccgcaagctgctcggaggccgcaacttctcccaagccgactgcgaacgtttcggttgcggctacgcgccccaaggttgggataatcttgtgcgccacttggcctccaaggggtttacgcagaaggaaatcctcgacgcgggcttggcccgccaaggccagcgcggcatctatgactatttccgcggccgcgtgacgtggcctatccgcgattcgaccggccgcacgctcggcttcggcgcgcgcaaactatacgaagacgatcagatcgccgccaaatacatcaacacgccggacacgcagctctaccgcaaaacccaggtgctttacggcatcgatttggcgaaatccgccatcgtcaagaagcgacaggtggtgatcgtcgaaggctatacggacgtgatggccatgcacttggccggcattgacaccgccatcgccacgtgcggtacggcgttcggcgccgagcacgccaagattgtgcgccgcctgatcgccgacgattcgctgggcgcggtccagctggtcgggccgttgaaggtcaaggaccagccgttgagctcgcgcatcgtgttcacgttcgatggtgacgccgccggccagaaagccgcgctgcatgccttcggccttgattcggccttcctctcccaaaccttcgtggccgtggccgacgacaatctcgacccgtgcgacctgcgcatcgagcgaggcaacgaagcagtgcgctcgctgatcgcccgcgccaaaccgttgtatgacttcgtgatcgacgccgccatcagccggttcgacctgacctacacgcccggccaagtgggtgcgatgaaagccgtggccccgctggtggcgcagattcgcgaccgctccctatgggacgcttacgcgcgcaagtccgcgggccgtatcggcgtggatcttgaggtgatgcgccgcgaggtgatgaacgcgcgccggcagatgcatgtacgcgatgaggacgcctacgcgcccaaacgtcgattcgagcgtgacgagccgcgtgtggaacccggcaccaacccatacgccaatccggccacgcgcaaggcgttggagcgccgtgacgccgccgaacaggcatatttcaagatcgacgacgccgtattcatcgccgaacagcagttcatggccgtgctgattcaggtgccgcgcgccatcgaccgcaccatgttcgggcagctgaccatcgaccatttcatgacttcagtgttccgcaccctgttccaggcgatcgcggccgccggcggactgccatccgacgataccccgcaggggctgtggatgcacaacctcaccaaggccggcgggccgatgctgaatcaggtgatcaacgagctggccgtcatgccgttgccactgcctggcgacgacaccggtagcggtgcgcagccggtgcaggccaacgtgtcgggaggaggtgttggcgtgaatggcggtgccgccgcagtacagctgcgtcctgccacgccggaggagcagcgctacgccactgagcttctcacccgattgttggacatgggcttcatgcgccagatcggtttggccaaacgccgcatggccca

SEQ ID NO: 543 - DNA, 32602 bp, Unknown
  R48_24m  MAG No. k141_66946
cgtggtcaatctcgaaaacgacgtattgggaaaatacgtgcggaacatgatgacgacccggacgggactgacgcaggatctgctgtcccggtgcgggttctgagaaaggatgcatgaatcatgaaccatcagtcggtgcaagcggcgttgcaggcgctgcgggaagggaagctcgttctggtcatcgatgacgaggaccgggagaacgagggggatctcatctgtgccgcgcagtcggccaccacatggaacgtcaatttcatggcaacccacgccaagggattgatctgcatgcccatgagcgagcaactggcccacaagctgatgcttccgcccatggtcgagcacaacaccgataaccatgaaaccgcttttacggtgtccatcgattaccgtggcaccacgaccggcatctccgccgaagaacggggattgacggctcgcatgtgcgtctccgatgacgtggaacccctcgatttccgcagaccggggcatatgttccccctggtggcgaagaagggcggcgtcctggaacggaacgggcacacggaggcgaccgtcgacctcatgcggttggcgggattgcgtgaatgcggcctgtgctgcgagatcatggacgacgatggccggatgatgaggacccccgacctgacccggttcgcccaggagcatcagatcccgctcctgaccatcaaggaactgcaggaatacaggaaagcgcacgatacgctcgtcgaatgtgtctcgaccgtggcgatgcccacgcgatacggggaattcacggcgcactgctatgtgaacaggttgaacggcgagcatcatgtcgcgctggtcatggggaatctgggcgatgggaccgatgtgttgtgccgggtgcattcggaatgtctgaccggtgacgtcttcggctcgttgcgttgcgattgcggtcagcagttggacgcggcgatgcggacgatcgcggagcatggctcgggcgtgctgctgtacatgcgtcaggaagggcggggcatcggtctggtcaacaagctgaaggcctaccgtctgcaggacgagggcatggacacgctcgacgccaatctcgcgttgggattccccggtgacgcgagggagtactacatcggagcgcagattctcagggatctggggatacggtccatgctcctgctgaccaacaatcccgacaaagtgtatcaattggaagactatggaatggagatccgcgacagaataccaatcgaaatcgaagccaatgcttacgacagtttctatctcaaaaccaagaaaaaccgcatgggacatatcctgaacatggaggaggaataaatgcacacgttcgaaggcgatctggtagccgaaaacatcacgataggcatcgttgtggcgaggttcaacgagttcatcacctcaaaactgctggcaggggcgctggacaccctgaaaagggagaatgtccgcgaacaggacatagcggtggcctgggtgccgggcgcctttgagatacccctgatcgcgtcgaagatggccaagagcaagcgctacgatgcgatcatctgcctgggcgcggtcattcggggcagcaccagccactacgattacgtgtgcaacgaggtctcgaagggaatcgcgcagaccagcctcgacaccggtgtgccggtgctgttcggcgtgctgacgacggattccatcgaacaggcgatcgaacgggccggcaccaaagcggggaacaagggttccgagtgcgcgcagggcgcgatcgaaatggtgaatctgatccgctccatggacctctgacggcgaaccacccggctgcgggcgggggtcttccagacgttcccgcccgcttcgcgccacacggccaaggcccgatcgatcgccgcgcccgctaccgcagggtgagcgttgcggccaaagccagatggtcggtgtccggcacttcgaaggacgtcacgccggacggtctgagcccttgggtgaacagaatatggtccagttcgatgcgcggccacttgagccagcgcgggaaggtgagattcgggccggcggcttgaatcagacttgcgtccttgaatccggacttgagcaacgcgcggaagctcgggtggtcggtgctcgagttgagatcgcccataacgacgacgatgttgcgattgctgacggattttgcacgggcgagttctcgcagacccagaatgccggccgaccaatccgcgcagccgcgcatcggcgatttcgggtgagccgaacaaagcgtcaccgtgcgagtaccggaggttttgagggtgatggcgggaacgtcggcggcagggatggagaccacgttgggcaccgctgcgctcggctcgtagcgggaatagatcacgttgaatccgccattatcggtctctttggcgtctccgaactgatggtaggggaggagttcgttgatgtcggcttcggtaagacgtgtgatgaggtcgtcggtgacttcctgcaaggccaatacgctgatattgcgttcgcgaatattgcgaatgatttcagcggcgtcggcgcgtccgtatcgacaattcatcgtcataaccgagaactggggcgagagtgtttcacgcgttgtttcacggtgcccatcggggactgtttcgggtccttccttcggagtgtttgaggtgctcgatgtattgctgttatggctttttgacagcgtcggcgaagttgtttcacgggctgtttcacggtgggattctctgcgtttgccggctgggtcgattgacgtaccccagtagttgatgcgctgtgagctggcaatcagcgcgaccacaataagcgacgacatcgcagtccattcatgttgccatgcggcgaccgcggccagaatcatcaaaggaacccacagcagcggagtcagggcaatcatgtacggaagcggcatacgggcctcgagaccggcgggcagcgcgcttaaggccgtccataacagtgcgatgattgccaccgcgctgaagattgtcgtcatggaagttcctttcgaaatataaattgaaccgagatataacttggctcccctctgcgaggggagccaagttgtgagatcagcggccgaacagtccgccaaggcctccgccgaggttcggcggcagttcagtgccaccatcgacgttgcccatcatctgttcaaggccggcgggcaggggcgggttctgcggcttcttggcgaaggcggaaccgccggtcgaaccggaggatttgccggccagcttgtcgcgcaatgccttctcctcggcctcgcgcttcatcggattgccggatttgccgcctttcttcttgttcttgcccttcttcttgccgccgcccatagccgggccgccgaagccggggatgccgccgcccatgccgccacgattggacatgcgcttcatcatcttcgcggcctgctcgaaacgctgcagcaaagcgttcacctgagaaaccgtcacgccggaaccataggcgatacgggcgcggcgggaaccattgataatcgacggatcgcggcgctcggccggggtcatcgagcgaatgatcgcctcggtgcggtcgatttccttctcatcgaactgctcgagttccttgcggtgctgggccatgcccggaatcatgccgagcagcgacttcatcgagcccagcttgcgtacctgctgcagctgatcgaggaagtcgtccaggccgaaggagccttcggagattttctcggcggccttgcgggcctcttcctcatcgaactgcttctgcgcctgctcgatgagcgtcatgatgtcgcccatgtcgaggatgcgcgaggccatgcggtccgggtggaagacctcgaaatccttcaggccctcaccgttggaggcgaacaggatcggcttgccggtcacggacgccacggacaacgcggcaccaccgcgggcgtcgccatcgagcttggacagcaccacgccggtgaagtccacgccctcatcgaacgccttggcggtcttgacggcgtcctggccgatcatcgcgtcgatgacgaacaggatttcgttggggtgcacggcatcgcgaatgtcgcgggcctgcttcatcagctcctcgtccacgcccagacgaccggcggtatcgatgatcaccgtgtcgtagagcttctgcttggcgagttcgatggaatcgcgggccaccttcaccgggtcgccggagatctggcccggagctgcgacggcctcgccgccatcggattggacgcccttttcgggagcatagacgggcacgccggcgcgttcgccgaccacctgcagctgcgtcaccgcgttcggacgctgcaaatcggccgccaccagcagcggcgtgtggccggaatccttgagccagtagccgagcttgccggccagcgtggtcttaccggcaccctgaaggccggcgagcatgatgatcgtcggcgggttcttcgcgaagttcagcggacgatcgaccccttggccgagcacgtcggtgagctcctcgttgacgatcttcaccacctgttgggcggggttgagcgcgtcggacacctcggtgcccagtgcgcgctcacgcaccttgccggtgaaggaacgcaccacgtcgagcgccacgtcggcgtcgagcagcgcgcggcggatttcacggatcgtaccgtcgatatccgcctcggaaagcttgcccttgctcttcagatgcttgaacgcattcgagagtctgtctgtcaaagatgaaaaagctgccataatgggcaacagtctagccgccacgcgggaaattgcggtgttggggacgactctttccggggattgcgtcgcggagtagtcagggatgttgggcattcagacggcaaatgccgtgccgtccgctcgtggcgaagccaatcgagtgcttccgataccatggaaaccgtaaagaatcctgtgttttttggaatgcttacgctgttttgaaaatcgctggacaccgcttatacgcagactgccgtgcgctccgaaccatgacgttcgggccaacgcagacatgccgtgcaataaggaaggcccactgatgcccacccaaaaactactcgaacgcaaagccctgatcgttggcatcgtcatcaacgtgctgcaggtcttagccggcgtggccgtgttcttcatgaccggcctcaaggccatgttcctcgacttctccttcaccgcgatttccgtcctgtccggaatggtggcggtgtacctctcgtcgcgcacggtgcgaaccaccgagcgcttccccaatggcatgttcgcactggaacccatctacgcgatctgcaaggccattttcaccatgtcgttgttggtgtattcgctgattgacgtgtgccgagtagcgtacgactacttcgtgttcgggtccggcgaacgcattgaaaccggcccggtggtcatctacgagatcctgaccgtaatagtgtgcttcagcctatacatgtattaccggcgctccaaccgctccatcggcgattccagcaccatgctcaccgccgagtgcaagagcacgttggtcgacggatcaatgtcgttcggcatcggcgtggttgccatcttcctgatgctgctaccggccggcggtccgcttgacttcctgcactacaccggcgatttcttcatcaccgtggctttggtggcattgaccatcaaggaaccgttcagcgtgctcaaagaggcgttcgtggaattggtcggcggcgtgcatgacgacgatgagaccaacgcctacgtggaggccgaggcacagcgccatctgcctgccaacaccgactacgagcagacgctgatcttcaagaccggcatgaactacaccgttgacgtgtatctgagcggcatcggcgaaaccattgatgtagccgacctcatcgaatgcaagcgctcgctggagaaggagctcatcaagcgcctgcacatcgtggacgtggacttcgtgtttgactgattgatgggtttgaagcggctacttcaggctccaagtggaaccctgcgggccgtcttcgatggcgatgccggcctcggtcagggcgtcgcgaatctggtcggccttggcgaagtccttggccttgcgggcctcggcgcgggcgttgagctgctcggcaatcagtgcctccagcgccgcatgttcgggcgactcggccgtgccatcagcggcaccgccagcagacacccacggctcggccagcgggtcgagacccaaggtgtcgagcatggcacgcacggcgagcagcgcctcacgcacctcggccttggcggtttcggaatcggcgcggtcagccagctgtgaaagcaacgtattgccggaacggatggcggtgaagatcgcggcggttgcaccagacacattgacgtcgtcattcatggcggccacgaaatcggcgggcaggtcgtcggcggagacggcagcaacctcctcgcgagaaggctgaccgcctagtgccacaccggcgcgctcgatgaagttcgagatacggtcgtatgcggcctgcgcctcgaccagcgcctgatcggaccattcgagcatcgaccggtactgcacggagcccaaagcgtaacgcaccacccaagcggaatgctcggccagcacgctcggcacggacaggccggtgcccagcgacttcgacatcttctcgcccttggcggtcacccatgccgaatgcatccagcgcgcagcagaggggtagccggccgcgcaggtctgcgccatctcgttttcgtggtgggggaagcgcagatccaaaccgccgccgtgaatgtcgaagccatcgcccaggtaacggtgggacatggcggagcattcgatgtgccagccagggcgacccacgccgaacggcgtcgaccaacgggcgtcctcgggatcggtgtccttgggggccttccacagggcgaaatcacgcgggtcgtgcttgtcgggggaggcgtcggccgggtcgaccggattgtacttgtcggcaccggtggcgtccacggacgggcccatgcggtcggccacggcagcggcctcatcgacttcggaagtctgcttctggtgggtgagttcgccgtaatgcggccaggatgccacatcgaagtacacgttgccggtgggcttgccgtccgcatccgtgaccacatagccgtggccgttgtcgagaatgcgctgaatcaggtcgatcatgtccgacatgtggccggtggcgcgaggttccacggtgggcggcagcacgccgagcgtgttgtacgcctcggtgaattcgcgctcgtagtaataggcgcgggcccaccaacgctggccggcggccgcggccttatcgagaatcttgtcgtcgatatcggtcacattacgcacaaaagtgactttgtaaccgagcttcaaaaaccagcggcgcacgatgtcgaacgccacggcggcacggatatggccgatatgcggtgacgactgcacggtggcgccacacacataaatgccgacttcgcccggcttgagcggcacgaaatggctgacctggtgcgaggcggtgtcatacagattcaggccttctgcggccttggcaacatgcaccggcgtcaggcttgaaggcatgacggaaatgttgaaatcctgcggttcttggctgtttcccataacgctcaagcgtagggtccgaaccagacatgctgaatcgttactcgaagagtttgatgaacgcttcacaggtggggcccgaacgaggtgacagacggatgagaagcgggacaacagtctcgcgagaatacgtctttgaccgctgcggaaactgcgagattcatggatttgccctgctcgttacgcaaacggggaacgctcgtgccacaatagaagtcatggccacaccacaagtgctcattttgcaacatgtcccatgggaacgcccgggacgcatattgtcgaacctcgaggacatcggtcttgagacggtgacgatgaatatcgtcgacaaaaagaaaccggacttgcctgatttcggcgaactggctggcgtggtaatcatgggtgggcctatgggcgcgcttgattacgataagtatccggggctgaaggcagaagccaagttggcgcgtgccgccgtggcttcaggcaagccgattctcggtgtatgcctggggcatcagattatcgccactgcgcttggtgcgcagctgcgcaagggcgatgcgccggagattgggttcgcgccgatcaagcgtgtggacaagcatgacttcttctccatgtgggataagcagctgacggtgctgcactggcataacgacgtggtgggcctgcccgcggaaggccagctgctgtcgcgttcgtcttccaccaaggtgcaggcattccgactgggatccgcgctgggcatgcagttccacctggaagtgtgcggctcgctgctggacgaatggctggatgagccgagcatggtcaaggatctcaaggccgcgggtggttccaagtcccaattgcgcgagcagttcgcccaatacgaccagctactgcaaccgctcgccgagcaagtgttctccggttttgcggcccgctgcaactcctacgctcagacgctgaacaaataacgtttgcgggccgccgctgggcaagcgtggcgctacattggtgagtcatgccgacttatgacattggactggaacacgtttcgctcgctttcgctaccaaaaccatcttcactgatgtaacgcagggtgtttttgaaggcgaccgcatcggcatcgtcggcaagaacggcgacggcaaatccacgttgctgcacctgttccgcggtgctcaggagccggattccggccgcgtgacaaagcgtggcggactcacgttcggcatgcttgaccagcgtgatccccttgatgacaacgccaccattcgcgaagccgcacttgaggggcgcgccgactacgaatgggcgtccgataacacttcccgtgaaatcgtcgaggcattgctcggcggcatgagcctggatgccaaggtcggctccttgtccggcggccagcgtcgccgcgccgatttggcccgactgctgctcaaggattgggatattcttgcacttgacgagcccaccaaccatctcgacgtggtcactatccactggcttgccgaacatttgaagaaccgctggtccaaaggccagggcgctctgttgctcgtgacccacgatcgctggttcttggacgaggtctgcgaatcgatgtgggaagtccacgatggcgtgatcgagccgttcgagggcggctattccgcatatatgctgcagcgcgtggaacgcgatcgccaagccgatgtgcgcgaaaccaagcgccgcaatctggctcgcaaggagctcgcatggctttcccgcggtgcccgtgcccgctccaccaagcagaagttccacgtcaaggccgcacgcgaattgattgccgatgtgccgccgatgcgtaacacacttgaactgaagcaaatggccacctcccgtctcggcaaacaggtggtcgatttggtcgacgtgacgcagattttcgaaaaaccgcagggcatggccgatatcgacccggatgtggcggcgctctccgcgtccgcttcccgcgtggatgtggtcaacgccatgtacgccgagccgcagctgcacggttccgttgaggtggcggtcaccgacatgactgacctgcgcctggtggacgccggcgtgccggaagccgtcgaggccgctgaggaagcgcgtaagaaagccgaggctgagagcggcaatccgcagcttgctgacgatcgcgaggttcgtcgcatgaacacgggtggtgaaaccatcggcggtgacactgctgcaacgaattcggatgatgacactgctgcagccggtgtcacctcggctgcacgcaaggtgacggtttccggccgcgagattcttgacgatgtgacttggctgattggccccggcgatcgtttcggcatcgtcggtgcgaacggtgccggcaagtccacattgctgaagttgattgacggttcgattactccgaccgtgggccatgtgaacatcggcaaaaccgtgaagttcgccgtactctcacagcgtcttgatgagctggagaaactgggccagtacaagatcaaggaagtgctttcccgctataagccgagctacattgtggatggcaaggaagtaacgccgggacagttgatggagcgtctcggctttgaatccgcccagttgatgacgccgattcgcgacctctccggcggacagaagcgccgcatgcagttgctgctcatcctgctcgacgagccgaacgtgctcatcatggacgagcccggcaacgatctggacactgatatgctcgccgtgatggaagacctgctcgatacttggccgggtacgttgattgtggtctcccacgaccggtacctgctggagcgtgtcaccgatcagcagttcgcgctgattggcggcaaggtacgccatctgcccggtggtgtgcaggattacctcgatatggttgaggctattaagaacggcaagggattgccggctgacacgcctggcttcgcgggcaccggtagcagctcggcgaagtctggtaggggtaaggcggccgccgtcaatgctgctgcatctctccctcagtccgcttcgcggacagctccctcgtcagagggagccaataacggtgaggactccacctcgaagctcaccggcaaggccttccacgaggcatccaagcgcgtgaatgccatcgagcgcaagcttgccaaactggaagagcagaagaccgaacttgaggcacagatggccgtccatgacccgagcgactacgagggtctcaacaagctcaatgaacaactcaccgccgtcaatactgaaagcgataatctcgaagccgaatggctcgaactctccgaacaattggagtagcgggagaaaccgtaacgttcacaaggcctcggtagtttgccggggcctaccgctatgcaaactcccacggattaatcaattccacgtcggtaccttcgaagtccttgatattgcgcgtggctatggccgcatcccaggaacaggcaattgccgcaatcatggcgtcttgaatactggtaggtgtgcccctgcgttcgcgttcgacaaggatatgggcataatccgcagctgcctgggtgtcaaatgcgaacgtcctgtcctctaatgtcataagcgccagcttgacggtcgtatctgtgtactttcgtcgtttgccttcaggcatgcgacatattccgaccaacaactcggcgacggtgatggcggtggttgccagattgcttgtatcttggttcctcagccaattggcaacgtgttcgtctggctgtttcttgatgatttcgctgatgacgttggtgtccagaataatcatggccgattcctattcaaaagatactggcggtcgggaatcggcggaatttcgctcggatagtgggagttcccccttgtcgagtccctcaaaatccatgttcttcatgaattcgcggatctcgtcgtagaaattggtctttcgtgtgatttcatgcgccaccgtgccggccagccattcttcaagaatggatcgcacctgagattccatggagcggttgtttttctcagccacttctttgagctgttgaatctgctcatcgggtatttttcggatggtcaatgttgccatgatgcacctccttgttgctgtcataatgctagcataaggtgctgtcattttgcttgcagcacgggtgatgaggtatgcacgcatgaaaaaggcggatatgcatcatgcacatccgccctttgagcttggactgggtctccccgcagtcgccgaatcagcgcccggtaacctcggaaccgacgaccttttcgctcagggcgcgcgggccgcgggtcacggctacggcaccggagcgcaccagctcaatcacaccgtaatgctccaaaagccccagcagcgcatcgatcttaccttcggcaccggtggcctcaatggtcagcgattccggattcacgtccaccacacgcacgcggaagaggcgcacgatctccagcacgtcggaacggttggattcgtcggcggccaccttgatgagcaccagttcgcgttccacggtggagttcgggtcgagctccacgatcttcagcacgtgcagcagcttgttgagctgcttgatgatctgctccagtggcacggcctccacgtcggcggtcaccgtgacgcgtgagatgtccggacgctcggtgggggagacggacagtgagttgatgttgaacgcacgacgggcgaacaggccggcgatacgcgccagcacgcctgggcggttctccaccagcacggacagcgtatgacgctgggaaccaggctgggatgcaggatagttagccatgagtgttctcctctcctcagtgctcgctcgcagcggcagcggcggtctcgtgctcgaacacgccggtcgcatgctcgtccggaccggttcccggagccggggtgccgccggtcagcggcttgatgccgggcttgtacgtcacctcgtcgttggaagcgccggcggctaccatcggccacaccatcgcatccttccacacgcggaaatcaatcagtaccgggcggtcgttgatctggttcgccttttcgatggcggcaatcgcctcttcctcggtgaacgcgcggatacccacgcagccgtatgcctcggccaacttgatgaaatcaggcacttcgagcggcgcatcgccgtcgaccagtgccgccgcaccatcggcaccgtgcgcctcgccatcgagcaggttggtctgcgagtagtggtgctcgtagaacagcgtctgccactgacggaccatgccgtacacggagttgttcagaatcgcgatcttcaccggagcgtggtccaggaacgcggcggccagctcctcagaggtcatctggaaggaaccgtcaccatcgatcagccacaccggcttcttgccctcgaactcgcgggccgagcccacggatgcgccgatggcggctggcagaccgtagcccatcgtgccgaggcctccggaggagatccaagcgtgctggttctcgaaatcgatgaactgcgaagcccacatctggtgctgtcccacaccggtcacccagatggtggacggatcggccatctcagagagcttcttgatgacccactgcggggccattgatccgtcggtcggctcatcccacgtcatcgggtattcctcgcgccagccgtcgatcgccttccaccagggggccagattcggcttgccctgaatggcctgcgtgcgctggatttcgggaatcaagtcgtcgagcacggtagccgcatcgcccacgatcggcacgtcgggctgacggttcttgccgatttcagccgggtcgatgtcaatatgaatcacgcgggcggtcggtgcgaaggcgtcgagcttgccggtcacgcggtcgtcgaaacgtgcaccgatggccacaagcaggtcagcgcgctgcacggcaccggttgcggcaatcgtaccgtgcatgcccagcatgccgaggttcttcgggtcggagtcgggaatgatgccgcgtgcgggcagggtcgtgaccacgggggcgccggtcaggtcggccagagccttgacctgtgcgccggcgttggagcgggcggcgccgccacccacatacagcaccgggcggtacgactgagagaacagcttcgccgcgtcggacagcacacggccgtgcgccttggtggtggggttgtagccgggcagaatcatgcgctgcggccatgagtagtacatgtcgccggtctgtgcggtcttggtcagatccacgaccaccgggccggggcggccggtgttggcgatgtagtacgcctcggaaagcacgcgaggaatgtcctgcgcgcgggtcacgaggaaggagtgcttggacaccgggtaggtgatgcccacgatatccgcctcctggaaggcgtcagtgccgatggcctgcacgcccacctgaccggtaatcacgaccatgggcacggagtccatattcgcgtccgcaatggccgtgaccacgttcgtggcacccgggccggaagtcacgatgcacacgcccaccttgccagtggccagtgcgtagccttcggcggcgtggccggcggcctgctcgtggcgcataagcacgaagcggaacttcgtgttgtctttgatctcgtggtagacgggcagaatcgcgccgccaggaatgccgaagacgtcctcgacgccgagatcctccagcgaacgcaccagcgcttgggcgccagtcatcttctcgccatcgacgatggtctgcttatcgggggccgcgttgattttcggcacgccgctgaatgcctgcaaaggcgtgggtaaagccatgattcctctcacctcatagattttgccgcgaacctgcccgaccttgggatggggccgggtgcccgcgtgtctgattccagtcgcttctccgagacttgtggccccggcacgactcgtcgctcatgttggtatcagtctattcgcaaatctgacagcgggcttacttagtccgcgtcttgagcgagtccagtgacttccagcccgcttcggcggccgccagctgcgccttacgcttgctggagcccttaccgatgccgatgatgtcgccgttctcgcccaatgagacgcgcgcggtgaagatctgcgcgtactccgggccggagacctccatatggtagaccggctcatccttgccgaggccgtgcgccttgacggtcagcgaggtcttccagtcaagtgccgggccctcggtggccacttcggcgagcgtgtcgtcaataagccggtgaatcaccttgcgtgcctcgtcgatgccgtgttccaggaaggtcgcgccgatgagcgattccacgatgtcgcacagaatggagttcttctccgcgccgccctgctcggtttccccgtgacccagcagaatgtaggggcccaccttgagcttggttttggcgatggcgctcagcgcgtcttcggagacggccttggcgcgcatcttggccagttgcccctcggtcatatccgggtgaatggtgaacagcgtttcagtggagaccagttcgagcaccgcgtctcccaggaattcgaggcgttcgtaattggccacgccggggtgctcatgcgagaaggagcggtgggtgagtgcctgcacgagcagatccgggctgagagtggtgcccaacgcttcaagaagctcgttggccggcgtcggctgctgtggggtttcattgctcatgattgttgtatggtccttcacgcgatggtgatgtgttgtgtgttgtgttgtgttgtttgcgatgcgatggtgtacgtaatggtgcacttatgcgaagaccccgccacccgtcgatggcagggccttcattcaagccgttatcgcaggactcacttggtgtgagccggctggatggcggagcggtaggtgcggccgcggtagttaccgcagctcgggcaagccatgtgcggcagggccggagcgccacagttcgggcagttcacggtcgcagcagcggtggccttccagttcgcgcgacgcgagtgcgtgttggcgcgcgaggtcttgtacttaggcagtgccatttgagtatcctctatttcgttcgaacaattgagcttaagcgtccgttatcttaacgcatagctcgtacaaactccgttcaggcgcgcgtcactcggcctgctcgccgttctgctcggcctcgagctgggctttgagccccgccaatccggcaaaacggatatccgtcacatcgtgatgatggtcgggatcctcgttcagatcggcaccgcactgcgagcacaggcccttgcaatccggtcggcacagtggctgcaacggcagcgattcgaccagcgtgtcgcggatcatcgcctcgatgtccgcgaatgcgccgttctcccgcagcggatacgtgtcttccgactcgtcctcgccggcgatgatgtcgatctcgtcgtccttcttgttcttgccgcccttgccgttggccttgtcctgacccgactcatacgggaagaacaccgtcacatcaaccggccagtcctcgtcaatcggcttcaggcagcgcgtgcactcgctgacgaatggcgcgaccaggcggccggtgaagatcaggccgtccacaatcgaatcgaactgcccgctcacatgtacgggctcaccatccttgatgccgacgatgctgtcgccaatgccggaaggggccgggaaatcggcgtcaatcggcttggattgaccggcgcgcgaagcaatctgcgctaccggaatggcccacggggaatcttcaactcgtgccatggtatgttcttggtgcctttcgtatgttggctggagttattcgttactggcgttattcgcgttactgatgttgctggtgctgctggcgttactgggcttcgggatagtcgttcagcgtcaggtgcggcatctgttcgccggccgcacgctggcgctcttccagcacgttaagaccggcctgcacatcccgactgagtttgccgagctgctgggacagccctttcatcaccgtagtgcagtactggtccgcgccttgggtcagatggtcggctctggtctgtgcctggtcaagaatcgcgcgcgctttctgccgtgcaagctcggtgacgttctcttggccggccaggaactgtgcctgttcgttggcgtccttgatcatgtcggctgcgcggctttgtgcggaggcgacgatggcgttggactgggtctgtgccgattccagacggcgctcggcctcgcgcatgagggcggaggcgcgctccaactgcaccggcagcattttcttcaactcggaaagctggtcggtgaattcgtcgcggtcaaccttcaccatgccgggggcgaatatgctggacttcgcttcgcccagtgccgcctcgagctggtcgatgatgtcatacaccgtggtgaattcctcgcggctcttgaccgtggccgggtcgtcgtccgtggtttctcgcaggtcgggcatttcgttcatgaacgaggggcgagtgccggcggcctgagcggtctgagcttgtgcccgggtctgctgagctgcttgggcctgcgctttggcctgcatctgtgccggagtaggggtaggcgcggcgggcggcgatccggcgagaacatcggcctcttcggtgggtgccggcgcggcttgcgtagacgcgggcggttccggggcggacggctccggagtggacgatgcggcgtccgcattcggtttggtcagatcgacgtatccagtggggtggtcatcgctcatagtcattagtgcatcagtccttccgctgacgttcctcggccagggcatcggccagcatcggcacgacacaatcgggcaccatgccggtcacgtcgcctccatggcgggccacgtccttgacgatggaactggagatgtgttcaagaatcggatcggccggcaaaaacagggtttcgatgccggcgagcttgcgattgaccagcgccatgccgagctcggcttcatagtcgccgttctggcgcagacccttgacgataacggtggcgccgaccttcttgcagtagtcggtgatcaggccgtcggtggaagaaacagtgacgttcttgcaaccggctttgtcaagggcacggcggatcacgtcgactctggtggcttcggaaaacatcggtgttttcgcggcattgacggccaccaccacgtgtacctcgtcaaagaatcgtgccgagcgctcgattacatccaagtgtccggcggtaacggggtcatacgagccggggcatactgcgatagtcatgccttatagcctaccgcgaatggtgtgcttcgtgctgccgagcgtgcattgttgtcgcgtcggcgtatgaggcagtgtgtgcggtgccgtatgtggcgtcggtgcggcgttgtgtgcggcattgttatgtggcattgtatgtggcggggtggcgtgatgcgcgacatgggtgtgtggaggtgtgcggattacgcgccaatgggtttcgcgggtaacgacgggaatctatgatggagtgcagtcgaatcgttgaatacgaggaaagaagtgcaccatgacttttgccgagatgttcgttgatgatgccgaaccgctgcgcaacccggaccaaggtgccggcacgtcggtgctggaacgcccggaaaccaaggagtctccggttcgtgacgatggcggcgacgcggatcgattcgcacattatgtttctaaggaccgtatcgccgaatcacgcgcgaccggtcgcccggtggtcgccctgtgcggcaaggtctgggtgcccaagcacgatccgtccaagtacccggtttgccccgattgcaagcgcatctacgaagaaatgacgcgctaaaggtggtacttggctcccctcagcgagggaagccaaaatggtcaccgagccgaaatctcgtcgatcagcttgagctcctcgtcgctgaagtgggtgttcttcagcgcgccgatgttgtcgagaatctgctgaggcttggaggctccggtcagcacggaggtcaccttaccatcgtgcagcagccatgccaggctcatctcggccagcgtctggccgcgttcggcggccagattgttcaggtccacgacctgcttgtgcagtttctcggtcagggcggaatcgttgaggaatcgcggatcgtgagccatgcggctgtcggccggaatgccgttgagatagcggttggtcagcaggccctgtgccagcgggcagaaggtgatgaggcccttgcccagcttgaaggcggtctccttcagaccgttctcctcgacggtgcggtcgaggatgttgtatttgttctggttgatgatgaacggcacgtgcaggtcggcgagaatcgcggcggccttctccatcgtcggaccatcgtagttggacagacccacgtacagggccttgccggagttcacggcctgagccagcgcgcccatcgtctcctcaagcggggtttccgggtccgggtggtgatggtagaagatgtccacataatccaggcccaggcgttcgagcgactggtcgaggctggcgagcaggtacttgcggctgccgaggtcgccatacgggcctgcccacatttcatagccggccttggtggagatgacgagttcgtcgcggtggtgcttgaagtacttggcgagcagcaggccgcagttcttctcggcctggccgggctcggggccgtagttgttggccagatcgaagtgggtgatgccgttgtcgaaggcggtgaagaccagggacttcatctggtcgaatggcgtgatgtcgccgaagttgtgccagaagccgagtgagacggccggcagcttgaggccggaggtgccggcacggttgtaggtcatcgtgtcgtaacggtgcgggttgggggcatagatggcggttggctcgaacattgagtctccttacaatgtcattcttgttcttacgaatgcttacctgcgatgggcaaaccgacgccgatcgagcggtattcgtaagtgttcttggatactatggttccagttcaagtgaacttgaatgcaaacggctgcgacgcttcggcgtgtcgccgcagtaaggagtcatgatgtcctacaccattcgtcaggtggccacgcagttccatatgcagccctctacgccggtgaagactggccggattggcgcgagtacaaaaaccgcgcctattccattgaatgctgaggccatcgagtgctgagctggatgccggctgggcactaagaccgatgtgcgtcgatcgtgggcgcgtctatccgagtaaggccttgctcggcagtgcgcggtcgagcagccagacaacgagcgatatcacgaagaacgctatggccagcttgccgcagctaatgccgaacccttgccagccgagtgcgtcgaggttgatgaagtcgtacggatacggactgccgccggccgccggtccggaccccggccaaatcgccgcacgggccagcacgaagaccaagtatgcagggaagtacgccagccacgagaacatgtaatgccagcggaaacgccggtgcgggtcgaatagcacgaaatcgataaccgccataatcggggcgattttgtgcagcatcgtattggtcatgatgccaataacctgtggcacgtatgccgggtcgtccggaggcatcaggaagaacgccaccagtgcggtgactatggcgtacacagtcaggcaccccttaagccatgcaggcggctgaatacctttgagcagtgtggccgcgccggaccacagcatcacgatgcccagcacgaaaccggtctggaacgtgaaatacacccagaactgcggtttggaccatgcctcatatgtgcccacgaagcagaaaccggcgatcgcaaagcgccacaacgccacgatgaatctcatgcatcgagtctaccgcttcgccagtgggctgtatggctttgcccggactacacttaggtgcaacttcaccacttatgtaggaaaggccttgcaatggtcgattattcgccggctctgatgaccgacatgtatgaatacacgatgctcgacgccgctctgaaagacggtaccgccgaccgcaagtgcgtgttcgaggtgttcacgcgtcacctgcccgaaggtcgtcgctatggcgtggtggccggcaccggccgcattctggatgcgctggaacatttccacttggatgaagcggacctgaagttcctggccgaccgtcacgtggtaagccccgagaccatcaagtggctggagaacttccgcttctccggtacgattcgcggttaccgcgaaggtgagatgttcttcccgaactccccgattttgcaggtcgaaggcacgttcggcgaatgcacgctactggagacgttgattctatccgtgctgaactacgattccgcagtggcctccgccgcctcacgtatggcgtcggcagccaaggatcgtccttgcatggatatgggcggacgccgcactaacgagtgggccgccgtggccgccgctcgagccgccgtagtgggcggattcaagggtaccgccaatctgctggccgcccagctgtatggtctgaaggccatcggcaccgccgcgcattgcttcacgttggtgcatgattccgagcgtgacgcctttgaatcgcagatcgaggcattgggcaagaacaccacgctgctggtggacacctacaacatcgaggaagccgtgaaaaccgccgtcgaagtggccggtcccgaactgggtggcgtgcgcatcgactccggcgacctagccgccatggcccagcgtgtgcgcaaccagctggacgccctgggcgccacgaacaccaccattaccgtgaccaacgatttggatgagtacgcgctcgccgcattgcagaccgcgccggtcgactcctatggtgtgggcaccatgctggtcaccggctccggcgctcccacttgtgcgatggtgtacaagctcaccgaacgtgaaggcgctgacggcacgatggttccggtcatgaagaaatccaaggacaaggccacagtgcccggtcgcaaactggcattccgctcctacgaatacgcgttagccgaagccgaacacgtgatttccggctcggaggagaagctggccggtttcacgcctgaaccgacgtggaagaacctgctggtcggctttgtggatcatgggcagatcgacgctcagtggcagggccatgacgccatcatggccgcccacgactaccacgccaaggcgttgtccgaactgcccatcaccgcgcagagcctcatgaagggcgagccagtgattcctacggagactcaggttctctgacgagaactttcgtctccataggaatccgtcgcagcatagctgctccccttacctacggacagcccactgggctgtccgcttaacggttcgaccacagagaccaaagtcctctgaccgtatctcactggccgcatccctttggttacattggctactcttccctctgtctgtgtccctctgtctgtgttggccgcactcctgtggtcgccgccgaggcggggagatccaaccccggtcgcacccccgtgtttgcaccccctgtggctgtgtcccggggctgtattggccgcgtcccctcgggcggaactgcgtcccggttcgccggacgtggttccagctgagggtggcccccctgtttttttttggggggggggtactgttcaccggggaaatatgtatatgtgcatgctgttgcaatgtacattttgttgtcagttgacaacgtcttgattcagatgaattggcgggaaatggccatttgtcttatccaattgatttgaagaacgttgtcagttgacaacgttttgtacatggtgcggaacgacacatattcctatcctggtcaggatgccgacgaggtggagtgaaaaaccaaaccatttcagaggatattgcaccgagacgttgtgggattgccgtgttgtcggtgatgttacagagatggcgcagtgttgcgtgaggggtgttgcgtgaggggtgttgcgtgtgatgttgcgtgtgatgttgcgttgggctgattgggaggaatagtgtgccgatagaatgccgtgatgcgtgcagagcaatcgtttgcggagcaatcgttgaagaatcgtgtgaactgatgcgatacgaatcataccgtctctgaattgtgggatatgacgaatcgtatcgtcatgggattgtgggatatgatgattgcggtttgatgaaatgaccgggaaatcggccgaggcaaggtgacttcgatgagtgaaactctcaatgatgagaacgcggcgggcaacgatgacgtatcagagcggcgcgctgtagagcatcgagcgttagaacagtgcgatgtcgtgcatcacggtgtggtatctggttgccctgttaattcgtgtgcggctgtgctgaatgaagtgatgtcgcagactggttggaatgcctatgagcttgcacagcgtactggtttggatcggtctgcaattggtcgcgtattgcgtgggcaaagaggtatgttgtttgatgttttggccgaggggcttgagcgggctggttttggtcttcacctagaagccgtggccccctcgcaaacgattccggaagacgaattgcatatgttgttggcgcaactgcgtaggcctcctgatttcgatgcaatagaaagcggagcgacctggtctacgttgaagatgctctgcgtcaatctgattcatgctcggaatgttcaacatcaacgtatatcgttcgtccgagcggttgcacgggtgaacgatgcgtgctggattgcgtttctcgctggtttataccgttttctgcgttgggatatcaacccaaggaacagacgcttgacattggttcctccgtaccggtatggcttggatggatggtggtccccactgccgagcgcggcaattatgcacgtgcttcatcgatatgaagagccgttgcatgacatggactatacatatttgccgttaatcgattacgaactcaacgctatgcagcgcaagcaattcaaccaagatttcatggaatatggcattcttattccagcggacgatctttcccaatcctcatcaggtacgcaggcattgactctgtaagcgagtggtgcataagaaaatagtggcgtgcagccaagtgtcatggaatggatatgtaagcagggaatgacattgcgctggggtttgatgatggttgacgagttgctatccaggcatagagcggatggcgtatgctggggcgcatggttgaaatcaaagacatgcttggcaatcaccaaataattcgtgccgacggccgcaaggtcgacgagctgcgccccgtgcgcatcacccgccacttcaccgacgcccccgaaggctccgtgctcatcgaatgcggtaacacgcgcgtgatgtgcaccgccacttttacccctggtgtgccgcgttggcgcaaggactccggcctcggctgggtcaccgccgaatactcgatgctgccgcgtgccaccgccgaacgcaccgaccgtgaatccgtacgtggcaaaatcggtggccgtacccacgaaatcagccgactgattggccgctgcctgcgtggcgtcatcgatatgaaggcgctcggcgaaaatcagattcagcttgactgcgatgtgcttcaggccgatggcggcactcgcacggcttccgtaaccggtgcgtacgtggctttggtcgacgcagtcaattgggcggagaagcaccgccatatcaagtccgccagccgcgtgcttaaggactatgtgtccgccgtatcggtgggcgtgatcaacggcaccccgatgcttgacctgccatacattgaagacagtcaggccatgaccgacatgaacgtggccatgaccggttccggcaccttcatcgagattcagggcaccgcagaacaccgtccgttcaaccgtgccgaactcggcaccctgcttgacttggccgaaaagggcaacaaggaactgcaagccgcccagcgtgccgctttgtccctagactaagccagctccccttcctttaggggaggttgtcggctggaagccgtacggtctgcaatgtccagctcccctgacaaggggagccttcttaaaggagaacccatgcaaatcgtcgtcgcaacccataacgaaggcaagcttgtggaaatccgccgcattctcgaagaggatcttggcgcggatgccgaaaacatcgaactggtgtccgctggtagccttcacctgccggacccggtggaaaccggcgtcaccttccaggagaacgcgctgctcaaggcccgcgccgtggccatccgtaccggtctgcccgctgtagcggatgattcaggtctcatcgtcgatgtgatgggtaacgctccgggcattctgtctgctcgctgggcgggtgctcacggccacgacaaggccaataatgcgctgctgctcgcccaaatcgaagatattccggatgacaagcgtaccgcgcgcttccgctgcgccgccgcgctggtggtcccggacaccgaggccagtgccgacgtgaccggtggagtggctgccgacggcatcaccgtttacaccacggctgcagatgggagccctgccccggtgcatgcccggtacgccatcaagtcggagacagtggaactcggcgacatgccaggtcgtatcatccgcgaggctcgtggcgaacacggtttcggttacgatccgctgttcgtcccggacgaccagcctgccggtcgcgtcagcactgagcctgaccatgaaggcgagccgctgaccagcgccgaaatgactccggccgagaagaatgcgatttcccaccgaggcaaggcgctgaaagccttggtccccgctatcgaggcgctgctgcactaagtcgtctaggctgtctaactgcactgagccgcgactaagccacagttgagtcgcggctcagcaactcagcccctcccgaatcgggcaagtgtctagcaagcgcctatgacctagcaagggcgatacgaaagaaggccggcgcttagtgcgtcggccttcttgatgaacaagagccacccgatagaatcgaactaccgaccttcccacgaacgagggggatgctctaccactgagctaaggtggcgtggctccaagagccaagtagagaatatagcactgcgtttgattcaacgcaagccggacgttcagcatcttcgggccattgttctttgagccattgtggaggcaatagtgcgaacgatgtgcacacctcatctgctcggaccccattcgtcgtgtgcgcgttatgctagcatggtgagcctgattgactcggaggcagagggaagcatgcgtgattttgtgctggtgaagttgacagacgaagagttcgatgatttctccgccaggcatccacaaggcaatttccaacagacctcggcgatgggacgccttcgcgccgcgcaggggatcgacgtcgaatatctggccctcaaggagggcgagaagatcgtcgcggcggcgctgttcgaaactcaccgctctcgattctctacatttgcggccatccatgatggcccgatgtgcgactatcacgacaccgaagcattgaccttcttcatggatgcgctgaaacgccatgccaaggcaaagggtgcttcacagctggaaatcacccctgaatccccgtatcggcttcgcgacaccaatggagcttctttgccggatgaccagaacggcgctcccgacaataagctgatagaacggctcgaggcgatcggcttcactcatggcggtttcaccgtgggctacacggcggttccacgttggcgctacctcaaggatctgaccggcattaccgatgagaaaagtctgctgaagtcctatgacaagcgcacccagtggagcgtgaagcgtgcccaatcgatgggtgtgcatgtgcgtgagctgtcggacgacgagttgggggtattcgcacgaatcgagcagcaaaccgccgaacgtcgtagcttcgaataccgtggcgaagcatatttccaccgtttcaaggaagcgtttggcaacaaggcgcattttatggttgccgagatccacatcgacgaatatgtagcggacatgacggccaagcgtgaagcgctttcggccaaggtggcggcattgaccgccaaaaacgccgaacaccccaccaccaaaaccgaacgtcagctgggggaggagacccgcaatctggcggcagccgaaaagcgcctgaacgaggcggccgagttcgccaaagacggggatgtgctgccggctgcggcatcactattcgtggagcatccgcgcgaggtcatctacctgttctccggtagcgtcgagcagtacaagcccttctacgcctccgcgctgattcagcatgaagcgatgctgcatttctgcgtggaacacgggctgtctcgctacaacttctacggcatcgacggcgtctttgatgatcccgatgacgagggtcgtggtgtactggagttcaagcagggcttcaacggatatgtcgaggaacttccgggcgagttcgtgctgccggtcaaaccggttgcctatgccatgaagcaatttgcgcacaagctgctgtcgcggtaaacggacgcagcacacaggccattccagagcccagagtaacgatcagagtaacgacaagtaagaaggttcgattatgacgcaatccgatgcaggcgtcgcctcgctcacccctaccaagatcactcctgccgagctggatgcgttctccgcagctcaagtgcaaggtagtttccagcagacctcgcagatggccgccatgggtgcgttcaacggtccggtggactatgtgggtgtcaagcgcggtgacaagctgattgccgcctgctacgtggtgtacacgcggtcccgtttcggtttggaaggctcagtctggtgcggaccgctgtgcgattatgacaatccacaggtggttgaggcgatgaccgaagccttgcgtcgttcggccaaggcccatcacgccatcagcgtatcctgctggccggccgcagtctaccgtctgcatgatctggacggcaagccgaccagcgacccggacaccacgatgatggacaacatggcccgcttcggttggaaacatggcggcttcaccgtgggctacgaatccgtggtgaaccgctggaacttcgtcaaggggcttgacggcattcataatgagaaggaactgctggcctcgttctccaagtaccgccgtaagaacatccgcatcgcccaggattccggtctgcgcgtgcgccggctggaacgcggcgaactgagcactttcgtcaagctgtgcgatatgagcgccgcacgtcaaggcttcaagagccgcgatctggcctactatgagcgtctgttcgataccttcggcgacctgatcgagttcaaggtggtcgaaacccatttcgacgaatatctggacaccctgcaatccaagctgaatgcggcctccaaagacaagcgcaacctcgaacgcctgctccagcgcgcgcaacagcagccggaaggcacggccaagaagggtgcttccgacccggcaacgctggaaaagcgcatcgccaccgcagacaagaagattgcggcgctggaaaagaccatcggcgaagtcaatggcatcatcgcctcggacggtccggtcattccggtggaagccggtgtctacttctggcatccgaacgaggtcgtctgcctgtccagcggcgaggacgatcgtttcatggattactacccgtcttccctaatccacttcgaggcgatgcttgactgcatcgcccgtggcgtggagcgcttcaacttctatggcatttccggcattttcgacgccaacgatccttcctacggcgtctggcagttcaagactcgcttcggcggattcgtggaagagcttccgggcaagttcacgctgccggtggacggactgcgcttcggtgtatccgaagccgcacacaagctgctgcatcgctgacaaacagtggcgagcacggacacagaaataaggcacaggtgacgacgagatgagcgcgactgtgaatcgaacagatacgacgtatacgtttggcgtgattacgcccgaagagctcgaccggctttccgaagccacaagccagggcagcttccagcaatggtccgggcaggtccgtcttgccaagattcgtgggcatgaagccgaatgcgttggcgtgtgcgacgcatccggcaatctggtaaccggctgcgtgattctgtacctcaatggtcgtttcggtgcagatggctccgtatatttcggccccatcggcattagcgatgatccggctctgctatggaccatgaccgaggcgattcgtgaatcggcccgtcgccaccatgctgtttccgtggcatgctggcctaacgtcgcctaccgtctgtattcctcggacggacagcccgacggcgagccgaacgatgcactgctgaccggattcgccgatgcaggctgggcgcatggcggattccataccggttatgacgtggtctgccagtggatgtacgtcaaggatctcaccggcatcaccaacggcaaggaactgctggcatcattcggcaaacgcgctcaatggagcgtcaagcgggcgcagtcgatgggtgtgcacgttcgcgaaatcggccccgacgagttcgacgtgttcgccgatatcgaacggcggaccggtgaacgccgcgggttcgcgacgcgcggcgcggactatttccgccagttcaagcaggcgtatggcgcggatgcgcatttcatgctcgcggaaatccacatcgccgaatatgtggcggatatgaccgccaagcgcgaggccttgcagaccaaggtcgcacagctgcagacgaaatacgatgaacgtccgaccacgcgcatcgaacgtcagctgggggaggaatcgcgcaatctcgcggccgccgacaagcgtctggctgaggtggagggatatgccaagaagggcgatgtgctgccggcagcggcttcaatgttcgtcagtcaccccaatgaggtggtctatcagtattccggttcgttggaggagtacaagccgttctacgcctcggcgctgattcagtacgaagcgatgctgcacctgtgtgtggaacagggtgtgagccgctacaacttctacggcatttccggcgtgttcgacgatccgaacgacgagggccgcggcgtgctggaattcaagcagggcttcaacggctacgtcgagcagatggtaggcaaattcacgttgccggtggacaagttccgcttcggcgtgagcaatctggcgcacaagctgctgcaccggtagcagctggcggccgggggacgaacctatgtgggctgcgtctcgcctgaccgtgtgcccgccgtgcgcccgtcgtgtgcctattcgcgcatttgctcacacgcccatcagcgcgtgagcaaatgccatcatcaccagtgaaatcatcgcggtgattgccagcgagaagccggccagtttggcgttgccgagtactttgtcggtgaacagcgtggagaaaatggcgattggagccaacgcgcagatcaccatcacggcgcgaatcgaagccgagaacggcagcaggaaccacgagatcaacgcgaaggcgacactgaacggtatacgccaagcgatgacggccatgacttccttcacatcatgcttggactggggcaaatccatgagcatgcccaccatcagcatcgacaccagcgcgttggcaccgctcaacggctgggttatagaggcgatccaatcgggaatcttcacgttggcgacggtcaacgcgatcatgagcagatacgtgtcgaacggcaccgagccgaagaagctcttgccgatggtgcgcagcaatgcgcggcgggcaagccgtttggcgtcgcgatccttgggcttttcgtacggcaaggtgggaaccgaaccggcgtgttgttcggcaagtgttttgccgggctgaatatgcagcagttgctgggtgagcacattggtgccggcggccaccatcacgcagttgccgatatcgaacatcgcagccggcaccaccgcgcccgcaccccagaatgactggacgaccgggaaagagaaacaaccgagattgaagccggcgccattgagcatcaggaaggcgcggtcggtcacattgcgcttgcgggtggccagaaagatgaacacgatcgggataaaagcaaacaggaatgcgaataccgaaataagcagcagcgagatgtcatgcggattggtggcgaacgagtatacgatggcaccgggtagcacgatgttgaattccgcggtttgcaacacgcgataatccttctgcccgaacaggccgaaccgcttgaacagatagccggcgagaatgatcagcaataggccaaccggcgtaagaatggcggacatacacttctctccttggctcacacaggctcacggcgcacaggctcagacccacaatgctgtgaccattatatttgccgccttggcattgccatatgtagaggcgtccgcaagggcttgcaattgcctcacgcatatacgaagagcctcccggaatcgttggcgatccaatgtttccaggaggctcaagccggtgcgcgagatgggacttgaacccacacgtcaaagacacaggaacctaaatcctgcgcgtctaccaattccgccactcgcgcgtgcatatccgcgtttccacaggtgtggaagatatacaaaaccctaggccggacagccattacagaccagccagcctagggcatccgagccacttgtcagaatcgaactgacgacctgctcattacgagtgagccgctctaccgactgagctaaagtggcttggttcgcggaaggcatttcgccagccgcgcacaagaaattaagtataagacatctccgtgaaaagtccaatcggcggcttggcagttgtgtcgtgaccgctcggttgaagatgacggttgtgccgcgccacgaactgttcgataatgcaaacgatggcaatccgacatcgctgactgatttttgttctgttcatgtccgaatttgtgagtattctgtttggtgatacggagcgcatccgagccgtgagcgaaggcgctccagtcactgatgaaaggaatggaatcctatggccatcaatccgcccgttgacgccacccagacccctgagtgggctgccctgcagaagcactatgacgagcttcaggccgaaggcgtgagcctcaagaagtggttcgccgaggacgccgagcgtgtcgagaagctgtccttcgacgccggcgacctgcacttcgatctgtccaagaacctgatcaagccggaaaccctccagctgttcgccaaccttgccaaggccgtcaagctcgatgagcgcaccaaggctatgtacaccggcgtgcacatcaacaacaccgaagaccgcgccgtgctgcacaccgcgctgcgccgcccggtcgaggatgaaggcaagtacatcgtcgacggtcaggacaccgtcaaggacgtgcgcgaggtgctcgaccgcatctacgccttcgccgacaaggtccgttccggcgagtggaccggtgtgaccggcaagaagatcgaaaccgtggtcaacatcggcatcggtggctccgacctgggtcccgtcatggtgtacgaggccctcaagccgtacgccgacgcgggcatctccgcccgctacatctccaacatcgaccccaacgacctggccgagaagaccaagggcctcgatccggagaccaccctgttcatcatcgtgtccaagaccttcaccaccctggagaccctgaccaacgcccgtgaagcccgcacctggctgctcgaagagctcaaggccaagggcgccatcgacggctccgacgagaagaacgccgaagccatcaagaagcacttcgtcgccgtctccaccaacctggagaaggtcgccgaattcggcatcgatccgaacaacgcgttcggcttctggaactgggtcggcggccgttactccgtcgactccgccgtcggcacctctctggccgtcgtcttcggcccggcccgcttcgaggagttcctgcacggcttccacgagatcgacgaatacttcgccaacaccccgttcgagaagaacgtcgtcgtgctgctcggcatgctgaac

SEQ ID NO: 544 - DNA, 19301 bp, Unknown
  R48_24m  MAG No. k141_67434
tggcgtgaatggcggtgccgccgcagtacagctgcgtcctgccacgccggaggagcagcgctacgccactgagcttctcacccgattgttggacatgggcttcatgcgccagatcggtttggccaaacgccgcatggcccagctgcccgacggcgaagagaagataaccctcctcggccagatcacccgcatggaaaccgcccgtaaagacctccaagcccaaatctacggcaacaccgtcggctaatacctcccactgattgcgcgcatcttcgaatacgtgccggatgcataaggccatacaaccggttgccggattggatgggtgcagaagttgcagattggccccatccaaattggactggtttgggtggggccaatccaatccgttcaataatgaagcgcgataccaagcagcgtcgaacgaagggaaactcatgacgcagaatcgtgcggaactcaaccgtaatctggcccagatgctcaagggtggcgtgatcatggacgtcaccacgcccgaacaggcgaaaatcgcgcaggatgccggcgcgtgcgcggtgatggcgctggagcgcatccccgctgacattcgtgccgccggcggcgtctcccgtatgagcgatccggccatgatcaagggcattcaggaagctgtctcgattccggtcatggccaaggtgcgcatcggccacatcgccgaagcccgcattctgcaggccatcgacatcgactacatcgacgaatccgaagtgctttccccggccgacgacgtgtaccacatcgacaagaaccagttcgacgtgccgttcgtgtgcggcgcgaagaacctgggcgaggcgctgcgccgcatcgccgagggtgctgccatgattcgtaccaagggcgagcccggcaccggcgacgtgattcaggccgtgcgccacatgcgcaccatgaacaagcagatccgcgagctcgtggccttgcgcgacgacgaggtctacgaggccgccaagcagctggccgtgccctacgacctggccaagtacgtgcacgacaacggccgtctgcccgtcgtgaacttcgccgccggtggcgtggccaccccggccgacgccgccctgatgatggagctcggtgccgaaggcgtgttcgtgggctccggcatcttcaagtccggcgacccggccaagcgcgccgccgccatcgtcaaggccaccgccaactggcaggacgccgatctgctcgccaagctgtccgaaaacctcggcgaagccatggtcggcatcaacgaggacgagattcagaccatcatggccgctcgcggagagtgacgggagtcgaagccggagaggacaacatggttgtagctgttgaatatatttccaaagaagagtccgcggacgtcgaaaacgtcaagcacggcgtgaccggcatcctggccgtacaaggcgcattcgccgaacatgcggcggtgctggacaagctcggtgcgccgtggaaactgctgcgcgcggccgaggatttcgatgaatccatcgaccgcgtgattctgcctggcggcgaatccactacacagggcaagctcctgcattcgaccggactgttcgagccgatcgccgcccacatcaaggcaggcaaaccggtattcggcacttgcgccggcatgattctgctggctaaaaagctcgacaatgacgacaatgtctactttggcgcgctcgacgccgtcgtacgccgcaacgcctatggtcgtcagctcggtagtttccaggccaccgccgattttggtgcagcggatgatccgcagcgtatcacggacttcccactggtatttatccgcggaccgtacgtggtgtcggtcggccctgaggccacggtcgaaaccgaagtcgatggccacgtggtgggcttgcgtcaaggcaatatcctggccaccgccttccacccggaactcacggacgatacccgcatccacgagctcttcctgtcgctgtagtcgattcgtctgccgttagactggtatccgactgacgaatcaaggagacgatctgccatgcagcttgagctgaatcgacgcagcaaggtgccgatgtaccggcagctggctgccgagctgcgtgaacagatcgtctccggcgcgatggccgagggctaccgcctgcctcccgaacgcgagctgtcctcgcgtctcgaagtcaatcgcaccacggtgttgcaggcgtatcagcagctcaaggacgaaggtcttatcgcctccaaagtcggcaaaggcacgttcgtgctgccggctgcctccgcaagccgaacaccgcacacgtcaaacagtgacttcgggaatgcgataacgcgaacaacacgatcgtcggcagaaatgggaacatcgcaagcctcctcttccggcggcgtagaacgtgctacctccactggtttcttgacgacggaccagggcagcagctctgcggcggtccatacgattcgtgaaagccgttcggttcagggcccggagccaaccgtcgtgcgtccgccatggtcggtgttgttctctgattattccaaccggtttacctaccatgacatcgcctcggccgagcgggcgcagcgtggcgacaccattattgacttcgccaccggttcgccgaacccggcggatatcccggacgatttgttgcgcaaggtgagcatcgaggcgttcgaatcgcgggaattcgacggccaaccggaatcacctatcgagggattcgaagagttgcgtgcgctgcttgccgaacatatgcgcacacgaggcgtacaatgcggcgtccgcaacgtgatggtgctctccggttccgagcagggcatcgacctcatcgtgcgcgcgttcatcaaccccggcgactgcgtgctggtcgaacaatccacgttcttcccggcattgcagaccttccgttcggcggatgcgcgcatcatcggcgttccagtggacgagcacggtatgcgtacagacctgttggatgggtattgcgcgcgattccggcccaagctcatttacaccgtcccgacattccaaaaccctaccggtaccacgctgccgcccgaacgacgcagcgaactcatcgacgtggcgcggcgctatcagtgtctgatcgtggaagacgatgcttacggcgatttgtggtacggcggggaatcgtccgacgcacatcgccccataccgctcaaaggcatggagaatgcgggatacgtgatgtatttgtcgacgttctcgaaaaccgtcacttcgggcctgcgcacgggatgggttgtggccgacccgcatgtgattaaccggctggcggctctgcggcgcatggtcgaccagcatacgagcacgtcatcgcagcgcatctgcctggaactgcttaaagaaggccgcatcgccgaacatttgcgcggtttgatcaagacttaccgcattcgacgagatgcagcaatcgcagcattggagcggtatgcgccggatgaagtgtattggaccgtgcctgcaggcggctactatatttgggtttccttaccggacggcgtgcgctctctggatgtattggaatcctgccgttcccaaggcgttacgttcatgccgggcagcgtgttcgacgttgacgaaatggatgattcccatattcgtctcaactttgtgcgcccggatgctgctgacattgataccggcattcgaatcattggcgagacgatagcacagatgtagccaagtgactggctcattgcggttgtcgagttttttgatggctgcatacccacatcgatgggtgcattcgacgaataaataagcgaggaagccatcatcagttcgctgtggcatgcgcatagcgttgtcgggcgaacggggcagaccacgtggtcgttgcgtgacctggccgatcgagccggcatcgcattgcccctggcgtagtggcgaggtggcgcagtaacgagtcacgccatcgcgagccgatgatgcgaaatgcggaaccggtcgcggccatcaacggctatcatacatgcggaagcaacgatacgttggcgtcagcacatccatctgactccagaaagggacacgatatgaccacatcctccgtttcgccggtgaccactgaactggcgggcagcgaaaccggcatcacgcttatcattcacgccggagcgggcagtcgtggcaagcgcagcacgcctgaacgcatcgcccaggtcgaacttgatctgcagcgcgccctcgatgccggataccagttgttggaatccggagcgccggcgcatgaggctgtggtcgccgccatccacgtcatggaagacgctcccgaattcaacgccggccgtggtgccgccctgaccagcgatggcatcgcccagatggacgcctgcctgatgaccggcgatggcgaggtcggtgcggtcaccggcgtaagcaccgtgaagaacccgatcgatgcggcgcgtgccgtcaaagagcagaccaagcatgtgctgttcgcggacccgaccgatgccgagatcgccgattggggcgtcgcgaccgaaagcaacgagtacttcatcaccgaacagcgtcgtcagtccttggccgaggctcagtccggtggcgatgagtgggagaagcatggcaccatcggcgccgtggcgcgcgatgccgaaggcaatatcgccgccggcacgtccactggcggcatcaccaaccagatgcacggtcgtgtaggcgattcgccgctgcccggttgcggcacgttcgccaaccagtccacggtggcggtgtcctgcaccggcatcggcgaggcattcatcaaggtggtcgccgcccatcaggtgtcggatcgtgtgcgtttcgccggcgagaacgtcgaggatgccgcgacggccactttggacgaagtcgccgcgcatcatggcgatggtggcatgatcgttctgccggcggtcggccgtggcgtggtcgcctacaacagcgagatgatgaacttcggataccgtagcgcgcaaggcggtaaggtgcagggctgattgcccccctgtattgcggcatatatcataatggccggtgtgctgcggattcttggtaaggaatccgcagcacaccggccattcatgtatgcggcaagtgccgccgatcagtgcggcagtgcgcgctacttggtgatcgtgttgtacgtgggcatgttcgtgtaatcgaactgcacgttcttcacgttctgtgcagacacggcggcgaaacgtttgaccgggaatactggggtcatacgcaacttcatcgctcctcttcctcgaatgaaactatgttccattggtatgagccagccacgtacggtattcgtgtctggcctgccacacaatgatgcagccgtatatacgggcacagcattgcgcggcagttcattgtatggaagacatgcaaactcaatgtttccttgtccaaataaaaaaacgagcgcggctgatgtgcggcaccggtccaaaaactcatgtccgccagcgcaacgcgactacgtaccttatgccggtctgcgcgtagaatagaacggctgcgatattgggttattcacggaggaatggatgcgacgctggctgatcaatgtagccaaaaatgagacgattctcatcgtcgccgcaatactcgccctgatttcgtgtttcattgtgccgccggacgccgattacaaaagctacattcacgccagcaccatcagccagctcatctgcctgatgattgtggtgtgcggattccagcgtatcggcgtgttccgcatcgtcggttcgcgattgctggagaaggtcagcaccatgcgcggactggtcattacgcttgtcgctttgacgttcttttccgcgatgttcatcaccaatgacgttgcgctggtcacgtttgtgccgttcgcggtggccgtgctcatcatggctgggcaagaggataagaccatcctcgtggtcacgctgatgaccattggcgcgaacgtgggcagtatgctcaccccgatcggcaacgcgcacaacctgtatctcaaagccctgaccggcatgccgaccatggaattcctcggcatcatggcaccgtattccggcacggcggccgtgttgctggtcatcgtgatttccgtggtgtttggcggcaaaccggtcggcgacctgggcgacctcgaaaccggcgtgctggctcccgagcgcaacaaacaccagcccgacgagattcgtatcaccggctacggcgccggttatggcggctggcgcaccatcgtctactcgctgctgttcatcgtctgcctactggccgtctccgacgtgattcccctgtgggtgatgtgcgtgatcgtggtcgtcgtgttcctgttcaccgatcggcgcgtattcaaatacgtggattggggactgccgctcaccttctgcatgttcttcatcttcatcggcaacatgaagcgcgtgcccgaattctacgaactggcgcgctcgctggtcggcggccatccgctggaggtggcggtcggctccagccaggtcatcagcaatgtgcccaccacgattctgctttccggcttctgcgaccaatggcgcgatctgatcattggcaccaatttgggcggcatgggtacgctcatcgcctcgatggcctcgcttatttcttacaagaacgtcgtgcgccaatacccgcacaagaaaggccggtatctggccgtctactccgccgtcaacgttctgtttttggccgtattgctgaccttgagctggatcatcgagccgagtctctgagcccagccatctccaccccgctgacgggggctgtcggcgaagccgactggggtggtctaccgcgcgtatacggtgggggagccggtcagtcggctcatggccgactgcgggatgtcatgaatgcggccgatggtggcatccagcgtggatacgccggatacgccgtctgtgttggctgtggtggatgcagaggtgatgctggatactccgactgcggacgatgatacggccgcaaccatcggctgacgataggcgttggagttgcgggccagccgggcgagcgcagggcgctgcctgcggaacagattgataaacataccgcatactccttcatcgttggccggcggtcttctggccgccgtggtttccatcctgccctcccgtgcttgtattcgctatgggggatagcccctattattccctgaatctgcacgattccccctcatccttgagggtgattctaacggcaaaggaatcggcctaatggccgatgtcaatcagcgcgaagccaccagcgtgacgctgtacggcttgatcttcatcgccagcaatgaagacggcgacggcaatgtgtaagcccgacgttccggcacaatcgcccccgaagcctcgccgcggtatccgatagtggttttcgccgtcggactggcgcttaacgtcgtcacctccaaacgcaccggtcgcgatggcgaggcgcccagcccggccagtccgcgcgcgatttccaacgtcacatccaccggggaatcggaggtattgacgattttgatgtaacggcaggcgtcatccccgtcatgcccggtggcactgacatacagatgtttggcggggcgtgacgcggtctgctcgatggacacggcatatgtcgtgtcgcccagatgcgtggaaaacagccgctccacctcataattcaccgtggggttcacatgcgccggattgagttcgataagattctgcgcccaccccttagccgggatatgcgcgagcagcggtgcataggaggtcatgcgcaccacgtcggaattgcgctcgcaaccggtcaggaacgcggcctcgccgagtgccgacttccacgtgttcgcgccctgttcggtctgcggttggccggcaaaatagccgttggctgaatattcgccgaaatagacgccggcgccgcaacgcgggtaagcgtcgaatcgtgacgcttggtatgcaaaccattcgggggagtggtaagaatgttcgtcgacgataatcgcgtcaccggtggcggaatcatgtgccccggaatcggttgcggccaacgctcgcgcatggtcccagctgcgtttcatcgtcggctggaaggggaacagtccggcgctcatcacacacagcatatccgggtatcgttcgtgaatggcctcgctgatcatgtcaaacttggccacgtagtcagccccgaagttttcgttgcccacgccgatcatgtccaggccgaacggttctggatggcccatatcacgccggaccgcggcccacgagctggactccggatcgccattcgcgaattcgatgaggtccaggtagtcctgaatcacattgttgcggaaagtggccgaattgatatccatgtggcgcggatcgcggccgggcgactggcatgcgatgccggcgaacagggtaggcagcggcttggccttgaggtcctcgcacaggcagaaatactcgtagaagccgatctgatagctctgcgaatagctggaaccatccggcatcttgaacgaccacatcgaatactgttggcgtcgcgcggccagggagccgacggtatccttccagcgatattcattgccgggcgtcacaccttcgacgatgcagccgccggggaatcgcagaaacgctggatgcaacgcctgaatggtttccaccagatcgcggcgcagcttgccgtaacgccatttcgggtcgcccgcgccccaatagtccgcatccatgaactgcaccagatccagatcgaacgtggtgcgttcgccggcgtcaatggtgatacgcagcttgccgtaatcggtgttcaggccggttacgtcggcgttgaaccggtaccagccgtcacggccgatggcgatggcaccatccgacgaatccggactgatcgaaacgccggaatcctgcgcattggcaccatcgtcctgcctcagaccggtctcttccgtatcgtcaagcggatctgcgtccacgatatacgacaatcgagtggtgctggtgagcggcagaccgtacctatcgaccacgccgacggacagcttggcccgcccatgaaccggacgtaccgcgagactgacggaataggtgtggtcggcgacgatggagaacgcgggctcgcccccgttgtcgccgcctccgttatagccgaggttttccagatatgcagggccggtttcggaaggaacatcggacgtgatgcgagcgtatcggctatgtgcgtgaattggcggggcggggcagtcggtggtcacctgctggccgtgaatcccgcgtatctcactgccgaggctggcggcggaacagttgatgaaatcccagaaacgcagggaatcggcctgtgtacgccatcgttcggcgccggccatacgccacgtgtgatggtcgagatagacgccgtcaaaactgtagttgttcaccatgttggcgttcagcccgccatccgcaccatggttgatgtcctcgaagaacacgccgtacagccgcccgcttgtgtgatgggtggggcttcccacgctaatccgcaccatggttttgattgtagagggaatggagcggaaaggtaaacggaagagttcgctcaccgttcatgttgcggtcaatccaagtcgactgttcgccggtatacagccggtaccctcgaaacaggaatggaaaatacggacgactaggagcgcggctgtgcaatcctcggtgggaatacgcgagcgcatcgaccacgtgtatccgtcgctgcgtccggcggagcgcgccgtggcccagtatattcgggatcatatcgaggaggcggccgacctgaccgtcggccagatggccgacatcgcccacgtcagccagccgacggtgattcgtttcgcccgcaagctcggtttcggcggttaccgtgaactgcggtacgtgttgcgccatccggccgccgagcacaaagtgaccttcaatccgttggctggattcgatctgaatccgtgggatggcgaagatgagattcccggcaaagcggcctatgtcgcgaaggcgctgatcgatgagctgcacagtgcgttggaccccaaggcctatcgcaaggcggtcgccctactcgccgaatcggagttcatcgatattttcggcgtggagaactcgttgacaccggcgatggatctgttcaccaagctcggctacctgggactgacatgccgtctcaataccgacgcttacctgcagcagatcggtgccgggcacctgccccacggcgctgtggccgtcgccttctcccattcgggcagttcggcggatacggtcaaagcgttgcgattggcgaaatcgcatggcgcgaaaaccatcgccataaccaatgccatcggcgcgccgctggccagctgggccgacgtgacgttgctgacgggtcgtgactcgcacacgatctatggcaatgcgattttctcgcgcgtggccgataccgcgctcgtggacatgctgtacatgggcgtgattctgtccgactacggccgtttctccaccgcgctcgacgaatccggtcgcatgattcgcgatcgcgtattcgagaactgagctgctgctttatcgtgccttgggctgtattgctctggtcgttgccgctttgttgccgctctggtcgttaccgtcctgaggcatgtgccagcgaatacgtagtggacttggcgtgcgtatgacgttcgatcttgccgctcaactccagctggtccaagagctgcgtcatctgatccttgttcaggccaagcgctttctgcatggttttgcggctgagcttcacgccgcggaacgcgaggaaattgagcgtgaactgctccaacgtttgaggcgacggttccagcgtcgccgtatcgagcgggcgggtactgacctggtcgtcaccgtccgggcgctcgccgaatccactgccgagaatcagcgtctgcaatggcgcgcagccgatgatgcgtgcgccggccaaagcatctgcggcgttatccgtcatgcgctgaatcgtggggaatgaatacattttggcgcgctgcgcttcgtcagtggtgctgggcgcggcggaagcatcggtatcggtccgatgcaaggatgcggcctcggccgagaccgggatgggcagcaccatcgccaccgaagtggggcctacgcgcagttgcggactgaccgcgctctgcgcgtaggcgtccataatgcgttggataccggtaccgcagttctcgcagaggcccaaatcggcgaacaattcagccaaacgcggggtgcgtggctggcatacgccgttgagcagatcgttgatttccaaaccatcggtcaggccgccgagcgacacgatctccaggcgggaatcgaagatattgatcagtgtggggccggagtacgtgtaatcgcgatgttccagtgcgttgaccaatgcttcgcgcagggctatggccgggtattggccggattcgttgataccgttcagcagggcgctggcttggtcgagctggcgcagcaccgagccggtgaatgtgtgacgttcgcgaatggcgtttttgccattgccctcgaaaatggtggccttgataacgaacgggcattggttggacagcagggtggcaagcgacgattcggtggcgctggtgaaggtgttgttggtgccggtgttggtgatgctgccggcgggggcattgccggcatcggcagagacggatgcagccatgttggtcacaaccgggctttcccaatccctgccttcactggcaaaacgaccctgtgcgtatgtgaaagtgagctcaccactatcgcctgcgacggtctggcccgatgcggcgtgatctacgttgctctccgttgtccccatatcgccgatggtaccggtgcaagccgacgttacgccgaggtgttttacacccctacggctagacttacatgagtttggccccgtagctcagctggatagagcatgtgacttctaatctcaaggtcgacggttcgagcccgtccggggtcacgatgcaataaacccttggtccctcatcgtctgtgggggccaggggcttttgagtattatgccggtctgggtccgtctggagcctgaactgtcgaccttgagatcagcggttatatgcttatcactgccatccgggaacacccttaaggggtgcggctcctgcataacggttatacactgacttgagatgtgctggataataaccagctatcgcgcgtccgccaatggcgacgaacgaaggaagaagggcccgtgccgcgagcaatcatcgaggtaagaaacctacgcaaggaataccccgtcgaggatgagacggtggtggcgcttgaccgtgtcaatctcagtatcccgcaaggccagatctgctgcattttcggcgaatccggctccggcaaatccacgctgctcaaccagttggccggcatggaaaaaccgacgcgcggcggcgtgagaatcggcggcgtacccgtcagcaaactcgacgagcgtgagctggcggccttccgccagaagcatctcggcttcgtattccagtcgtacaacctgctacccaatctgaccgcgctcgaaaacgtggcaatgccgctgatgttccgcggcgtgcccaaggaacagcgcgaacgtgcggcgcgtggcgtactcaaacgagtcgggctcggccatcgtctcagccattacccgcgccagatgtcgggcggccaacagcagcgcgtcggcatcgcccgggcgtttgtgaccaagcccgaggtggtgttcgccgatgagccgaccggcaaccttgactccaaaaccaaaaccgaggtcatgacgatgatctgcgcattcgcccatgacttcaaccagaccatcgtgctggtcacacacgatccgcagatggcctcatacgccgaccgcattgtcaccttgctcgatggccgcatcaccagcgatcggctcaacaccgacctttcccgcccaactgttccgtccacgccgtccgccccaaccacaccaactacaccgtccacgccgtccgcccatagaacccaaggaactgaccgatgaagcacctctcccaccacaccatcgccatcatcgtcgcgttgctctccacgctgtcactggcacttgccgtcatctcccttccgcatcaggcgtacgcggtcgacggcacagacggcacaagcggcacgaacagtacgtctcagggaagcgacggcgattccgcgccgatcgccggaccggtgcccaacatcatcatcaccaacttcgcgtatggaggtgattccgtggccgccggatccaaattcaatctcgacttcaccttccagaacaaggggcaggtggcggtgacgaacatggtcgtcaccgtggacggcggcgagagcttcgccatcgcgggaggcacgaacacgttctacgtcgacgcgctgtgggccggttacgccatgacgcaaagcgtgccgatgcaggcgctcgcctccgcgaaaagcggtgcccagtccgtgaccgtgaacttccgatacgagtatgtggacgccagcgcccgctcctcaagccagtctgacgtcaagatttccgtgccgatcagtcagcctgaccggttcgaaatcagtgatcccgtagtgcccgaccaggtgatcgccggccaggaaaacacggtcacgatggaatatgtgaacaagggcaaaggcgatatcgccaacgtcgaggccacgatggagggcgaaggtttcgatgccacgatgaaaacccagtacgtgggcaatgtggcttccggcgccaccggcacgattggttacgccttcacaccgcacgcgtcaggcgagctgaagaccacgctcaaagtcacgtacgaggattccgacggacagaccaagaccaaggaattcccgctcaccatacccgtaaccgatatgcagccgatggatgattccggcatggccgatccgaacatggaccagaacgccaatcagggattgccggtgctggtgtatgtggtcatcgtcgtgatcgccgtggtcattatcgtggtgattgtgctgctggtgcgtcgccggcgcaagcagaaggccaagaagaacgatattgatgaggactgggatgattggtccgaaggcaaggatgataagaccgataccggcgtgacggatggtgctgcggcagacaccgctcctatcacaccagtcaccccagcctcatcagtcgcaccagccggctcatcccacaaggcctgaaaggcccgaccatgcgattcggcgacatactgcggctctgcagacaaaacctatggcggcgtaaatcccgtacgattctgaccgtgctgggcgttatcgtcggctgctgctcgattgtgctcatggtctctttgggccaaggcattaacgagcagaacgagaagatgctcaaatcgatgggcgatctgtccatcgtcaccgtgtacaccaacggttatgccggtccgatggacgatggcggctcgtccaagatgggcgataccaagctcgacgacaaggccgtggaatccttccgcgcgatgagcggcgtatccggcgtgacgccgatgatgaacttcccttataacgtgacggccagagccggcgcgggcggccgttacatctatgattacgtgcagatcatgggcatcgacatgacccagctcgaccagatgggctacaagctcgtcggtggcgagaaaccggtcaaaaaagaccaggtgcttgccggcgaatggttcgcctatggtttcatggacaccctgaagaacggcgaacaacgcaccagcacacgtggcggtcagtattcctcatgcacgtttaaccaggccaccggccagtgcgaggaagatcaggacgaagatccgttcttcgacccgctcaccacgcaaatcagtctgaccaccggcaccaattatcagggcgaccagtacagcatgaacatgtacggcggcggtggcggcggcacaggcggcgcgggcggcgcaagcggcagcgccgcgggtcagtcggaaaacgtcaccctcgatgtgcgggcttccggcattgtggcgggcgactacaacaagggctatgccacctccgacggtctggtcatggatttgcaggcgttgaaggaactggccgccaaagtcgatccagccgccgccaaaaaagccaccgcctatgatcaagtgctggtcaaggccgccgacctcaagtccgtgcccgaagtcgaatcacagatcaaagcgttgggctacgagacctcctcctatgaagacatgcgtaagtcgttggaagaacagtcgcgcgcgattcagctgattctgggcggtatcggtgcggtttcgctgttggttgcggccatcggcatcgccaacacaatggttatgtccgtaaccgagcgcacgcgcgagatcggcattatgaaggcgcttggctgctacgttcgtgacattcgcgtcatgtttcttgcggaggccggcgcgatcggattcttcggcggattgatcggctgcgtgctgagcggactgatatcgctgggcatcaacgttgtcggcgcgttgtatgcgggcggcatgagcggcggcatgtctggcggtatggtcagcggtgccggcgggggctccggcgacggtaccggtggcggaacatctatctggaccatactctggcaggcgatagttggtggcgagaatgtgacccgttattcggtgattccgtggtggctgttcctgttcgccgtgctgttttccacgctgatcggcttgctattcggcttcggcccggccaataaagccgttaaaatcccggccctagacgccatcaaaaacaacgagtgatcgcctctgtcacctgctccaccgttagtccataacgttcgttcagttcgcccagcgacacgcggtcggtaaattccttggctgcgccgaagttcagcacacgaggattacggctgccgtccgagacatgatgattcgcatagtatgcggtcactttctcgccccagccgccttcaagctgcccgtcttcaagggtgatgacctgctggtggccatcacgcaacgactccagtacgtctgaatccagcgacgtgcactggcgcgggtcgataaccgttgccgtgatgccataatcgtcagacaatgcggcggccgtctgctccgccaacggatacgcattgcccagtccgatgatcgcgacttgcgagcccgtctgattgacccgccaatccagcatgtgacgcgcaccggcatgctgagccgttacgctaacggtcccgcggactgttgcggcagatatgcccccgctggcggagctggcggaggctggcagcgaagctgactgggggcggtcagcaatctgcccacccgtcaccggcagcagcgtcgcatcccgttccgccgccagaatcgcctcgcccggcacccgaatcaccgccggaccagcaggggcgtccgccgaaccggccggcgcggtagcccatgccaaatcagccagatagtcgcgagccgaagtcggcaccagcatcgtaacccctggaatattggagaacatcgtcacgtcatatgcgccggaatgcgtattgtccgaaccggacaagccgcccagaaaatcaagtaccgtgactcgcgaacggttcaggctcatctcctggaagaactggtcgtacgcgcgctggaagaaggacgccgtggtggccaccaccggcgtgccacccgcccgtgcgatgccggcagcgtacgccacggcatgcgattcggtgatgcccgtgtccacgtaatgcgaacccgcgcgttcgcggaattcgtgggtgatgccgttggagcccggcgtggcgggggagatgaccacgagtcctggctcggtggcgaaacgcggttcgagcgtggccatcgccattttgccgtaatgcttgcgcggatcgtccggcttgccgattgcggcatccggattctgccaatgcgaggcctcgcactggccttcatgcggttcgtgatcggacaggttgcagtgatccgaatgccacggctcgctgtggttcacgttatcggtggggtgcacgccggtgggggagtcgagtgagaccggtaaggtcgaggcgttttgttgattggcgtgagtctcctcactgtcatatcccgcgcccttcagcgtgtggatatggaccaccaccggatggtcgatatcgcgcacttcctcgaaagccgcgaccagcgcggaaacatcgttgccggcctccacataccgataatccaagccaaacgcgttgaacaggttcggctgggcggtgccgccggatgcgcgcagacgggcgagcgggccgtacatgccgccgaaatcgccggcgatcgacatctcgttgtcgttgaacacgatgatgagattgccgccctgctcggccgcgttgttcagcccctcgaacgccacgcccgaactgagcgaaccgtccccgatcacggcgaccacattgccgatgccgctgcccggcccctccatgtcgcgggttttcgccaggccgcaggccaaggagatcgaggtaccggtgtggccgagcacgaactggtcgtgttcgctttcgtcgggattggtgaagccagtcacctcgccgaaacggttcggatccatatacgcgccggcccgtcctgtaagcatcttatgcacgtagctttggtgggatacatcgaacacgatacggtcacgcggcgaatcgaatacgcgatgcagggccaccgtggcctccaccatgcccagattggaaccgatatgaccgccgtgttggtggccatatgccagcagcgtggcgcgaatctcgcggcacagttcggcgagctcgtcgggggcaagggccttgacatcggccgggctggcaatgcggctcagcagatgggagtcgtcgccatgggaaggggtaatgctcggggggatgtcgtgaaggcgcgcggccccctcggcggcaccggagacggcgaaggaatcgcttgaatcaaatccgtttcctgacgcgttgcgcataccctcgaatctcccttcgctagtctttccgaagttgaatgctaacgcccggcattgtccgaggtccacatgacgaatcaatgcccccaacatctccgtaaatgggtgattcgttcgctgcgcgatgtgggacaatgaatgcggtaattccttttgataccaaggagcgcgcaatgaaggccgtatacgcatccaccgtcaaccatgacgatccgcttgccgcgttggcggtgggcgagcagcccgaaccccaggcccgcccgttctggtcgaccgtttcggtgcgcgcggtgaccgtaaaccatcacgacgtctggtcgctacagggtgtgggtctcgccgccgaacagacgccgatgatcctgggcaccgatgccgtgggcattctggacgaggacatccccggcaagcatgggctcaaggccggcagcgaagtggtgctgtacacgttcgtcggcaccgatggggcgggcgtggccccgggtgagcgccgtacgatcctctccgagaaataccccggcacgatggccgagaagacttccgtgccgtccgccaacgtgttcgccaagcccgcaaacctcaccacggccgaggcggccgcactcggcaccagctggctgaccgcctactcgctgttgttcgaggccgccggcatcaagccgggcgactccgtgctcatccagggcgcgggcggcggcgtgtccactgcggccatccaactcgcccatgccgccggtctggaagtgttcgtcaactcgcgtgacgcggacaagcgcgccaaagcgctgaaacttggcgcgaacgccgcgctggagaccggtgcgcggttgccgcgcaaggtcgatgcggtgatcgagtccgtgggggcggccacatggggtcattcaatgaaatccgtgcgccccggcggcaccatcgccatctgcggcgccaccaccggcgaccagcccggtgccgaactgacccggttgttcttccaggacatccgcgtgcagggctgcacgatgggttcgcgcgaggatttcgcacgattgctgcgcttcgtggagcacgccgacctgcatccggtgatcgattccgtggtcagcgggttggacgccgcccccgaggcgttcgccagaatgatcgccggcgacatgttcggcaagatcgtcatcgcattgtaggagcccggctccacgggccgggggagcgggtcggcggggctgacccgggaaaaaccgcaaggcgttgccgaagtaagcgcccaagcgtacagtgggccttattctcaataactagggagtaaatgataatggcaaatgaatccaagcccgaagtcgcagtggtcatgggatcggccagcgactgggagaccatgaagcgcgcctgcgatattctcgaccagttcggcgtcgcctaccaca

SEQ ID NO: 545 - DNA, 26903 bp, Unknown
  R48_24m  MAG No. k141_67477
ataatccgcaaggtgcttttgcgtaggaccaaggcgccggcgatgacacgggacaaccacaacagcgaatgacgcacaacgggccgtccgggacacccccgtaaacggtcgcgtcgttttccattggtgtcattacggggtccgggtcccgcaaaacgttggaaaatcagcgtttcttgaacggtaaggtaacatatggctgaatttgtgtttcagatgatcaaggcccgcaagtcttacggcgaccgcgtgattctcgatgacgtgaccctgagcttcctgcccggcgcgaagatcggcgtcgtgggcccgaacggcatgggtaagtccaccctgctgaagatcatggccggcctggagaccgtgagcaacggcgaggccacgctgaccccgggcttcacggtcggcatcctgcagcaggagccgccgctggatgacaccaagaccgtgggcgagaacatcaagatggcgttcggcccgattgccgagaaggtcgcccgattcaacgagatcggtgaagaaatggccaacccggacgccgacttcgacgcgctgatggaagaaatgggcaagctgcagaccgagatcgacgccgccgacggctgggacctcgactcccagcttgagcaggcgatggacgccctgcagtgccccgatccggacaccccggtcaacgtgtgctccggtggcgagcgccgccgtgtggccctgtgcaagctgctgcttgaggccccggacctgctgctgctcgacgagcccaccaaccacctggacgccgagtccatcctgtggctggaacagttcctgcaccagtacaagggcgcggtcatcgccgtcacccacgatcgttacttcatggacaatgtggccgaatggatctgcgaggtcgaccgcggccacctgtacccgtacaagggcaactactccacctacttggagaccaaggccaagcgtctggagatccagggagccaaggacgccaagctcgccaagcgactgaagaacgagctcgactgggtgcgctcctcccccaaggcccgtcaggccaagaacaaggcccgtctggaacgttacgaccagatggagaacgaggcgcgcaacaacaagaagctcgacttctccgagattcagattccggccggcccgcgcctcggttccaccgtgcttgaagccaaccacatccataaggctttcggcgatcgcgtgctcatcgacgacctgtccttcacgctgccgcgcaacggcatcgtcggcgtgatcggcccgaacggcgtgggtaagtccacgctgttcaagaccatcgtgggcctggaaccgctgaccagcggcgagctgaagatcggcgacaccgtcaaaatcagctacgtggaccagaaccgtgaaggcctggacccgaacaagaacctgtgggaggccgtgtccggcggcctcgacttcatcgaggtggccggcgtggaagtgccgacccgcgcctacgtggccagcttcggcttcaagggcgccgaccagcagaagctgaccggcgtgctgtccggtggtgaacgcaaccgtctgaacctggccctgaccctgaagcagggcggcaacctgctgctgctcgacgagcccaccaacgatctggacgtcgagaccctggaatccctcgaaaacgcgctgctcgagttcccgggctgcgctgtggtgatctcccacgaccgttggttcctcgaccgcgtcgccacgcatatcctcgcgtgggaaggcgacgacgacaacccggccaagtggtactggttcgaaggcaacttccaggcctaccaggagaacaaggtggcccgactcggtgaggatgcggcccgcccgcaccgcctgcacaagaagcttgtgcgcggctgagatacgccggcattagtgccacaacgcgctttatacgtcgaaagccgtccctcaggggcggctttcccataattgcccccatgactgccccgccccgcatcccataaaatcccacagtcacctacggcaacgcaccggcaacacaccggcagtgcagcagcaacgtagcggcaacgcaccgcataaccaaccgtttaccttccaaacagtctcgttacatttcgctcccggaactcttaacccccaccggatagactgccaaccataggttggaatacgataaccgaatatcgaacactgcagaacaggaatcgaggaacgccatggctcaggcaaccaccgtaactccattggaccatctggtgaaggtgctgaagttgggcgagccttccgcttaccgcaatcacacatacatcaatggcgagagtatgtacttccccactggccgcgtctacggtggccaggtcatcgcccagtcggtgatcgccgcgtccaaaaccgtgggcccttcacgcctgccgcattcggtgcatggctattttattgccgccggcgatattcgtcaagacctgctgtttgacgtcgagaaccttcgcgacggccgctcgttctccgctcgtcgggtcaacgtcacccaagccgaggggtcgattctcacggccatcgcctccttccaggagaccggtcaggagggtgtggaatttgccgatccgatgccggaaaacctgcccgatcccgaaacgttgacttccgccaaggaactcatgcagccgttcgccgaaaagtcgccgttcgccaatttctatgtcgagaaatcgccattcgatatccgccacgtgacgccgaccgtgatgctgcgcgcagacaaggattccgccgagcatgattccggcaagcagatggtgtggatgaaggccgatggccacgtcgatgtgccgcaggtcatgcatcgtgcgatgctggcactcggctgcgatcaggtgatgatggagccggtgctgcgccgcgccggactgtcgatttccacaccgggcatttcctatgcgtccatcgaccattcgatgtggtggtatcaggatatcgatatcaacgaatggcatttatatgtgcaggatacgcctatcgccgcgcacggacgcggactcggcatcgccaaagtgtatgcgcagaatggcgacttggtggcggccatcgctcaggaagctatggttcgcgtgccgcaggagtagtgggaatcggcttggccgatggtgtggttttttcttctctcccccagtcggctacgcctacggcccctcgccagagggggcttatcacggattatcgcttgtaggcttgggctatgtcgctacggcgcttggcttccttgattttcgggttttcggggccttcgttcggcggtagctggcacaaccattcgccgataatgccgatgatcatgtcggcgatgcacaccacggccacgattgcgcactcggtgacggcgtgtgcatagaaatccgcctcgatatggctcaggctcatcacaatctgaccgccataccagccggcgagcgttgcgcccgccaatcccagtgcctttgccagcaccagcgtatacaccgcgatagtgggattgatgaagctatgcggacgcttcttggggtcggtattcgcgtatttatgcacttgcagggccaagatcagcacgataacgcccagcacggccagcaatccggtcacaatccaaggcgcaccaatcagcgacagtcccgagctttcgccgtaggaggccagaccgatacccgccaacaggcccagcacggcaccgatcacatactgccaccatggtgttcgccgtgttttcatgtccggcctccttatcgttgcgttgctgtttgctgtttgcgaacggccctcgcgcctgggctgttcatcttgatttggttttcgtcactgccgtgcccggctgttcgaggccggataccggtccgtcaccgtctggtttctagcctaccgttcgtaactggttctgccatcagctcaactgttcgacagtatccagttgtccgatagcaatccgacctgtccggcatccggtgccatggccaaaaggaaggccaccgggtcgccgcccagagaagcattcgggtccatatccagccaaggtgccaataccgacgcatggttacgggccgacggccaaggaatgctgcagttgggctcgtcggaagtcacgccttccatgtcgacaaggtcaaggtcgactgccagatcatgaacactttcgatgctgcccaatacggcaatcaggtcggcgggcggcaacttggtttcgatttggatgaccgcgctcatcgcgtccgggccgtcgaaatggctgacatggtagagcggcgagatgccctgtacctgattgccaggaacactgtcgatggaaacgatggtttcgcggaacagccgttcgacatcctgcgaggtggaatccagcgaaataatcgccttgcgtgagacgggtgccgactccgacgctgatttttgcttgactgcatgcccgccgagcatccagtcttcgctctcgagctgcacggcgttacggtccggcgcggtggccagcaaatcggctacaggcccctcatgggctccggcgagtttggcgttcggattcagcgccgcccagggagccagcacaaacgcgcgctgccaagcacgcggatggggcaatgccagatccggatccgcgctggtgatgccatcaaagtcgataatgtccaagtccaacggcctggaatcccaatgattctcacgaattcgcccatggttcgcctcgatgctttgcaacgcggcgagcaattcgtggctgcccattgtggtttcaagctccaccacggcgttcaggaaatccggcgtaccgtcggccatgccccacgcggccgtgcggtaaagcggcgaaataccggtcacctgtgtgccgagcagcgcgtcaatctcccgaacggcggctcgcaaggtggattccacctcgcccacattgccgcccaaggccaccaccgcgttatggatggcatgctcttcagcagtacgtccattatcggtggcacgcacgcgcgagatggagaccgatacatctgcaaaagccacgacgatgggtgcgtgaggcttgtgcacggtgacgtcgatggaggcgacggccggcgcatcggcaaggatctcgtccgcgatacgttgggccagacgctcgatcaggtccacatgagggccttcgatgacagccgtgatgtccttggccacacggccgtaatcgatggtgtcgttgagatcgtcggattgaccggctgcggccagatcaaggtgcagggtgacatccacgacgaaggtttgtggccgttcgtgttcgaaggcgagcacaccgtgggtgccgttggcatgtacgccggtaagagtgatggtgtccattggtaaggctttctgctcaaatgctcccctcagtcgccttcggcgccagctcccctcgtccgaggggagccaagacctagaagcaaccaaaaaacggagccaggggaatcatgcgtattcgcgccaggtgttgccggcgatgacggcggcgcggcttttggccacgtcgtgtacgcgcacggcccatgcgccatgttcggcggacagggcggacaaggctgcggtcacgtcatcgcgctgggccatgatcggcccatcagcaccggcagcgcccgcctcggtaagcatcgccgagatgaagcgtttacgggactggccgatcagcaccggatatccagtggcgcggaaggtctcgagtccggtcagcagcggcaggttgtgctcgatgccgggcttggagaaacccaggcccgggtcgatgataatgcgctcaggctttacgccggcggccagcacaccgtcgacttggcgcatgagttcgtcgtgtacgtcggtcaatacaccgtgctcgtagacggaggtgtcctgatcggggttcgcgcccttggagccggcgagccaaccgcgccaatgctgcacgatgtacaggcagtcgtggtcggcgaccacatgcggcagttcggcatccagcgtgccaccggaaacgtcgttgatgatctgggcgccctcgctcagcgcagcggcggccacggatgcgcgcgtggtgtcgatggacagtatggcaccggccggaatcaatgtcttgacggcaccggcgatgcgggccagttcgtcggcctcggacacgcgcttggcgccggggcgcgtggattcggcgccgatgtcgatgatgtccgcgccggcggccatcatgtcgcgcccgtgctgggccgccttggccgggtccagccacaggccgccgtccgagaacgagtcctcggtgatgttgagcacacccatcaccatagtgtgcgtactgtcatgcaacgcctgcaaatcagtcattatgtttccccttctatgtaggtcccaagtgagctccctatgatgagggagcttagtagacactatttatccaaaatgaggctcatggcttcggctcgggtggccggattgcgcagcatgccgcgcaccgcagaggtcaccgtgcgggcggaagacttcttgatgccgcgcatagacatgcacaggtgctcgcattcggtcaccacaatcacaccacgtgcgcccgcatactcgaccagcgcgtcggcgatctgctgggtcaaacgctcctgcacctgcggccggcgagcatacacctcgaccagtcgggcgagcttgctcagccccatcaccccgtccttggcgggaatatagcccacatgggccacgccgtggaacggcagcaggtgatgctcgcacaccgaatacagttcaatgtccttgaccagcaccagttcgtcggtatccacgtcgaagtgcttctccagcacatcggccggggaagcctgcagaccggcgaacagctcgcggcacgcgcgggcgatacggtcaggtgtttccaccagcccctcgcgctcgggatcctcgccaatcgacttcaggaacagacgtacggcctcgcgcacgccttcctcgtcgtatgtgcgtttctcccgctggcaagactctatatattcgttcatctcatctctcccttgtcattgtccacaacgacgtcggcccggcctgcgtacgtgagaaaccacatgaacaggtcgggccgaatcgtcatcgtgtctactcttccggcttcatgccgaccgagcgcttaaggctttcgggaatctccaccggcggcttgtccgagtcggggcgacggtcgttggacagccacaccgggcggaccggagccttcttgatcggcgcgaagatcgccgcaagttccttctcgttcagggtctccttgaccaacagctggcggaccagctcgtcaaggatctcgcggttgtcgttgatgatggtccacgcctcggtgtgcgcggtctccaccagcttgagcacctcgtcatcaatcacttcggcggtgcgatcggagtacttgcgcggctgcagaccgtccatcacagtggtctggtcatcgtcggaaccccacttgatggcaccgagcttgtcggagaagccgtattcgatcaccatcgtacgggcgatgttcgtagccttctcgatatcgttcgaggcaccggtggtcgggtcgtggaagacgatttcctcggcggtgcgaccgcccatcgcgtaggccatctggtcgagcagctggttgcgcgactgcgagtagcggtcggaggtcggcatgacggcggtgtagccgagggcgcggcctcgcggcagaatcgtcaccttggtcaccgggtcggtgttgttcagggcggcggctaccagcgcatggccaccctcgtggtatgcggtgttgcgcagctcttccagagccatgcccttggacttgcgcttcggtccggcctgaacgcggtcgatggcctcgtcgatggcgcggttgtcgatcaactgggcaccggcacgggcgcacagcaacgcggcttcgttgagcacgttggccaaatcggcaccggtgaagcccggcgtgcgcacggcgaccatgtgcaggtcgacgtccggtacgaacggcttgcccttggcatgcaccctcagaattgcctcacggccttccagatcaggggcggccacgcccacctgacggtcgaatcgacccggacgcagcagagcggggtcaagcacgtcagggcggttggtggcggcgatgatgatgaggttggtgtcgttgtcgaaaccatccatctcgacgagcagctggttcagcgtctgctcgcgctcgtcgtggccaccgcccatgccggagccacgcttgcggcccacagcatcgatttcatcgatgaagatgatggcgggggcgttcttcttggcctcatcgaacaggtcacgcacacgggaggcaccgagacccacgaacatttcgacgaagtcggagccggccatcgagtagaacggcacgccggcctcgcctgcgatggctcgggccagcaacgtcttaccggtgccgggaggaccgtacagcagcacgccacgcggaatacgagcgcccagcgccttgtacttggacggatccttgaggaagtccttgatctcctcgacttcggccacggcctcgtcttcaccggccacatcggcgaacttggtggtgggggtctggccatcgagtagcttgccgctgttcttcttgccacccatgccgagcatgccgccggcaccacccatgcggctcatcaggaaccagaatagggcgaagaagatgatgaacggcaggatcgaggtgacgaggtagctcagcatgctggtctgctcgatattcgaggtccagcccttttcgagatcaccgttctccacggccttggccacctgtgcgccctgcgcgaaggtgtagtagaactgcacgttcttgccgtagttggtcaccttgccggtgtcggcgtttttcttggtgtagtcgttcttcagcttaaggcggacgacctgcttgttgtccgtgatctcggcgtaggtggccttgccctgattgatcagcgcgaaaccatctttggtgtcaatggtcttcgtgccaccgccggcgaacatctggaacatcagcacgaccatgaccacgagtacggcaccccacagccagggggactgccatatcggccggttctcgttgttgttgcctttgccattgttcccgttattgccacggttgaacgggttggtgaacgggttgccgttgttacggttgttgttcgggttcggattattgccgttacccggcccttgcgggaagctcatgcttgcactccttggtagacggacggcttgaggaccgcgatcgaatcgaggttgcggtagcgttcgtcaaagtcgaggccgaagccgacgacgaactcgtccggaatctcatagccggcgtacttcacatcaacgtccacttctcggcgggaaggcttgctcagcaaagcgaagacctccacggaagcggcaccacgacgtttcagttctgcgaccagccacgcgagcgtgcgtcctgaatcaacaatatcctccacaatcaaaatgtgccgtccgcgaacatcggcggacaaatcctgcctgactgtgacctcaccgctcgacactgtgcccgagccatagctcgaaaggctcatgaagtcgatctgtacaggaatgctcatggcctgggtgaacgcgaccagcgtattcacggcccctttcagcaccgcaacgagcagcggattcttatcgcggtaatcctcgctcgcgagagcggccatctcgtggatcttggcatcgatctgttctttgctgaccagctcgtggtcaatatcttcctcaacgtcagcgattcgcatgcgctccatcttggcacacgcgaatgacgtgtttcttgcgattggctgaataacctctgggaagtgagacgccgccttggccatgccaatcgacgaccagccggtcgatggcggcaatctgggcggcactggcgttcacaccggcctggctcagcgcgtgagcgatgacccgcaaccgaatcgcctctggctcacgtgcaatacgtttgacgccgatcatcaggccgatgccatggcccgaatcgttggtatcgtctgcagcacaggctcgtggcgtatcggtcgataccgctgccgacgatgccggccggtcaactgccgtaaccgcctcccccatcacctcgtcggatcgctgatccagatactccttgtccattctggccagctgtgcgctttcggcgaaatggcgggtgacattgaatccagcgaatcgttcgatggccggcagcaggtcgtggcgcacccgcgagcgcaacggatagtcgtccggcaactcgccgtctaccgcatcgccattggtggggtcatcccaatattccacacccaagtcttcacagaggccggtggtttcgtctcgagtaagggtcagcagcggccgcgcaaaagtcacgccactgcgtgtgaagacctgcggcatgccggccaacgcatccacgccacggctgcgcagcagtccgatcaatacggtttccgcctgatcgtccatagtgtgggccaacagcacggcaatggcacctgattcacgcgccgcggcgcacagctcgttgtaccgggcctgccgtgcggccgcttcgaggccctcaccgcgtgcctgcacggttgtgttgcgcacgatgaccgggcccagtcccaacgcacggcaacgatccgcggcctcgccggcgacctgttcggaaccctcctgcaagccgtgatccacaatcacgacaccgcaacgcacgcccatggacgtgcatacgatatggcttaccgcggccagcgccatcgaatcgcgcccgcctgaacaggccacgagcacgagtggtgcatcggaggcaacggcatggtccccatgctgcgcgaattcgggagcctgcacatcgcatagttccacggcgctcagcgttgttcggaccgcgcctacggccttgcgcaatcgtgcggaatatgccatgtactcaccacccttttctggttataggaactcgtgcgtttatggacgtttacggcctttgtagcccttgatggcccttgatgcctcttttacagccccgcgagcttggtgatgaacgagtcgatggcgctacgcgcggcggcataatcctcaggattgttgaccaccacggcaaacgacaacgctcccccattggtacgggacacattgccggccatcgacgtgaccgtgccgaggctgccggttttgacgcgcaacagaccggccacggcatcatccgtataccgatcctgcgccgtgcccaccaaccccgcgatggatagaccttccgcaccagcagcaccgctctcggtggtcagattacgttgttggacggccgccagcgtgcgtacggtgagccgggagccgggagacaggccggagcaatcggccatggtcagaccggatgtgtcgagaccgagatcgttcagagtggatttgaccgcttccgtgccgccttcaggactgtttgtcgctgatttcgccaaggcggtgagtctgccgaactcctcggccagcgtattgtccgaatgccgcaacgtgtatgccatgatttcggacagtgttgccgaactcaccgaggccaaaggcgtttcgccggatggagcggtgtttgccgtcacgtctccggtaacggccacaccgttcgattggagcagttcggcgaatttcgtggccacgtcgctggcggtgtgctggaacagttccgggtatccggccggatcatcagggtcggccggcgcaggcgtatcggcggtgtattggcggcctccatcaatcgccattgatgagaccggcgtgaagtagacggtgtagtcgcttaagaccgcgccgccttccgacagacctgcgggaatgcgtgagtcgccgaatagggtgtcgtcgtactcgagattgacggaagtgatgcctcgctgggcgagcgcggccacggtggccttggccaaggtgttcagaccggcacgtccgttggtatggtttgcgtcggaatcgcctgcagacagcagcatgtcgccattgcctttgagggtcaacgtattggtgccgtcatcggattgggtcaggaacacttgggtatccaaggtggatgccatgttcagggtggatgaggcggcgagcgcggtcagcgttttcagtgtggatgcaggctcgcgtggagtgttcgactcatgttcggcagcgacggcgccttgggcgtcttcaatgatcaccgacgtatcgtttcccacgccttgcgtggacagcaattcgttgaccagtgcagaagcggccgtggaatcaatggccttgttcgcgttcagggcaccggcgatggtgccgcctgatttggcggtggccggattggcgaaaacaggtgcggtgacaggttttaacgtcaacaatccgggggccacgtcggtgatgtcggcggcgcagtaccccgcgaacagggcgatggtggtcagtgcggaaatgatgacggtcagtgttcggcgatgcgatcgttgggtccgccgttgcgcttcacgtcgctgacggcgtgataccgctgtagataccatcgtgctccttatgccaaggcaatcatttctgcaatgaggcgaacgagtcgagtgttgccacaatcgagagcattcgcgcatccatcagcttaccgcccagccatgtcccgagtgccagaatgccgatgccattggccagcgcgaccggaataatcgccagccacatgccgccttcggctcctgtcagcagcatgaccagcgccacgatgccagtgggcagcatgagcagcaggctgccaagcatgtagacgaacgggaagaagccttgggccatggcgcggccttgaggcgcggagaacggcttgtccattgaggcgaccgggtacatcagtacacaggaggtgacttcggccacgcccagtccgctcaaggcgatgcccatgcccgtggcgaggaagatcaggccggtagcgaggtcatcgggctgcgcccagcgtccggtcagtgcgccgaccagcacgatgccggcgagatagagcagcaccatgtagacgaccatgatgccgacgtagacgcgtacgcggccgattctgtcggtccggccacgcacgccggcgatgacttccatggtgaagccgcggccgtcatatgcgagcccgttgctttccacgacggacatgaaccagccgcaccagatcagcgactgccagacgaccgcgctgatgccgtgtgcctggaaggcgaagatgatcaggaacaggaccggcatggcgaaggtcatggcttggcgggggtctcgtttgagataggtgatcaggcgtgcggaaaccgcgccggatgccgaatcgggcatccatgcgaatgcgccgatgcctttggcggtctcggacggactgtttgcgccgatggtgagccgttcatgtctcagacaccaggtgcagacggcgaagcagacaatccatgtgacggcaaggatggcgatgcgggcgagcagcaccgcccaggctccggtaagcgcgtcgaacggtagttggaaggccgcgccgaacggcgtccatgcgacgatggtggtcgccgcgccccaggtttcggtgttgaggctgaaggccacgccggagttgaccagaatgttcggcaactgacagatgataacgaacgtcagcacgatgaagatatagaacgcgcctttgccgcgtttgctggtcaccagcgtggtggatagggcgatgagcagtttggagatgctcatcatggtgatgacggccagcactgcggcgaggagggaactgatgattacggctggtcccatatgccgataggccagtgtccagagcatcagtgaggccacgccggtaagggcggggatgccggacaggccggaaagcagcaagccgaattgcaggttgcggtcggcgatgccgtagagcgcgaatttgcgtgggttcatggtggagccttcgccaagcatcatgagctggatgaagccgatgaagatggtcatggtcgcgccgaccagcacgacgactatgttgacgatgcctccggaaccaaggatgttcagcggaaagccatccgcgttcacggtgaagggcggcagtatgccgatgaaccatgcgagcacgccggtgccgatgatggtgccggccgcgagtacggcggaaaagacataggcgacggtctgccacgccgattttcgcagggtggcgagcgtgagcgtccagcgcaggcggaccagggtgatggcgctgctgatcatcggcgggcctcatcggtgggtgtggcgggcgtggcggttgtaagcggaatgggctggaccggctggaccgaagttggtgcttgggcttgggcttgcccgccgtcgagccatgcgagatgggcggcttcgtggcggccgccgaccagttgcaggaagcggtcttcgagttcttcgccggcggcgacctcgtccaccgtgccggccgcgcacaccagaccgttgttgattacggccacatgcgtgcacatcttttcgaccaatgccatcacgtgcgaagagataatcaccgtgccgccggtcttcgcgtattcgatgaggatgtctttgaggttggcgctggacaccgggtccacggattcaaacggctcgtccaggaccagaatgcgcgggctatgaatcatcgcggaggccaggcagatcttcttggtcatgccggccgaataatcggtgaccatcgtgttggcggccccggccaagtcgaaagcattgagcaggtcctgggcgcgacgcgtggtctcatcgcggctcatgccgcgcagcatgccggagtagacgagcaattgcaaaccggtcagtcggtctaagatctggtcgggctggggcatgacgccgatcatgcgcttggccgtgttcacgtcgctccacacgtcatggcccaaaatcatggcggtgccggcgtccggtaccaatagaccggtcaccatattgagcgtggtggttttgccggcgccgttggggcctacaagtccatagaacgagccgaccggaatatcgagcgcgagtccgttgacggcgatcttccggtcgaagtgcttgaacaggccacgaatggacaccgccgcattcggattcggcggccatgcttgtggctgcggttgcgacggctgtgcaggcacgggggcggcagctggcatcatcggcggctgaaatccgacattcctttgagtattgtctaagctcatacatccactctaccccaccagccaaccctcagcgaagcaaacccccgggttgctgttggattgccccgctgagcggctccggactagcggactcggtcaacccttatgcgcgatgggcttccactgggctttggagaagagggcctggaaggagatcggcacgtagctgagaatgtaaatcgggaagctgagcacataggcgagcagctccttgttcgtggcaccgatctggtcgcgctcgacaatgatggtcaatgcagccaatgccatcaggcccaacaccgatatgatgatgccactggaccaactggccagcgattgcagctggctcggccaactcacgaagccacacgcggcgaacagcaagcccattaccgcgcgaatcacgcccaacacggtaaacggacacagcatcaaggtgaagtcgatgcaggagaaatcacgttcgcgaaccgcgcgtttcagcaatgccgagccataataacggaatacctgcaggaatcccttgctccaacgcaaacgctgacgccaactttgcgagaaggtaaccggctgctcgtcgtagagaatcgcagtaccgcaatagccgatgcggtcgccatgcagaatcgaatccatagtgaattcaagatcttcagtgagcagatggaacttccatcccttgttccgcttcatcacctcgcgggagaacatgaatcccgtaccgcccacatggcaagaggaaccgagaatcatacgcgagttagacaggaatcgcgattcacggatgaaccacagcgcagaaccagaagacacccagttatccgccagattcaccgaattacggtagctggtcagaatcttgaatccggagcagaacgccttgttcatttcctcgaagtagtgcttgtccagcttgttatcggcatcgaacacgaagtaggcctcataatcatcggccacaccgatgtcgagcatatgccccaacagatacgtcagcgcatatcccttgccaaccagctcaagattgtggcgttccaccacatggcagcccaaagaccgcaccacgtcggcggtgttgtcggtgcagttgtcggccaccagccagatgtcgatgaggttggacgggtaggtctgatcgcgaatcgacccaataaggttgccgatcactttttcttcgttgcgcgcggagatcagcacggcataccggttggtcatcggggcgtcggggaagcgcacgggcttggcgaacagggacatcacgatgcacagtccctgatatatcatgccggcaccgccgacgatcatcagaagaatatcgagtacggaaagcagagtcatcagcgccaccctgccctaggattgctggaggcagattgatcagactgcttggtttgcttgcgttgctcgggctgctcaggctgttcggcggaccgctcaggctgctcgggctgctcagactgctgcgtatccgcggcaccacgctgcggaatcgccgccgtatccggctcatcaaagcttgcatccgcaccgactgtattatcggcgttatcggtatcatcggcatccgactccggctcagtgccgtgtaatcccttgcgagcgctggaggatagcacgttcttcggaatcgccacggtggcggaatcgtccaaatcggattctttcgtctcgtgcgacggaatcgcataaatctgttcctgcagcaaacgcagttcctcattcatcggcacgcggttggtggatcccctggccgcacgcggcatgtgctcgccgattggctgcaatacgtgctcgccgaacgcctcggacgcctcgacgatcttggacttcttctccggagtcggatcgttcatcagcggtgagtcaatcagctcatagcgcttggtgtacgcacggaagatggcctgcagcgatgcggtgaccggcagcgccaggaacgcgccgaatgcgccgaacagcgagccgaacgccagcaccgagaggaaggcgacggccgcgttgatatccatcgtgcgctgcgaaatcctcggcgagagaatcaggttctcgatctgctggtagacgatgatgaacaccagcaccgccacggcgtacgtccacccgcggttgccccaagcgaacagcaccggcagcgcaccgccgatataggtgccgaccgtggggatgaactgggataccacgccgcagaacagggccaacggcagccagtagggcacatgcaggatctccaagaagatggcggtgcaggtggcgttgatcagcgccagaatcgaacgggagaacaggaaggacgaaatctggccttgggccacggtccacaccagcaggaatcgacgctgcgtgttgggggccagccactggcagaaggagcggcgcagctttgggccggcggcggagatgtaatacgtggtcattaccacggtcatgaggttcagcaggaaggagaacaggccacccaccgtactcatggcggtgccggcgaaatcggtgacccacgaggtctggatattgttgaagatttccatgccaagattgctgatttccggcatcttgaacgtggcgtgctggtccacgaactcacgaatctgcccatacattgccggcaaaccgcggaccatggcaatcatctgctgtacaaacatattgccgaacagcgtgagcagcacacccacgaccacggccacgcccaccagactgacggcggaagccacgccacgcttccagccatgagccaccagcgccaccaccagcggttcgacggccagcgccaggaacagcgagatgatgatgtcgaacaccagataggagatgtcgccccacgagcgccagcagaacatgaatacgatgacggcgagggccacatacagcagcgcgcggccgaaccattccggtggcctgcgggaatctcccttggcggggaacaaagtaccaaagtcgatacgattctcgtcgtccgggtctgccccggcttctgcggcaccgcttctcgacgtgtcggtgctgtttatgtttcgcgcgcgttcgctcatggctccccattgtagcgaggggtttgaagctcggatacgccggcggcgtacacccgcttttctattgttgatgtcatgctcaacgtttcgatcatcatcccagcgtggaacgaagccgaacgcatccgcgactgtctgctgaacgccactcgccagaccatcatgccgcatgaggtgctggtggtggacaatcgttctacggacaacacctgcgcgattgtcgaacagttcatcgccgaacatcccgaggccccggtcaaactgttgcaccagaacgatgaacaggggctgattcccacccgcaactttggcctgaacgccgcgaccggcgatgtgctgggccgttttgacgccgactgtatgatccggcctgactgggtggaggtggtctccggcatcttcaccgaagacccggccgcgatgggtgccactggtccggtgatgtattacgacatgccctcacgtcatttcgggttgaaaggcgacaattccttacgcaagcgaatctaccgtgccgatggcggccagccgctgctgttcggctcgaatatggccttgcgcgcttcggcctggcatcaaatcgcgaatgaggtctgccgagataaggccgatgtgatgcacgaggatatcgatatttccctgcatctgatgggcaagaatctgaaaaccgtgtactcgccgcgcatgatcgccgcgatgagcgcgcgacggatggacacgtcgctgagttcattcctgaactacatgcgacgttttaagaatacgtttgatgcgcatccgcaacatacgcgcacgcataagccggaggtgttgttcaccgccatgtatccggcgatgcatatgttctacccggtgtggcagaaagtgctgaattccgcggatatcaatcctgctgaagccgcgtggatcaacgagcagatgaaactggcggaggcgcaaggcaagcagctgtacgacgagacccccaccgacgaagtctacgacgaaaagcacgaaaagtagctggatatacgagccccctctgcttatgcaagctccctctgatgagggagctgtcgaacgaagtgagactgagggagagactgcgacgcagccgctaaaacatcgaatcggccgcaggccgatacctattattcagcggctacgccgcaacttctctcccagtcagctacgctgacagctccctcatcagagggagctaatgtttaccgtcatcgactgatcacatcagcgacttgtaaatcgcgagaatgtcctcttcggtggcctgacgcgggttgccgggggtgcacacgtcgttgaaggcgtcgtgggccagcggttccagatcagcctcggtggcgccgacctcgctgatcgtggtcgggttcttcagatccacggtcagcttgtggacggcctgcacggcctcttcgcgcaccttctccaggtcgccggtgtaggcgtcctcgacgccgaacgcgtcggcgatgtcgcggtacttctcgcccgtgtagtccttgttgtattccatgaccggggccagcagaatgccgttggccacaccgtgggccacgcccagacggccgcccagcgggtgagccatgccgtgcaccaggccgaggcccacgttggagtaggccataccggtgatgtaggaggcgtacgccatctgctcgccagccggaatgtcgccgtcggcggacttggctaggttcttggcaatcatgcgaagagtctgcatggacaggcagtcggacaggctccaggcacccggggtaatgtaaccctcgatggcgtgggtcagggcgtcaagtccggtggcaaccttcaggccgcgcggcatggagtcggtcagatccgggtccacgaaggcgacgatcgggatatcgtgcgggtcgacagccacgaacttacgcttgttggcggtatcggtgaccacgtagttgatggtcgtctcggaagcggtaccggcggtggtcggcacgccgaagatcgggacggacgggttcttggtatccgcgacgccttccagggacagcacgtcggcgaactccgggttggcggtgatgatgccgatgcccttgcaggtgtcttgcggggaaccgccgcccaggccgatcaggaagtccgcaccggactcggcgaacttggcgacgccgtccttgatgcactcgaccggcgggttcggcttgacgttggagaacacctcgtacggcaggccggcctcatccagaaccttggtgaccttctcggcggtgccggtctccagcagtaccggatcagtgacgataaatgccttggtgaagccgtgctgcttggcgacggccggaatttccttgatcgcgccacgtccgaagtatgcagtctggttgaaaatcatgcggtacaccataggggactctccttttgagctcgtgtcttaactggtggtccactctgtctttgagtggtccaacggttccccagtctactccgcggatgagcattcacctgaaaacacgctgaaagaacaacactgaaaataatggcaagaaatggcggaattccgcacttgtcgaattattgtccattgaccaaaccagttcaatcgcccgagatctcaacgataagaccattttccggagtcgcttggtgctctccgagaaactcgtctctcatccgcttacttcgcgcgtacacaatcaatatgcgagatgcctaattccattcgtgtttcatcagccgaacgcgaactggttcaccagatggtgtattcaacggtttcagtctcttgaagaggactaagatacctcgacaattggggtgatcatcataagagaatgaggcagataatggcaaatggcaaggctatgacggtcggcgagatggcgtccctgtttctcgaccccgacactcccgttcgtatcgacgcttttgacggctcgcatttcggcccggcagacgcggatttgaaggtcaaaatcgccgcgccgaactgcatgtaccagctgctcgcgcacccgaatgaaatcggcatcgtgcgcgcatacattctgggcgatttcgacgtggacgacattgactacgccgacccgtatccggcgatgcgcaagctggtgtcgctggccaaatacgttcgcccgctcgctcccgcatccattgcccgcgtatccgccggcattctgagtcacggcttcaagaagccgccggtgcccgccaccgagggcccaagcaagttcgcccgcatcaagcgtggcctgatgccgcacaccgaaaaggccgattcggaaaccgtcagcttccactacgacatgtccaacgagttctacgccgacttcctcggcccctccatgacgtacacctgcgcggtattcgacaacgagcacatgagtcttgaagacgcacaggccaacaaactgcgcctgattctcgacaaactggacttgcaacccggccagcgcttactggacatcggctgtggctggggttcgatggtcatcaccgccgcccgtcgcggcatcaaggcgctcggcgtcaccctctccaaggaacaggccgcgtacgccaacgaatggatcgcccgtgaggggctgcaggatctggccgaagtgcgcgtacaggactaccgcgaggtgcccgagcatgacttcgacggtatctgctcgatcggcatgatggagcacgtaggcgtcaagaactaccagagctacttcgaagagatgttccgtctcctgaagccgatgggccgactgctgaaccaccagatcaccatcagccatgacaagcctcacggcaagcccggcaccgacgaattcctcgaccgttacatcttcccggacggcgacctcggcgcgcccggcttcatcgaatcgtgcatccatgacgccggcttcaacgtggtgcatcaggagaacctgcgccagcactatgcgctcaccctgcatcactggaaccagaacctctccgagcattgggacgacgcggtcaagcaggtcggctttgaacgcgccaaggtatggggtatgtacatggccgcctgcgctctgaacttcgagctcgacggcatccagattcaccagttcctggctgtcaagccggatcgcgtgggccacccggacggcaagtggtaccctctgcgccaatggtggcaggcctgactccgtttctgtgggacggcacgcggtttttaccattgttcatctgccgtcccacagaagtgtgggatagcagatacatcaatcgtttgacgtatctgctatcccgcatgacataagccgagaaccgcagaatagagccgttctttgccctcagctctgagggcgttcttcgaacgctgtgggacggcacatcgaaaatcggcaaaatcacgtgccgtcccacacgattcccttcgcacgcgcatttcgcaggtgctttttctgcaatactgactctatgagcgccacagccccagaaacggctggggcggacgatcgcaccgaccatgacacgcgcggataagacccacgtttctttatttaaccctaacccgatgttcgcattggtgctgttggcgtgcgtagttgcggcgaggaggacagttgttggcgaacgcgagcctttgcattgactggccagcccgccggagtaggtacgtgacggatatgcaaaagccccgcacaaggcggggcttcattgtggtggctccgaacggcgtcgatccgttgacctagcgattttcagtcgctcgctctaccaactgagctacagagccatgaacagtcaaaaacccggataatccgggtttcataaccattccagcgaccccggccggacttgaaccggtgacctccgccgtgacagggcggcgctctaaccaactgagctacggggccattgttctcacttgcgtgaggcaacagatgtatatattactgaaattcgccggtcgtgcaaatttcggcgtgttccgcgtaatttcaaggtttttgctatcaccagcacacggacacgtctgccataaacatccacaaacgacgaagggcgcgaccggaaccccggtcacgcccttatgaacagaagcacttcacggcatccaccgcaaagcaatcgtcaatctcagtcagcctgcttccaggtgtcgacgtcgatgtggtgttcggggttggcctgccaggcatcccacgcggacttgacgatgtcttccacgtcgtacttggcgtgccagcccatctcctcgttgatgcgcttcggggagccgatcaggtgcggcgggtcgccggcgcggcgggccatgacagcctcggtgaacggcagaccggtgaccttcttgacttcgtcgacgatctggcgcacggaggtgccttcaccggtgccgacgttgaaggcgtcgtacttgcgctcgtcacggtcgaggtacttgagggcggcgatgtgggcgtcggccaagtcggagacgtggatgtagtcgcgcacgcaggtgccgtccggggtcgggtagtcgtcgccgaagatggcgggggccttgccctgcttgaggcggttgaacagcatcgggatgaggttcagaatagccgggtcttcgagttcgaccgggccgcagccggccacgttgaagtagcgcagcgcgcagaagcggatgccgaacggctgctcgcaggcgcgagccatccactcgccgaacagcttggtctggccgtaggggttgatcggcagcatcgggacgacgtcctcgggcaccacatcgaccggcggcacaccgtaggtggcggcggaagaggagaagacgagcttcttggcgttcttggactgggtcatgccggtgagcacgttgagcatgccgttgatgttctgctggtagtaccacagcggcttctccacggattcgccgacctgcttgcgcgcggcgaagtggatcacggagtcgacgccttcggcgtcgaggatttcggccagacgctcgccggcgcccggagcggcgatatccatgccgtacagacgggagccttcgatgcgggtgggcttgccgtagctcagatcgtcgacgacgacgaccttttcgccggcctgatgaagtgcgtgaacgacatgcgcgccgatgtagccgcagcctccggtgacgagaactgtcatagttgacctttccttatgcgggttgcaagtgtcggccgtgtggagttcagcggctgttcacttttggtccgctttgttaccttttgaaacaatttgagtatatcacacgaacataatcgcacaaaacggcggtgtcgtccggcaatatctgcattcattaggtcgatctggcgttcattaggtaggtcggcccggagccggcccgcacgaacaccgggtaaatggcttgatatggtggttggtatcgcacaccacccacctaatgaacgccaaatcgacctaacgaatgaacagcggtgcggcgcacaaggaaaatccgaggaatatatgaccgatcccgaatccacagcaatcgattccgtcaccgcgatggccgcggaccacaccgaggcaccggcgcaccccctgcacaaggtgctttccttcgtgcgccgctccggacgtttggacgatcgcctgcagcgcgcctgggacaactatgccgacacatatctgttggatattgcggccggcaacctgctggacgtgcgcgaaggcgtcacgctcgaccgcgcgttcgtggagtcctcatggggcaacgacaatccgctcattgtggaaatcggcaccgggcagggagaaaacgtggcggccgcagccgcggcccatccggagacgaacttccttgccctagaggtctatgaccccggcgtggcccacacactgctgctcgccggcaagcaggggctgaccaacattcgcgtggcccaggtcaacgcgcccgagctgttcaaggtgaccgcgcccggcaccgtggccgaggtatggaccttcttccccgatccatggcccaagaagaagcaccacaagcgccgcatcgtgcaggaggccatggccggcgacattcatcgcgcgctggtcacagacggcgtctggcgcatcgccaccgacatcgaggactacgccctgcacgtgcacgaggtgatggacggcctcgatggctggaagaacctgggcagcataaccgtcagcctcccgctggagcacgtgggcaagggcaatgccgacatggccgccgacatgccgcacgccgacttcaccgaatccgagcggttcgagggccgcgtgctcaccaacttcgaaaagaagggcctggccgccggccgcgtgattcacgacttcacctatcaggccgtcgccctgcactgattgcgacacgccgaaatgccgtcgatttgcataaccgaacaacctcccgtaaagtaactcgagttgttcgcccccatcgtctaacggttaggacaccagactttcaatctgacaacgagagttcgactctctctgggggtacttcattgaagacctcggtcatagcgaccgaggtcttttcgtattcgcgggaccaggcctgaaagcattcggcgggttataggccaaaatgtgtgtccgttttggcttgtgttcctttgtggcggtgggcgttcctcctgttcgagttgtatgggcggggaactcgaggtcggccagaatgtgtgtccggaatggccggtcaggccttgcggcacaacggttgagtgactttcgagttggcgtggcagattgggtggatgaacacaccttgttgcgccgtgtgcggcgagccgatgaagcggaacggaaggacgagctcgggacggatcaggtggcggtgccggaacgccggctgcgggagctcacgcacccagtcgcgcgacaacagcgcccgtgatctgcggtgcggtctggattggctgttctcgaagcagtcgcaggccgagcaccggctgccggcacgcacgctgcgccgccggtgcgagctcatgtggggcctgtggccgcccgtgcccctggtggacgaggtgcatcatgtggtgcatgtggacggcatccacctgcaccgcgacgcggtggtcctgatcgcggtggccggcgggcacgtgatcggctggcacgtcgccaaaagcgagaaagcggcggcatggcagtgcctgatggcgcgcatcgcaccaccggacgtgctcgtgtgcgacggcgggggcggcgtcctcaaggccgcgaaggccacgtggccggatacgaggatccagcggtgcctgttccacgtgcaggccaacatcctcgagctgaccggcaggcggcccagactcgaggcgggcggacggctgcgccgggtggccctgtccctgccccgcgtcggggacgcgggcggcgcggccgaatggctggtctcctacaaccagtgggagcaggacttcgcctcgttcctcgacgagaagagcgaatacgccgacggcggcgtgaacgacatgcaccaaaggctcgtcaaggcacggcgcatgatccgcagacgcatccgcgagggccacctgttcacgttcctcgacgaggggctcgcgtccgtcggcccggtgccgtccacgaacaacctcgtcgaatcatggaacgcgcgcctgcgcgacatgccgcgccgccaccgcggactgcggctggtcagacggctgaaggcgatgtttttagtcaagtcggtgtttcgtgttcgaggtggtgacgttttcttggactccctgaccgggaggagaaccccctcatggcgaaatacagcagggagcagcgcgacagagccgtggacctgtacatcaaatacgaacgctgcgccgccgacgtgatccgcgagctcggctatcccagcaagggcgtgttgctgtcgtggtacgcggaccggctcgag

SEQ ID NO: 546 - DNA, 5680 bp, Unknown
  R48_24m  MAG No. k141_69256
ccgtgggtcggcaggccaccgtcataggcggcgagctggctcttggcgaaggcgtgcgggaagtcacggtcgaagcccatgacctcaccggtggaacgcatctcaggtccgagcagaatgtcgacggtcttgcccaccggagtgcggaaacgcttgaacggcagcacggattccttgaccgcgacctgctggccggggtggatgtcgccaccgtcgcccttgggtagcagcagaccgttggcgcgctggtcggcaatggtctcgccggccataatgcgagcggcggccttggccagagccacaccggtggccttggaggcgaacggcacggtacgggaagcacgcgggttggcttcgatgacgtacagcgtgttggccatgaaggcgtactgcacgttgatcagaccctgcacgtggcagccggaggcgatggcgtaggtgccttcgcgcagacggcgaatctggtcgtcggacagcgtagacggcggcagggtgcaggcggcgtcgccggaatggacgccggcttcctcgacgtgttccataatgccgccgatgtacagctccttgccgtcgaacagcgcatcgacatcgatttcgatggcatcctgcaggaacttatcgatcagcaacggggagggcagacggccagagaccacagtatcggcctgggcctcggcaagcgcgcgatccacgtacttgttgagctgcttgtcgtcataaacgatttccatgccgcggccaccgagaacgtagctcgggcgcaccagcaccggatagccgatgcgatgtgcggcttccttggcctcttcgaggctcagggcagtgccgtaacgcggggcattcatctccgccttcttaaggacctcgccgaacagctcacggttctcggccaagtcgatggactccggggtggtgccgagaatcggcacaccggcggccttcagacgcgcggccagcgagagcggggtctggccaccgagctggacgataacgcccttgaccgggcccatcttcttctcggcctcgtagatctcgagcacgtcttcgaaggtgagcggctcaaagtagaggcggtcggacatgtcgtaatcggtggacacggtttccgggttgcagttgaccatgatggtgtcatagtccttgccgagctcctgcacggcgtgcacgcacgtgtagtcgaactcgatgccctgaccgatgcggttcgggccggaacccaggatgatgaccgcctcgcgctcacgcggacgaagttcggtctcatcggcgtagcagctgtagtagtacggcgtggccgcatcaaactctgcggcacaggtgtcgacggtcttgtagacgggcttgaggccatagttccagcgcaattcgcggatggtgttctcgccttcgtcaccgaggctgcgaagatgggcgatctgcacgtcggacaggccggcgagcttcgccttcttgagcagcttcggggtcagagtctcggcctcgcgcacggcctgtgcagtctcgttgatgagcagcagctgcttcaggaaccacgggtcgatcttggtggccgcatacagctgatccagcgttgcgccgccccagatggcacgcatgagctgcaggtagcggtgttcggtcggcgtatgaatggccttgagcaactcagctacctcatctgcggacggcttatcgccgtcccagttgaagcccatgtgacgcttgtcaatggaacgcatggccttgccgagggactcctggaagttgccggccagagccatggcctcgcccacggacttcatggaggtggtcagggtggggtcggcacccgggaacttctcgaatgcgaagcgcggcaccttggtgaccacgtagtcgatggtcggctcgaaggaggccggcgtggactgggtgatgtcgttgcgaatctcgtccagcgtgtagccgagagccagcttggtggcgatcttggcgatcgggaagccggttgccttggacgccagagcggaggaacgggaaacacgcgggttcatctcgatgacgatgatgcgaccggtcttcggatggatggcgaactggatgttgcagccgccggtgtccacgcccacgccgcggatgatggcgatgccgatgtcacgcagcttctggtattcgcgatcggtcagggtgaagcaaggggccacggtgatggagtcaccggtgtgcacgccgaccgggtcgacgttttcaatcgggcagacgaccacgacgttgtcgttgcggtcgcgcatgagctcgagctcgaattccttccagccttcgatgccctcttcgatcaggacttcgtcggtgggcgagtaatggatgccggcgccggcgatgcggtgcagctcctcttcgtcgtgggcgatgccggagcccaggccacccatggtgaagctcgggcgtacgaccagcggatagccgagttcttcggcgatcttgtcgcattcctcaaggctgtgcgcgatgcgggaacgggcggattcggcaccggcctcgtccacgaccttcttgaacagctcacggtcctcgccgcggtcgatggcttccagagaagcaccaatcagctcgacattgtacttcttgagcacgcctgcctcgcccaacgccatggcggcattcagcgcggtctggccaccgagggtgggcagcagcgcgtcggggcgttccttggcgatgatctgctcgaggatcggggtggcgatcggctcgatgtaggtggcgtcggccatctccgggtcggtcatgatggtggccgggttggagttgacgaggatgacgcggatgccttcctcacgaaggatgcggcatgcctgggtgcccgagtaatcgaactcagcagcctgaccgatcacgatcgggccggagccgatgaccatcacggatttgatgtcggtgcgcttcggcatatcacttaccttccttggagttgttcttcataagttcgcagaaacggtcgaacaggtaggccgcatcgtgcgggcctgctgcggcctccgggtggtactgcacggagaatgcggggatgtccacgcactgcaggccttcgaccacgtcgtcgttcagatcgatgtgggagacgaacaccttgccgtacttgccgttctcaaacggcgcgtcgacctgcttgccgatcggagcgtcgaccgcgaagccgtggttgtgggcggtgacctcgaccttgccggtggtcagatccttgaccggctggttgatgccacgatggccgaacttcagcttgtaagtgccaaagccgagcgcacggcccagcaactggttaccgaagcagatgccgaagaacgggtagccggcatcgagcacctgacgcaacagttcgatttcggggccggcctgttccggatcgcccgggccattggagaagaagacaccgtccgggttcagggcttcgagttcggcaaaggtgatggtggagggcaccacgtgcacgcggcatccgcgctcggccatacgatgcggggtcatgcccttgatgccaaggtccacggcggccacggtgtacagcggctccttgcctccgtattcgccgcacggctcgatggtgtaagtctccttggtggagacttcgtcgtacaggctcaggccctgcatctgcggggtgttcttgacatcctcaagcagttgctcgatggtcttgagcttgccggtagcggcatcgaccaaagcctcgccggagaagatgccggcgcgcatcacgcctgcggaacgcaggtggcgtaccagcttacgggtgtcgatatggctcaggccaacgatgccgttcttgaccaggtcatcgtccaagctgccttcagcacgccagttactcacgttcggggagggatcacgcacgatgtagccggccacccagatgcgcgaggattcgggatcctcgccgttcatgccggtatcgccgatgtgcgggaaggtctgcacgacgatctggcgatcgtagctcggatcggtgagcgtctcctggtatccggtcatgccggtggcgaagacgatctcaccggtcgtcccgcccagggcgccatacggctcccccacatatacctgtccgtcttccaaaacgaggactgcatcgtccttgtcatacatcggaattgcgatggttccggactcgttctggctcaccaaaacccccttatgtttttcgggtattcgtaccaaggttaacggccagcgcagactcacacgccggtgcgcgcgaagtctcgccccgctggcggggcagccggctcacaaccggcttggacaatcacagcggaaagttgttccgcccataaaaaagcctcccggagggaggcttgaaaacaaatgactaatcgaccgtcggctgggtctcagcggacggggcgacgggctcggatgcaggaaaatcggtttgaccggactggtccggttcgttcgattcctcggcgggctcatcgtccaccgatcccgcgggctcggtgttcttcgcattgcacaccgcggaaagcaggccgtggataaaggcaggtgaatcgtcatcgcacagggtcttggccaatgccagggcctcgtcgatggccaccttgtccggcacctcgtcgttgaacaggatctcccaagcagcgatacgcaggatgttgcgatcgaccacgcccatgcgcctgaccttccaacccgtggagtgatcgtccagggtcatgtcgatctggcggcggtgttcggccacgcccttgacgatgtcgatggcgtagtcgggaagcggggtctgagcaccgggatgtgcgatgcgctcatcaagcagggaaaggatgtcctgacccttttcgtcggcctcgtacagagtgttcaacgcccttttgcgcgcggtggaacgtgccatactgctggtcctttggttcgactgtcgactaggtatgttgcgtggagaagatcagttctcgcggccggtgtaggagccatcctcggtgttgatcttgacgcggtcgccttcgttgatgaacagcggcacctgaatctcggcgccggtctccacggtggcgggcttggtgccggcgttggagcggttgccctgcaggcccggctcggtgtgggtgatggtcaggatcacggagcccggcaggtcgacgttcagcggagtgccgtcgtggaaggagatgaggcagtcggtgccttcgagcaggaacttggccttgtcacccacgagggtcttcggaatcatgatctgatcgtaggtggtcatgtccatgaacacgaagttgtcgccgtcctcgtaggagtactggagggtacggttgtccacggtctcgaattccatcttcatgccagcgttgaaggtcttgtcgacgattttgccggagagcacgttcttgatggtggtgcgcacgaaggcagggcccttgcccggcttgacgtgctggaacttcatgacggtccacagctggccgtcgaggttcaggacggatccgttcttgatgtcgttagtagtctgtgccacgttagtcacctatttcaaattcaaactagcttaggcaaagcccaaaaattgcctcggctattatgccacaccgggtatacaggaagtgaacgctggggtttcccacgtgacccccgactagactggatgaatatgcgatccttcttcgaagccatatccgtatcctgcgtcgtccccgcgcaatcgccggcagacgacgaacgcacggtgttc

SEQ ID NO: 547 - DNA, 12780 bp, Unknown
  R48_24m  MAG No. k141_70126
ccatgtgttgcgtttgattccgcggctgaccgtggaggcgtgtctgccgatcaggccggcgatccgccgtatgctcgtcccgttgccgatctctatccggatgatccgccgttcctcttccgacaggtgcgaatacacttgccccaaggcgcgacaccccttcactggttatctggacaatctccaatctaaagggtgttgcactttcatctagacaacgggtgccaattttcattggcatccatatgatacgattaacttatcagatgtctgatgtctcgatatcgagacgtacgacaacccatcacaagaccgaggcgacgagcatggcaccatggcagacaacggatttcccacacggcgcgggcaccgtcatcgccgaattctccgtacgtgcggacgggccgatctggcgggcgcaggtccccgccaccgccgacggaattcccactgccgccccatacctttgcctggccgtgcgtgacgggcacctcacgctgacggcgcggtccctgtccccggacccggccgacccaaatgcgcagtcccacgtcagcctcgacatcgaagacgccttcggcctcgatcctggaacgatacacgaggccgcattgaccttcggcgcgttcggcacgcgcatctacctggacggataccaatgctttgcctgcgccggcaatctcaatccctcacgggtccacccatcgggcgcattcgacctcggctcacccaatgccattgcttgcaatgcgttcctcgtcgaccccgtggattgggacgccgtccgcatcgccgagcatgccgcggcggccaagccggatatcgtcttcgcctcggaccggctctcccccagggataccgatcgcatcgccctggcggatgcgggcagcgtccatgcgagattccgcctgcgcggccgcggacagcatggcacgatcctcgcggccggcgtcgatggaagcgagcgcatgaccgtcgccatcggcgccggaggactgacgctggccatgcgggacgaatccggagcgggcatcgcatgccacgcgccgggccattgggatgacggaggctggcacgatctggccgtccgctcctcgcgcggcgccgttgacctctttatggacggcgtcagcgtgctgcaccagccgggccagatgtggttcgcggatctggccggtccacgccacggccgaaaaggcatcgacgctttcaccgtggggcgcaatatcgccggggtgcggctcatgggcgaggtcagccgtggaggcctgtacgtccacgcgcttaccgacgggcagatcgcacggctcgctcacactcccccgatggtcaccacggcgctgttcgacgcgggatacgccgggtcggccagctatcgcataccctcgctgatccgcaccgtccgcggcacgctgatcgccggggccgaccagcgaacggcgatcagcaacgacgcccccaaccacatcaacttcgtcatccgcaggtcaaccgacggcgggcgcaactggatgccgatgcagacggtcatcgacatgcccggacgcgaggacgggctggacggggccagcgcgctcgactcctgctccgtagtggaccggagcatcggacgcatcacggtattgatcgatctcaatcccggaggcatcggcctgaccaactgcgagcgcggcatcggcgtgaaccgcgacggcgttctgcgtctgcgggacgctcagggcaatgagaccacgctggacgccgtggccgacgccggcgacgtgtggcgaagtcccatgcatgccgacccgtcgcaacgctggcatgcggttcccacctgctacatcgcgcagatccattccgacgacgacggcgagacctggtcaccgccattcctcattgacgcaatggtcaaagaggaatggatgcatttcatgggcgtatgcccgggaaccggcatccagctggacaaggggccatatgccggtcgtctgctcatgccgttctattgcagcgggcagagccgcgcccactattccggcggagcactgatcagcgacgacggaggcgaaacctggcgacgcggacgcatgatcaacgaggggcgcgagatcaacgggaccgtcgtcgatccagccaccatgcgcgacgacgacgcaacgaccagcgaaacgacgttcgtacagcgcgcggacggcgacgtagtggcgtttttccgcaaccagcacgccagcggacgcgtgggcaaggcggtcagccacgatggcggcgatacctgggacgagcttgagttcgatcccgccttgccggagatcttcagccagccgaacgcccttgcggtgccgcagcttggcactgacgcggtgctgttcgccaacgccagccagatgatgccataccggggacggggcatggtgcgactgagcgaggacggcggacggacctggacgggcagcctgtgcgtgcacccccatcatcatgtctatcaatgcatggcaatatgtgaaacgacgcacgacgtagaatgtgaaggttcacaattgggactattgtgggaaatagagacgacgggggtttacattacgcatatcccccttgcatggttttcacatggccacgataagggcgtcgcggccaaccatacggacgacaaggagtcatcatgaacggcacagcagaccgagccacggcgggctcacgcgcaacggatacggaacccgacgcgccgcaaggccaatacagtacgcaggagctggccgcgctggcgcgcctgtccctgggcaactggtcgaccacgcaggtctcttcccgcagccgatgcgacgagacgatggacgcgatcaagtcgtacatactgcgcgaacgtctgcaaccgggcgacgtgctgcccaccgaaacgcagctgtgcgacaccatcggggcgtcccggtcgtcggtgcgcgaggccgtgcgcaagctcgaggcgctgaacatcgtcaaggtggagcacggcaagggcaccttcgtcggttccctgtcgctggaccctatggtggaaacgctcgccttccggtcgatggcgtcggtcggcaagaatttcaccgatctgcaggacgtggtcgaactgcggcgcttcctcgacctgggatgcgccgaggaggtctgcgcgtccctggcgggaaccgagcagccgcgcctgacggaacttgccgagcgcatgagcgccgaagccaaggaaggcaagacgttcaccgggctcgacatcgaatttcacaggggaattctcgattcgctcaacaacaccgtggccaagcagatggtccgctccctgtggctcgtgcacatggccgtgctcccccagctcggactggcggtttccagcgaacttgaccgtaccgccgacgcccatcaccgcatgctcaacgcggcgctggccggcaatgtggacgactaccgcgaggccgtgttcgaccattacgagccgatcgaatcgattctcaagcgtcgcatcgtccaggagcagtaaacccgaaaccgcgggccgattggcgcgggcaatccagtcggcccgaccgacatgcgacacgccccttcaaaaagtaacccgttacacgatccgacggcccgcgcaccacaccgcggtcacggtgagcgtgccgggattggtgagcagcaggtcggcggcgtagccgggggccaccaggcccagcggcgcgccggttacggggttcggccgatcaaggccgagcgcatgcgccggggtgagcgtggcggcttcgagcgcgtcggtcaggcccatgccgagctcgcgcacggcgcgctgcaccgccacttcgaggatcagcgtcgagccggcgatcgcgccgttcgacaccagccgggcgtggccgcccaccacgttgacgtccagcgcgcccagtttgtaggcgccgtccgcacaaccggtggcggccatcgcgtcggtgacgaacgcaatgcgatgcggcgcgaaacccagtgccaggcgaagcgcgggattggccacgtggaagccgtcgttgatcagctcgatcgtgacgcgcggatcctcgaccgcggccggaatcgggccgggctcgcggtggtggatgccgttcatcgcgttgaacatgtgcgtcatgatgcccgcgccggcgtcgatcgcccggcgtgcgacgtcatagtcggcgtcacagtgtcccacggcggggaccacgccggccgcggcgaagcgccggatcgcgtccatgccgcattcgcgctcgggggcgatggtgatctgccttagcgtgccgtcggcggcctcaagcagacgctccacgcgctccggggtcggatcgcacaggcagttcgggtcatgcgcccccttgcgggccaacgccaggaacggcccctccagatgcgagccgagcacgtcgggccgcgttgccatcacggacctgacgcattcgaggttccgcgccatcacatccagcggattggtgatcagtgagagcacctggcgggtggtgccgtgcagcatgtggtacgcgcgcgccacggcgatgccctcggcaccgtcgtcgaacgaacgctcccaggcgccatgcgcatggatgtccacgtagccgggcgtcacgagcatgccgccggcatcgacctcggcgacctggtccccgccgctgagatgggcgatgcgggtttcaaggtcagcgtcgctcgtgcccacggcgtcgattacgccgtccgtcacgctcacccatgcgttgagctgcacgccacgcgcatcggccttgactgcattgcgaatgacgaaggttcccgccctggcggcgagcgcatccgcgaccatcgtcgcctgatagcgtttttgcatctgcgtttcctcagatcttctgccaggcgggcttgtgctcgtaggaataccggtagtagtccttgccgcgcagtttcgaggcggccgcctcgtccacgatgatcgtagcgtgcgggtgcagctgcagggcggatgccgggcagtacgagctcacgccgccctccacggtctccgcgaccgcctcggccttgcccgcgccgaacgcgagcagcacgaggtggcgggccttcatgatcgtgccgatgccctgcgtgatgcagtgcgtgggcacctggttgatgtcgttgtcgaagaagcgcgcgttgtcgatgcgggtccgctcggtcagcgtcttgacgcgagtgcccgaggcaagcgacgatccgggctcgttgaagcccacgtgcccgtcggtaccgatgcccagaatctgtacgtcgatgccgcccgcggcctcgatcgccgcgtcatatgccgcaccggcgccggcgaccttgtcgccgtcctccagcgcggtgccgttcagcgcgtcgcccggcacgtgcaccttggccgggtccagtcccagcggctcgaccaccgtgcggtggatggtcgcatggtacgactcggggtgcgtcagcggcaggccaatgtactcgtcgagcgcgaaaccgcgcaccctggatacgtcgattccctcgtccctgacgattgtcgcgagcgcccggtacgccgccagcgggctcgagcccgtggccagtcccagcaccgcgtccggcttggccttgatcagatcggccacgcaacggccatacagttcgccggcctcctgctcggatttgacgatgatcacttcagccatggcaattcctttcgtatgagcctattggcgttgcgccgcacgaacgccgccacgcgcttgcatgcgggcgggcattcgcgcaacgcatatggttgtgcggcaatcaggcctcagtggaggcggaaacctcttcgggggtgcgttccagcttcatgccgcactcctcgagcacggtggcgatgcgtttcacattctcgcccttgagcggcagcaccggatcaggcatctggttggtgtcgaacacgcccagcagcgccattgcggtcttgaaggcgcccactccggatccgaagcccgccacgccctgcggcacggtgacgatgcgcatcagcgcggccagccagtcctgctccttcctgaccgtggtccagtcgccggcttcggcggccttccacatgcgtacgtagccggtggcctccacgttggccaggcccggcacggagccgtcggcgccggccatgtaggcaccgtcgaccacaacctcctggcccgtcagcagcgtgagcggatggccggccttggcgttgtcgtccacgaggaagcggaaggccacgtcgtcgttcgaggagtccttgacgcctgcgagcacgccgtccctgcccagcttgaccagcaggtcgcccggcagcttggtatgcacgcacaccgggatgtcgtaggcgaacagcggcaggtccggcacggcggcgtgaatcaggcggaagtggcgctccacctcggccatgccgcccagggcatagaacgggcacgtggccacgatggcggacgcgccgagctccttggcctccttcgcatgctcgatcacgcggttggtttcggtgtcgatgcagccgacgaacaccggcacgcggccgtccacgacctgaatcacggtctggatgatctcgcggcgacgcgcatcggtgctgaacgccacctcgccggacgagccgagcgtgaacaggccgtcgacgccggcgtcgatcatgcggttgatcgagcgggcgaagctggccttgtccacttcgccggaagcggtgagcggggtgacgacggggggaatgaccccgcggaattgggttgccatgatgatgtgtcccttctttgaggattgtctttgaggattaaaaatggactgctgaaattattcggcgttggaatcgggcgaacgcgatttcaacgcgaggaaggcctcacgcgcattcggccgcggtgggatgcagcagcgagggcgccgcgtccatgaggatcctggtgtacccgtcctgcgggttgcgcatcacgtccatcgtcttgccgcgttccacgacggtgccgtggttcatgaccatcacctcgtcggagatgtagcggacggtttggatgtcgtggctgatgaacaccatcgacaggccgagcgtcctcttgaggtccgagagcaggttgaggatctgtgcgcgcaccgagacgtccagcgcggaggtgggctcgtcggcgatgatcgcgtccggcttgagcgacagggcgcgggcgatggcgacacgctggcgctgcccgccggacagctgcccgggcagggcgcccagcaccgaggtgggcaggccgaccatgcggatcagctcgtgggcgcgcctgtcgcgctcctccttggaaccgagcttgtggaccaccagcgggtcgagcagctggtcgatgacgctcatgcgggcgttcagcgcagtcgccgggtcctggaagaccacggagaccacgcggccgatgtccatgcgctccttggcggtgcggtgggtgacgtcctggcccttgaacagcaccttgccgctggtggcctgctgcaggccgcacatcacgttggccgtggtggacttgccgcagccggactcgccgacgatgccgatggtctggccgggcatgagcttcaggttcaccttgttgaccgcggtgatcctgttcttgtggaacagccccgatccggcgcgggtggtgaacaccacctcgacgtccctgagctcgatgatcggaacgttgggatccttcctgggggtttcggcggcgtggctcatcgggcacctccttcctgggtggaaactgtcgccgcggcgggcgtgacgtcggcatcggccggcagggcggcgtaatagtgatgcgtgccgggcacccgttcgaagatcgggcgcgtgttgaggccaacgtccgggtggctggagcggggagcgaagcgatcgcccttggggaagtcggccggggacggcacggttccgggcacctggtgcaggcgcttggcccctgcctcgatcgaggtgaccgagccgagcaggccgcgggtgtactcgtggcggggatcggtgaggatctccttggtgaagccctgctcgaccacctggccggcgtacatcacggtgatggaatgcgccaccttggccacgagggcgagatcgtgcgagacgaagatcatcgcgaagccgagcttttcgcgcagttcgttgagcaggtcgatgacctgcttctgcaccgtgacgtcgagcgcggtggtcggttcgtcggcgatgatgagcttggggtcgcgggtcagggccatggcgatgagcacgcgctggcgctggccaccggagagctcgtgcgggtaggattccagcgtgcgcttgggatcgaggcccacgagctcgagcagttcctcggcggagcgggtgccgccgcgggaggtgagctgcttcatctgcgccttgatgagcatggacgggttgagcgaggagagggcgtcctggtagaccatggcgatctcgtggccgcgcagggcgttgtgttccttaggactcatgccgacgaggttcttgccgtcgaacaggatctcgccgctgatctcggccttcgggtccagcaggcccatgatggccagcgaggtgatggacttgccgcagccggactcgcccacgaggcccatggtctcgccgggacgcacagagaagctcacgtggtccaccacgttcacgtcgccgtggcgcgggaacttgatgcacaaatccttgacctcgatgaccggggcggccgtgctcgtcggctcgaaccggtcggtgcgcttaagttcggcctccttgagtgcggcgagggaatcggccagggattcggcctgctccctgtaggcagcgactgggtcggtcaggaggcgatcctccctgcgctcggcctcggcgtcggcggcggacttggtcaccggggccgtcggggcggccaccatggcgtcggtgatgccctcggacaggatgttgaggcacagcacggtgatcatgatcgccagacccgggaacatggcctgccaccagtagccgaagatcacgccggccttggcggaggacaggatgttgccccaggtcggggtgggctcgggaatgcccgcgttgatgaaggacagcgacgcctcgaacacgatcgcgtcggcgacggacagggtggtgaacaccatgaccggggcggcgatgttgcgggtgacgtgcttgaagaggatccacggggcgcgggcgccggagacgatgaccgcgcgcacgtagtccttgccgtactcgctgatgatgttcgccctgacgatgcgggcgatctgcggcacgtagagcacgccgatcgagatgatgatgccgatcatcgactggccgaggatcgagacgaacacggcggcgagcgcgatgccgggcacggacatgaacacgtcgatgacgcgcatgatgagctcggagatccacgtgcgggtcacggcggcaagcgcgccgatcagcgagccgacgatgagcgcgaagacgatcgagctcaggccgatgaccagcgagtagcgggcaccgtagagcacgcgggagagcacgtcgcgaccgagattgtcggtgccgaaccagtgttcgccggtgggcgcctggtagctcatcgtgatctcgagcggatcgtgcggggaaaggacgggtgcgaagacggcgcagacgatgagcagcgcgatcaccacgaaggagatcttgcttcccacggtcatcttgctgaagcgattgaatttgacgccgggcctgcttgcggcctcggccgccttgttcttgccgaatagcatcgtcacaccgtcctgattcgcgggttgatcagcacatagagcagatcaacgatgatgttgatgatgatgaacgcgagggccacgacgagcaccacgccctggacgagcatcggctggttgccgttgatgccgtcgaacatcgcggtgcccatgccgggcagggcgaagatgacctcgatgacgatcgcgccgcccatcaggtagccgatcttcatgccgagggtggtgactggggtgatcagcgcgttgcggaacacgttgcgcgagacgaccacgctcttgggcacgcccgcgccgatggcggtgcgcacgtagtccttgtcgagctcctcgaccatcgaggtgcggatgatgcgggtcagctggccggccacgggcaggccgagggcgaaggacggcatggccatgcgggccaggtacgcgccggggtcctgcgtgaacgggacgaggtcgccggagccggggagccacgccatcttgatctgcagcacgtagatcagcagcacaccgagccagaaggacggggtggcgatggcgatgatcgaaaccacgcggatgatctggtcgacccaggtgtcgcggtacagggcggcgagcacgccgaacacgatggcgaacacgatggcgatgatcaggccgatgaaggtcagctgcagcgtgacggggaacgcctgggccacgcgggccgcgacggaatccttgttgacgccgtacacgcccatgtcgccgtggaacaggccgacgatgtagttgaagaactgctgccaccacggcaggtcataccccatctcgtggcggaaggcggccagcgcctcgggggtggagttctcgccaagcgccgcgacggcgggatcgtactgggagaaggacatcaggaagaacaccaaaaaggtgaccccgagtgccatgaacggcaaggcgatcagacgcctgcccaacagtcgtaacagattgctcactgtaaaagctcctatgcgtgcgccatcggcggttcagatgcgccgcgggcggggccggggcatccgcacgttcgcaggacgccccggttgccttgccgtccgttcggttcagccggtgatggcatatgtggattgcgtcagttcagcttggccttgaccaggttgatgccggtggagccaatggcctcccaagaggagaacgcgcccttcctgacggccgtggttgtcttgcgatggaacagcgggtagagcggcagctcttcggagagcaggtcgaagcactggttccagtactcctgtcgttcggaatcggaagaagcggcagtggccttgtccatcagctcatgtagctggttgtagccgtcagagcccttccagaaggagcgctgcttggtccaggcgttgtcgccgtaccaccagttcatcagcaggtcggggtcgttgccgaacacagagggatcgccgggggcgaggaccatcgagtagtcagcgtcgtccttgtccgtgatggacgggtacagcgcggaggacttcatcgactggatgtcgacgttcatgccgatctcggccaaatcgttcttgatctgcggtgcgagctgggtgatccaggaatggtcggtggtgtacagcgtgaagctgatcggcgtggtgaccccggcttcggcgagcagttccttggccttggccgtgtccttggtgtagacgttcttcgcctggtggtagtactgcgaatccttgggcaggaagctcgtggccgcttcggcctggccgctcatctggttggagatcagcttgtccacgtcgatcgcgtagaacacggcctggcgcacgcgcttgtcgtcgaacggcttcttcttggtgttgaacatcaggaacggcaggttgaagccctgcgcggtcttcagctcggagccggacgactggagggtctggagcgcctgggccgggaccatttccatgatgtcggtcttgccgccctgcatggcggtgacgcgggcggtgtcgtccacggtcacgttccacaccatgttcttggcctgggccgggtaggagccgttgtacaggtcgttcctctcgaatttgacctgctggtcggtgatctcggcgtacttccacgggccggagccgatgggcttgttcttcaggtcggcatcgctcatggacgacgggactatctggatcaacgccagtcgctgcttgaagagcgggaacgccttcttgagcttgaacgtcacttgggtgtcggacttcgcctcgacggaatcgatgaagtcaagcatcgaaatgtacagcgagccggtggcggtggtgcgctggtaggagctgaccacgtcattggcggtgacggcggtaccgtcggagaacttggcgccgtcgcgcagggtgaccacgtactcggtgtcggagaccttctccggatcgcccttggcaagagcggcatagggcttgtaggtgctgtagtccagcgcgtacagcggttcggtgacgtgccagttcgcggccatcggcagggcgccggaggtggtggacgggctgaagtcgcggctcgcataggcaacctgggcggtaatggtgtccgccacggcagttccggtcttcgcggcggtctgggtgccgccaccgcatccggacagcagcatcaggctggcgacggccgcggccacggcggccttgaactttccgtttctcttgatcatgcgatctcctcatcattgagtgaatttcgaatcaccgtccgacagacgacgcgatcctttcctaattgcttcattgaccgttccccggcctgcgtccgcttcggcctttccgcgttacggcggaccattgcggtttgtgcgggactcctgcggggaaccaccaacatcgttgtcgaacctccttaatggtaagacgtctgatgtctgatttcaaatcggcgtgttgaggaattcactcgtcaaggcccctccgcgctgatctgcctatacttcaccagccttgaatatcggcaatatttcgggcttcgccgaccgttatcgttccgaaaatgtttgtttaccattctgcaataagacatctgacgtctgttaacataacggcaactttcgccgccgacgaacgcggcaaacacgggatatggcgccaaacgacaagaccgccgtggtcc

SEQ ID NO: 548 - DNA, 6469 bp, Unknown
  R48_24m  MAG No. k141_71045
agaaatctggtccgtgaagcggaatccgtccgttcccaactagctgaaacgcgattgggagctgatggaagaatcctcgaatggaacgacgaattcatcgaatccgatccacagcaccgccatctgtcccacctttacgaactgcatcctggtgcaggcatcacgtctaagactccgcgtctggaggaagccgcgagaaaatccctcgaagtgcgtggcgatgatggttccggttggagcatcgtatggcgcatgatcatgtgggctcgtctgcgtgatgcggaacacgccaaacgaatcataggcatgttcctacggccggtggatgcgaacgctgaaaccaatctgctgggcggaggagtgtacgacagcggattatgcgcccacccgccgttccagatcgacgggaaccttggattcccggcggccttgtcggagatgcttgtccaaagccacgatggctggattcgcgttcttccggccctgccggaggattggcatgagggaagcttccatgcgctccgcgcaagaggtggaatccaagtggatgcgacatggacggatcagacagtggaatatacgttgcgctgttcgaagcctatggagattacgctgaacgttctggggactgatatgggacgtgtcgcattgtctccggataagccattcaagggaaccatccggcgttaacgtattgcgttatatccgttactaaatgttgcggaccgtctttcctaatagaggaggacggtccgcaatcttttttttgatgggaaaggagattccgccattttccacgattggtatgcgcagatgaacctgtacagtgaaagctatgcgtgtaatttctggacgattcaagggtgtggcgcttgctacgccgaaaacgggtacccggcctaccacggatcgcaccaaagaggcgattttctcgcacctcgactcatggggagtgctggatgatgcccgtgtactggacctgttcgccggtactggtgcgttgggcatcgaagcgctgagccgtggcgcgcgagaactcgtggccgtggaaagttcccggcctgcggcggcgctgattaccaagaccttgtcgcagttacagaagaatcgttcgtgggatgcctcgctcaaggcccgtgtgttcaccaaaaaggccgagcaagtggctggcggctttggtgaatcctttgacgtgatattcattgatccgccctacgcctatgagaccgctgaatgcaatcagttgttggtcaatctggcggtgggcagcgccaccaacgagaacaccgtgattatgctcgaacgctcggtacgctccgacacccccaccgcccccgaaggctggcaaatcactgaaagccgcaactacggcgaaaccgccgtcttctacatcgagcccgcggatgacgactcggatatagagcgttccgacgattccgccgcgtagtgaatctcccaccgtgtggtgaattaatcggcgagccggcgcggatgggcggcggagacctcccagcccaaggccatcagggtcttgcggtcggccttatccagcgccttgcaatccagtgccgcgataaggtctggccggatctcggcggtgcgggccagcgcttcgttgcggcgaaaacggtccaccttgccgtggtcgccggacaacagcacgtccggcaccgcaataccacgccacacggccggcttggtgtactggcgatgttcaagcagtgcgtcctcgccggtgtaggattcctcgacaatcgaatctgggttgcccatgaatccgggcatcaggcgggtgatggcctcaagcatcaccgacaccgccacttcgccaccgttcagcacatagtcgccgatcgaatattcgcgtacgtcgacgccctgggagcggtagtagtccgggatgcgcgcatcgtagccctcataccggccgcagccgaacagcagatggtcggcatggctgagctcggtggcgtcgcgttgggtaaacaacggggccgatgggttcgggaagatgagcaccggtgtgccggatagggcggaggattcagacggccgcgagaatcccagcagttcgtccagacattcgctccacacctcgggcttcatcaccatgccggccccgccgccgactggcgtatcatccaccgaatgatgcacatcgtgggtccagtcgcgcaggttgtgcgctttgatctccaacaatcccttggcctgggctttgcccatcaggctgaggttcatcacctcaaagtattcggggaacacgctcacgatatcgatcttcatgttatccagcctaacggtagccccgcccgcattacacggccaccactacactattgcggtgatgaatacgacgatgaacctccccacccgcaaaaagcccgaagtgttgtccccggccggcaacctgaggggcctgaaaaccgcggtcgattatggtgccgacgccgtctactgcggcggcaaagccttcggcatgcgatcggcccccaaaaacctaagccttgaggactttgaggaaggctcgcgctacgcccatgaacgcggcgcccgcgtgtacgtgacctgcaacgtgctgccgcgcaacaacgagatcgaagccatgcgcgagtacgtcggccagctcaaggacaccggcgtggacgcgctgatcgtctctgacatcggcgtgatgatgatggcccgccaagtggctccgaacctggaattgcatgtctccacgcaggccggcgtcaccaattaccaagctgcgaacgccttctatgagcttggcgctcgccgtgtggtgttggcccgcgagatggacttgcaggccgtgcgtgatattcgcgccaacattcccggtgacctcgacatcgaatgcttcgtgcatggcgcgatgtgcatggcgttctccggccgttgcctgttctccaactatctgaccgggcgtgatggcaatcatggcgaatgcgcgcagccatgccgctggaagtattcgatcgtggaagagaagcgccccggccagtacttcccgatcgagcagaccgagaacggcgcctatctgttcaattcgcaggacatgaatatgctggggcacttggatgatttgattgactccggtgccaccagcctcaaaatcgaaggccgcgcgaaaagcgcctactatatcgccgccatgaccaacgcctacaaaaccgcggttaatgaatacatgattcaacgcggttttgaagacgctgatggcaatgttctgaagcctttccgtgaccgtgtgattcgcccgggcgaccccgattttggccaaggaaccgaagatcaagtgatgagcaatgccgatgccgcgttcgccggtgtggccgatgagggatatgaccgtggctctgatactgcggttgccgattcggtcaccggctcggttgccgcagaacgtgaccgcgtgacggttgctgatgccgccgactcaactgcctctggtacgtcggccggcaccgccgtcgaacccgacggcatgagctcccacgcccgctccacgcgccgcaagtccaacaccgcggtcgaacagatcgagaccgattggaagcatgcggccgttcgcccggccccgcacgtcgaactgcccgaatggctgctcgaggaaaccgacaaggtggcccaccgcgactactccaccggcttctattacccggagcacaaggtcacacagaacaccgaccgctccgcctacttccgctcatggctggtagtgggcgaagtgctgagctggagcgcggacgaaggcggacgtgtcacgctgatgagccgtaacaagatcgagcccggtcaacaggttgaattcctgctgcctggcgagagaccattggtctttaccgtgccggaaaccggcctgcgcgatgccgatggcgcgccagtacccgccatcaataatccggcgcacgtgttctcgatgccctgcccgcaccaggtgcccatcaacgccgccatccgctcgcgcaccaaaaagcccaccctcaaagccgaataacctaccactccgcccccgctgactgggggtggtcatgggaatcatgaacaccgcccgcacccaagaaagaatgccttatgcctgaatacagcgaagaaatcctcgattccaacagcatcagctctaccgataaagccggtcgccctattccggtgaccatccccatcgcactggcccccggcatcaaggtggtgtacaccacgcgactgggtggactgagcaccggcgattacggcaacctgaacctcggcggcaagtccggcgacgaacctgaggccgtgctgtcgaaccgcatcgcactcgccgaagcggtgcaagcccgcctatcgctggtctcccaagtacattccggcgtggctgtggacgtggacgactcgttcgtcatcaacacccccttcggcttcgacgtgtccggcacacatggtgagactgacactccgcacgtcatcgaggcggacggccaggtcaccgcacaatccggcatcgccctaggcatgttcgcggccgactgtctgccggtgctgctgggcgacccggtcaccggtatcatcggtgcggcccactgcggccgtcgtggtctggagcatggtgtgatcggcgccacggtagacctgatgaagagcaagggtgccgatccggcgaacatcgtcgccacactcggcccgcgcatctgcggcgactgctatgaagtgggcgacgagatcgccgaccagttcatcaagcgcttcccgctgaccaagacgaagacccgcttcggtggtgccggcatcgacatcgccgaggcggcaataatcgacctcgctttcgccggcgtacatcaggtggtcgattcgatgccgcgcgtgcacgccgccacccagtaccttgaggaagacccggaactcgccgaactgtgccgcacggacggcgaaggcccggccgagctcgcggagcgcatcgacaacatcagccacagcatgtgcacgctcgaaaacccactgtggtactcgcaccgccgcgccgcgctcgccaacaaaacacacgaaggccgcctcctcgccctcatcgtgcgtgactaaacggagaatgcgggcacattccgtggagaagatgtgatgcagttcacggacggccagccctcaccctacggtggtgcctatgactgagagagatttcgatacccccgtcgagacgcctaccgtccaaccggcccccgctcagggcgccaaaccggcgcaaaccgtgccggtggtggccgtggtgctggccgccggcttcggtacgcgcttcgaccccgacaatcccaagcagcttgtctccgtgggcggcaagcccatcgtgtgctggagcattgatgcctttgaacattgcgatcgcgtcagcgacatcgtggtggtggtcaatcccaaggtgcgcggtgaagtggaaacgttggttggcgagatgggctacaccaaggtccgcgtcatcattgacggcggtgacgaacgtgtggacagtaccgccgccgcgctcgacatgctggctactgctggcattccggacgatgccaagattctgatccatgacgccgtccgtccgttcgtggaacagtccgccatcgacggttcgattgatgcgctcgaccagttcacggccgcgaccgtggcctacacctcaaccgacaccgtgctgttgaccgaggatctgggcgatttgaaagtggtcaagtcggtgccggaccgcccgaacaccttccgcgcgcagaccccgcaatccttccgcttcgcgacgattcgtcacgcttacgatctggctgccgccgacccggacttccatcccaccgacgacacgcgcgttgtggtcgattatctgcctgatgaacccgtcgccattgtctccggtgcggaaaccaacctgaagatcaccacgctggaggatattcccacagctgagcgtatcgccgaggagattctcggtcgtgatcccaaggaagaggcccgcgcccgcatgcacgccctgctggcccaagcggccggccagatgcatcgctagactggcattatgcgtgaactcaatgttgtgatctccggcttcgaccactatgacggcgtggaggtcaatcccgccgtcgaagtgcccaaggccatcgccgagcaggggttgggcgtctcctctgctccggacgatccgttggagcaggtcgccgtcaccgtccatgccgtcagcatcccggtgagcttcgccaaagcctggcccacgctgaaagagacgattgaggccaccaagcccaatatcgtcatcgccaccgggctcaagcacgcagcccgaggcgtgatgcttgaacgatgcgccaccaacctgatggacgcgatcaagccggacgcggacaacgtgaccccacgccgcgaacccatcgaccccaatggcccggccgcctattggacccgcctgccgttgcgctcgatcctgaatgatttcacggacgattcgattccggccacc

SEQ ID NO: 549 - DNA, 21727 bp, Unknown
  R48_24m  MAG No. k141_71375
cgtggccgccgtgcatgacatgtgtggctatggcaagtgctcgctgaccgccgcgattccgattctttcggcagccggctgcgatgtctgcccggtgccgaccgccctgttctccgcacacacgaagtacgcggtgttcacgttccatgacaccacggatatcctctccggctatctggatgcctggcagaaggaagacgttgagcttgacggcgtgtactcgggattcctgggctcccccgatcaggtggcgatcattcagcgtctctaccgcgaatatccgaatgcgctacgtctggtcgacccggtgatgggcgacgccggtgaaatgtatcccacgtatacgccggaactgtgcgaggcgatgggtgcgctggccgacggcgccgatgtgctgatgccgaacctcaccgaagcgagcattctgaccaagcgtgactaccccggtcaggatatcgatgaagccacggttgacgagctgttgggcgcgctgctggagcttggcgcgaagaacgtggtgttgaagggcatcgaccatggcgatggcaaaatcgtcaactatatggtcagcgcttccaccggtgttgccggcaagatcgagctggctcatgaaaagctgccatacatgattcacggcacgggtgacgccttcgcatctgccctgtgcggcgcggtgatggccggccgcggcctggccgagtcggccgaaatcgccggtgagttcgtgcgccacgccatggtcagcacccgtaaccagccgcatttcgaggatcgtggcgtcagcttcgaactgaacctcggcgaactcaccgatttggtgaagtgaccgcaccttggctcccctctccgctcactgggtctgacgtattcagcgaacaactcggcgggttgtctgtcgtcacagggaagccgactggggagccttggtaaaccttctgaactaatggtggataaccaggttttcatccacacgttatccacaacacgccaaaccgcgtcatagtatccacatttgccggttgcgcttgtgctcttacataagtaacccgcacagtggaatcatgaacgctttaccacctacccagccgacgacgaagtccggcatcgacgccggtcttgcctttcaccagcccatgctggcttcacctgatccgcaggcaacgctgccttcggaacggattgcggccacgatgggcgaccgcaatctgacgcccaaacagttcggtgcgctcggcgagcagtatgccgccgcgtggctggaggaacacggttggacgaccttgagccgcaattggcatacccgttacggcgaattggacatcgtgatgctcaatcccgagtacacggtggtgttcgtcgaagtgaaatcacgccggtccatgcattacggatatccgcaagaggccatcacgccggcgaaacagcacaatctcaggaaagccgcctgcgattggctgcttgaccggcgtaatcgtgtgccgcatacggcagcccgtttcgatgtcgtcaccatcgtgcttcgggtgggcagaccgctcgtgcatcacatcgaaaacgccttctgaattcgtcccccaaaaaacagccacgttgcgaaacacattgcgaaaggagtagacatggctatcggcagcactctctcagtcggactgatcggccttaaggccttcatcgtccaagtgcaggctttcatcagccctggcttgccatacttcagcatcatcggattgccggatgcatcgttgtccgaagcccgcgagcgcgtgaaatcggcgtgtcaagccactggattcggttggccgcaaacccgcgtgaccgtgaacatgagccctgcggccatgcccaaacgtggttcgtcgcatgatctggccatcgcggccagcgtcctatgcgcggcgggtgccatagggcatgattgcttggaagataccattgtgctcggcgaagtgaatcttgacggctcggtgctgccgattcatgggctgctcccgatcatgctgcatgccgaggaacgtggcgtgcgcaaaatgattgttccccatcgcaatcttgacgaggcttcgatggtggatggactggatgtagtgggcgtgaggcatgtgggtgagctcatcgaactgatgggcggcgatgccacctatacgattcccgatacaccggttgccgacgagaccaccacggatcaatcgcccacaagccatcccaacgattgtggcgatatgaacgaggttctgggtcaggaacatgccaaatgggcgctgcaagtggcggcggcaggcggacataatctcatcatgaccggaccgccaggcagcggcaaaaccatgctggcctcacgtatgcccggcatcatgtgcccgttgaacgaggcggaacaactggaggtggcgtcgatacggtcgctgtgcggcatactgcctcagtacggcatcaccgacatgccgccgttcgaggcaccgcaccacaccgccagcacggcggccttggtgggtggtggcagcggcatcgccgttcccggcgcgatcacgcgcgcgcatcgaggcattctgtttctggacgaggcaccggaattcagcgcacgcgccctgcagacgttgcgcgaaccattggaatccgggtatgtggcgctttcccgttcaaaaggcagcacctattacccggcctcattccaactcatcatggcggccaacccctgcccgtgcggatactattacggtaccggcgaacgttgcgcttgccgggaaaaagaccgtattcgttatttctcgcgattgtccggaccgatattggatcgtgtggatattcagatggcggtgccaccggtctcgcgcattgccgcgcagagcgagacgatcggcgagtccagtgccgggatacaagctcgtgtgattcgcgcccgtcaagtggccaaggaccggttcagacagtatggatgggtgtgcaacgcgcaagcttcgggcaaatggctgcacgccaatacgtcgctgaaagcgatggaattggtcaatcgggccctgtccaatcatcaactcacattgcgcggggccgatcgcgccatgcgtctgtcttggacgctcgccgatctggccggccgcgtgtcccccaccgagcaggacgtccatcagggcatcgaaatgagaacgaggatgacatgagtaacgctactgatatccgacaatctggcggcaccgcaggcagtgtggatcacaccgatacgggcctcgctgtttcgcgcaccattcccatgcctcccacggatacgttataccgcgccgcgctcacgttctgtcttgatggggcggatgtgatgatgtacgccacgctcaaaggcgcggaaagcgccgaatccctctggcacgcgttggcgcaatcccatccaagccagccatctggaatctgcggcccggcgctgtcacgtattgaccgcatgttcgtggatggcctcacccgatggggccgcaaggcgtcggcgaacgcgatgcgctccttccgcaatgcactggccggctggcataaccgcatgatggacctgccctcgcaagacatcatccaactggccgactggttcactatggatggcacgcaatggattatcggccccggccatccatgttggccctcgcagttggccgacctgtccattcgctccgattgggcgccaccgctgtgtttgtggatcaaaggcgatccacgcgcattgaccagttgcgccaaaccggtcggcatcgtcggttcacgggacgtgaccgaatacggccggtatgtggcacacaccgtagccgaacaggcagtcgttgccgggcatctggtcgtgtccggaggcgcaatgggcacggatgcggcggcacattggggagcgttgaatgcgctgcacggcagaatgcccgccaatgtgggcagaaccgttgccgtattcgccggcgggctcaaccatatcggaccgatgcgtaaccgcacgctgttcgaacgtatcgaggcgcagggtggtgcactgatcagtgaactgtgcccagggacgattcccgaagcccgtcgttttctactccgcaaccgcattatcgcggccatgtcttccacattgattgtgacgcaagcccggttgcgttccggagcgctcaacaccgcgggatgggcatgcgaattgctgcgcgaagtgtatgcggttcccggtgacatcaatcagccttgcaacgccgggtgcaataagatgatcggcgaccaccgggcgatgattctgtgtgccgccacatccactgaggatatatgccatgaacggcataagcccgttatggcggcatgcccaggcataccgaaatccacaggtcaggactcgtccgaaaacgaggaggccatggaagtgccggcaacgactccgttatcgccagcatcctcggaatcatcggcgtcacaggagtcgtcacaagattcaggtcattcgaaacgtcttaggaccaagcatactcagcctacactcgttcaatccaaggatgggccggcgagcgcaactgccgaggccggtgccaacaagagcaagggtgaagagccgccctcgtcgcatcagatgccggatcttcgtgtcaagccgaagctcgatcccgagaaggaagcccaacaacgtatcattatcgccaagctgccggaaatggaacgcacattagtggcattgattcgtgaatgccgtaaacgacatctcatcgtcaccccggacgcactattgcgtgtggcgcgagagacggtacccgacgagattcccaatatcggcaccatacttgagctactcggcgcattggagctgaagggagtgatcgagcgggatgccggcatactcaagctgagcagccgtgtcggctaatcggctttcatgacacggctcgaagactgttcggcgggtgtgcgagaatcgaacccatgagtccgaaacgtttggaagatatgtatgatgcggtgatcgtcggcgccggagcggccggcctgtcggcggcgttgggactgctgcgctcccccaaaatcaccgagctcaaggaacaaggcgtggacccgaagatcctcgtggtctccaaactgcagccgctgcgttcgcacaccggttcggccgagggcggcatcgccgcgagcctgggcaatgtggagtccgatgactggcactggcattactacgacaccatcaagggcggcgactggctcgtcgaccaggacgcggccaaactgctcgccgaatacgcgccgcagaccgtgatcaacctggagcgtcagggcgtggccttctcccgtaccgatgacgggcatatcgcccagcgccggttcggcggccacacgcgcgagttcggcggtgccccggtcaagcgcgccgcctatgcggccgaccgcatcggccaccagattttgcacaccttgtggcagcagtgcgtggccgccggcgtcgagttcgccgaggaatggtatgtgaccgacctggtgctcgccgacgacggcaagcaggcggccggcatcgtggcatttgacacgcattcgggcaagattcaggccatccacacgcgcaacgtgcttcttgccaccggtggcgcgggccgactgttccataccacatcgaattcctgggacctgaccggcgacggcatggcattggccttggccgccggcctgcagctggaggacatcgaatttgtgcagttccaccccaccgggctcgcgcacaccggcatcctgctgtccgaggcggcccgcgccgagggcggcatcctgaggaacgccgacggtgagccgtttatggaacgctacgccccggagcatagggatctggccgcgcgagacgtggtctcccgctccatcatggcggagatcgacgccggccgcggcgtcgccgacccgaaggacccggatggtccgaaggactgcgtctggctggacatgaccggcatcgaccccgaacgtatgaaggaagtgctaccgcaggtggtcgaaaccatcgagcagtacgcgaacctcgatccggccaaggacctggtgcctatcaagcccactgcgcattacacgatgggcggcatccccatcaccaccaatggcgaggtgtaccgttgggccgacggtgccgtgcaggtagtcgatggactgttctccgctggcgaatgctcttgtgtctccgtacatggtgcgaatcgtctgggcggcaattctctgctcgacgcctgcctgttcggtacacgtgctggtcagacgatggccgcacgcatcgtcgagaacccggttgactcccccatggccgatgattcgaccgatgacatgctgaccgatgccgccgatcaggctgccgattcccgcaaggcagagcttgacgaactgctcgccggaccgatggacgattcagacgatggcgggcccaccgccaatccttatcagctcatggcccaactcggatcagtgatggagcaggctctggccgtacgttgcaccgctcagaccatcgatacggcgttgactcagatcaacaacgacatcacaccggttgccgataccttgcgggcccatgacaagaccgccgctctcaatcaggaggtcaccgccatctgggaagtccgtcatctaatcgaactggccgaggccatgctgcacgcttccgaatcccgtcaggaatcccgcggatccatgcagcgacttgatttccccgaacgcgacgatgagcatttccttgctcactcgatggtcgccgatgatggtccggcaagtttcaagccggtgcacatcaccgactatccacccaagaagcgcgagtactgatccgctggtggtaataccaagccgcctagggcttgtggcacaataggttggctgatattggacttgacatcccactgtttcatggaggcagaacatggctgaggcgagcaacacgacggttaccctgcaagtgcatcgtttcatgccgcgacccgagcgcgccgaacgtgcacgcggcggcagcccgttcgccaagaaaagctccccattcggcggcggctcggattcggcggcacgccgtcgtccgcgcggcaagcagtgggtgcaggaatacacgattcccgcgcgcccctcggacaccgtgctcgactgcctgctgaccatcaaacgcaccgtcgacccgacgctggccttccgctattcgtgcggtcacggcatgtgcggttcggacgccgtggccatcaacggcacccccaccctgctgtgcacggccaccatccgcgattgggccaagcagcccggcgccatccccgaagtcgatgacgaagggttccggcacaccggcaccgagtccgaagaatccgacgattccgcggaaaacgacgcaaacgcggcagccgaccaggactcggccgcaaacggctcgctgggagtcatcgaactggcatccctgcccggcttcccgccgcagcgcgacctcatcgccgacatcgacccgatgctcaaccaaataaggaagctcaccccatatcttcaggcggacggcgtgctcgccaccaccgccgaaggcaaggtggacgtgttcgaatacctgcagaaccccgaacaactcgccaaatacgagctgctgagcaactgcatcgcctgcggcgtgtgcgaaggcgcctgcccggtgtacgccggcggcgacgctttcatcggcccggcctcgctgatttgggcctcccgtttcgtcaacgattcgcgcgacaccaaggccatggagcgtatggacgccatcgacaccgccgacggcgtggccgcctgccagtccgtgcgcgcctgctcccgccactgcccgcgcggcatcgatgtgggcgaggagatgtggcagatcgtggccaaggtccgcgagcgctaagccgcgccacgaccagctacggcaatcgctgcaacacgtagtcgatacatccaccgggtgcccgcacgagagaagacataaaggaacgaattatggacagaacgcagtacaccaacctcgccaaggcatgggaattcaccgaggaacacgcgcgcgaacgtgaatccaatgcgttgaccgacgcccgtacggccgccgacaagtccggccagttgcagggttcggccgcgcaggcccgtctgctgggcatgctggtgcgcatcaccggcgccgcttcggtcatcgccgtaggcaccggctcgctggtggagaccttgcagctcgcccatgcgctggataacaagggcctgctgactgcggtcgattccaccgctcagggcatcgcgctgattcgcaaggcgttcgccgaactgcaggatgagaccgacaccacgttgcgtgcggtgaacgccccggccagcgtgtttctgccgcgcctcaacgccaatgattacgatctgatcgtggtggcgggcgacgccgagaactatgccgccacgttcgcccaggcctcccgtctgctgcgcgcgcacggcgtgatcgtgttcaccgatgtgctggcgttggaggacggtcagggcggcatgattaatccggccgaccgcagcgacaaggccatcgccatgcgtgagctgctcaccaccgtcgaagatgacgaaggtttcgagtccacgcttacccctgacggcacaggcctgctcatcgcctacaaaaagtaactctgcccttggctcccctcggagaggggagccactctatctcgcttacctcacaattgcgctgacggccacctccacggcttcgtcggcgtcatcggtcacggtgaccagtttcgggtcgattgccgaaatcatgccgtgctcggccaccggaccgttgagccagtcaaagagcccctgccagtattccttgccgtagagcaccaccggaatattcgccaccttgtgggtctggaccaaggtcagcagctcgaacatctcatccagtgtgccgaagccgcccgggcacacgatcacgccggaggaatacttgacgaacatggttttccgcacaaagaagtaccggaagctcatgccgaggttcacccactggttcaacccctgctcgtgcggcaattcgatgccgagtcccacggatttgccgccagccagtgccgctcccctattcgcggcttccatgatgccgggaccaccgccggtgatgacggcgatgttgcgcttggctatctggctacccatgcgccgggccgccttgtagatcgattcggtgcgctgggtgcgtgcggagccgaaaatagagaccgcaggtccgagctcggcgagcgccccgaaaccgtccacgaattccgattggatgcgcagcacacgccatgggtccatgtgcagccagtcggtgtcctggtcgggtttcagcagattggcggtggtattgtccgagggaatcatctggccgcgtagaatcaccgggccgcgatgataggtgtcgcccagcggcgagacgtcctccaagtcgaccgggttcaccagcgttgcggcagcctcggttgccgtctcggcctccaacgttgccgcatcattcgcggctgtggcttccaatggttccatatcgtccacgactgtggacttggatgcggcctcggctagattctttgcttcagcggcctttttgccgtcgttcttcttggatttcttctgcttctttgccatccaatatcctcctgtacggtgctatcgactcttcgcattctagcgcctgaagctctgcatacgttttccgcgaaatcatccttgacttcgtgaagaacgtacggtgagtgacactcagcgtacggttttcacgaaataaggcctcatctcgtgaagaacgtacggtgagtgacactcagcgtacggttttcacgaaacaaggccaacaatggagtagggatcgtctaagccatcagtggcggaagtcaatctccacactggcggtgccgtcggcgagggtgccggggtgttccgtgggcgtggtggactttgtggtgcgaccggtctgaccagcgccatcgccatcaatcgattcgtcatcctccgcatcggccgctgctgcggctgcggccttctcgaatctcttggactgacggctcagcagcacaccggaaatcgcggcggcgatcagggaggccaccagcacgccgaagcgcgcctcagcggaaagttccgcgttcttgtacgccagcgaggcgatgaggaaggacacagtaaaaccaatgccgcaggcgacggcagcgggaatcatgtcacgtacgcgcagccccttggccatcttgagcccgcccacatgcgtggccagccatgcggtggtgatgatgcccaaaggtttgccgaccaccaaagccacaatcagtgcgataaccaacggcgaagccagcaacagcgggctcaccgactcgaagtgcacgccggtggcgaacagggcgaagatgggcagggccagcagtgcggagaatggctgaagcttgttggcatagcgttcggcacgcggtgaaagttcgccgtgcatttcacgggagggagtcagcaggccaaccagcacgccggccagtgtgggatgcacgcctgcctcgaacatcatgatccaagcgaggacgccgacgatgccgaccgcaatccacggcacttttttcagtcgtacgaggtatgcccagatgacggcgcacacgacgatgccgatgaaccaataccaggcgttgatcgaggagaagaatacggcgatcagaataatggccagcaagtcatcgacggtggcaagcgtcatcaggaacgcgcggatcgaaccgggcagggccttggcaaacagggcgagcacggccagtgagaacgcgatatccgtggcggtgggcactgcccagccgtgcgacatctccgagaacggaatgctgctgccggtggtggtcagaatcagcgtgccgggttcaccaggcccgatctgagagaacaatgccgtgacggccaggaacaggatgggcggggcgatcatgccgcccaccgcgcacagcatcggcacggcggccgctttcggattggcgagcgagccggtggtgagttcctgcttcagttcgaggcccacggtcaggaagaagatggtaagcagaccatcctgggcccaatggccaatcggcaggtcgagattggtgtaggggatgaacagatgcgtttccgctacggtctcgaacgcatgcgcggtggcgggcaggttcgcgagcaccaggccggtgagcgcgaagccgagcatgatgagtccggaaatacggtctgaggcggcgattcgcctgatggtggaccaaagtcccttcttcgcgccggcggtcgtggccatcgcgtctccttgctgtactctcttggatgaaccgtatgtaatagtacggaatatctcaggacgttccgctccgggctgagtcgcgaagggcaaccttaccccgcccctgtgtggccgactcaaacgggccaatacaattggaaaagcctcggaagcatttcgctttcgaggcttactgtgcgccagacaggattcgaacctgcgacctgctgatccgtagtcagctgctctaatccgctgggctactggcgcataccactgttgtccccgtggttcgggagtgcgccagacaggattcgaacctgcgacctgctgatccgtagtcagctgctctaatccgctgggctactggcgcatgttgtcttttcagacaactcgatatataatacacgccgttcagatgaatgcaactcggcgtgttgcggcgagtcgcaccatcctaatcgccaccgcaacggcgtatttactggcctcacgccgcatgtgcacggactcggtcaagcaaaaccgactacgcaactttgaggcgtccctgcggcacatccacggcttcgcgcaagagtttgggcgtactggaaccctctacggacgccttgtccacaatcacctgcttcacatcatccaaactcggcaactggaacatcgtgtcctgcaacgtacgttcgataatcgaacgcaacccgcgcgcgccggtcccctgcttgatggcgatatcagcaatcgcccgaatggcctgttcggtgaactgcaggtcgacgccgtcgacggcgaacagcttacggtactgcttgatcagcgcgttggctggctgggtgagaatcgccgtcagatcgtctacggtaagttccttcagcacactggtgaccggcaaacgtccgatgaactcaggcaacagcccgaactcggccagatcatcggcattgacctgttcgagcaattcctcgtctttcatgtcggcgtcgtgccaattcgcgccgaagccggtctctcgacggcccaatcgcttgcgaacaatatccgtcagtcccacgaacgcaccgccgcagatgaataggatgccgcgtgtgtccatctgcgcagtgtcctgctccttatgcttgcgcgtgccctccaacggcacggaggcgatggtgccttccaaaatcttcagcaacgcctgctgaacgccctcaccggacacgtcacgggtgatggaggtgttctcacctgatttgcgcgcgatcttatcgatttcgtcaatgtagatgatgccgtgctgggctcggcttacgtcgccatccgcggcttggagaagacgttggagcacggtttccacatcgtcgcctacatagccggcctcggtcagggtggtggcgtcggtgatgacgaatggcacgttcattacgcgggccaacgcctgtgcaagataggttttgcccacaccggtggggccgagcaacagaatgtttgatttggcgacctcaacgtcagccaaagggtcactgttgcggcgggtagcacgcgtctgggcgggagcggattgcttggcttgtttgccggtctggccaccgtgcccgttattcccgtcaagctgctcagcggactcctgaagctccatattgacgcgtttgtaatgattgtatacagccacggacaatgcgcgcttggcgttctcctgaccgatgacgtagcggttgagataatcgaagatctgagcgggcttgggcaggctcagcgaattgacctcggcatctttgacacgctcctcggagatgatgtccacgcacagggcgatgcattcatcgcagatggaggcgttgggaccggccaccagttttctgacctgacgttcggttttgccgcagaacgtgcaacggggtacgtcctcgttgtagctcaccacacgtcccatgattctcctttgccgaccgcgccgcaccgtcgaaccgccacgctgcgcattatcattgtcatccttgaaatacaatacccccggtcgttgccgaccgagggtattgcaatgttcggaagttttactggcggtgttccagcacctcgtccacgatgccgtattccttggcttcaggagcggtcaggaaagtgtccacttcgatgtcgcggcgaatcttctcgacatcctggccggtgtgcttggcgagggtctcctccagccattcgcgcatacgcagcatttccttggcctgaatctcgatctccgtggccttgccgaatccttggtcgatggccggctggtggatgagcacacgggcgttcggcagcatcaggcgcttgcccttggtgccggaggccagcagaatggcggcggcggaggcggcctggccgagacacacggtctgcacgtcgggcttgatgtactgcatggtgtcgtagatggcggtcatggccgtcatcgaaccgccgggtgagttgatgtacatcatcacgtcacggttcggatcctgggattcaaggaccagcagctgggccatcacgtcgtcggcggaggcgtcgtccacctgcacgccgaggaagatgatgcgatcctcgaacaggcgggagtaggcgtcctgggtcttcatgccatacggggtcttctccacgaactgcggcatgatgtaacggttggtcggcgcgggctgggctgcgcgggcggcggccggcatgaaaccggctacgccatgacggccggccaagcggtcggcacgggcggcgaactttgcttcttcacttgccatgagtctcactccccctgctggttgttgccgatggtgtccggcgtggtcacgagcttgtccacgaagccatagtcgagggcttcctgggcggtgaaccagtggtcgtattcgttgtcgcggtagatctcctcgagggtgtggccggtctgctcagcggtcagctcgctcatggttttcttcatgtccatgatgagctcggcgttgatgcgcacgtcagtggcggtgccgccgatgccgccggaaggctggtgcatgagcacacgggcgtgcgaggtcaggtaacgcttgcccttggtgccggagctcagcaggaactggcccatggaagcgcacatgcccaggcccacggtcgccacgtcaggctcaatgagctgcatggtgtcgtagatggccatgcctgcggtgatggagccgcccggcgagttgatgtacagccagatgtccttcttcgggtcctcggcggccagcatcagcagctgagcgcagatgcggttggccatatcgtccttgacctcttcacccatccagatgatgcggtctttgagcagacggttgaaaatcgggtcgacggggccggccgggacgtcatcgcccgccatgaccggcaaggtcgcaaaggtattgctcaccttgattctccttctaattactcgaacattgttcagactaccgccttgaagcgactgaaggcggcttttcgcgtgctttttggcgggtagcgtagggatttcgggttattccaaggtgtcgaggacgtcgtcaatgaggaggcgggtctgggaggcggcatcgtcgcccagacgcgggaagcgacgggcggcattggcggggctggcaccggcggctcgcgccacgttggacttgctggcaccatgggccacggctttttccgcgagccgatcgaccagtgaatcggcgacttggcgcatctgttcggccacccataattgggccatatccgcaggcaagtcgtagtcttcggccacatcgctggcggcctcctgaatggcggcccacaacaccatgaatggctttcgatagtagtcaatctgctcagtgagcggctcagcggcaagcgattcaagtgccgcacggacttcggtgttttctgacatagctttctttacctcggctcccctcagtctcactgtgttcgacagctcccctcagagaggggagccagaatatatgcatctacttacttacgactcagcaaccactttgatatcaacgacgacgtggccacggccatgccgactggcacgaagaaggtaatcggcgcttcggtcagctccatcaccaagcacatggccataagcggtgcctgctgtgaggccgaaagcaacgaagccgcaccgatcaaggcacacgcggttaccgaatcagtcggaaacatcagtatccatacgaggccgagcatcgcacccagcgtggaacctaatgcgatgccgggctgcagcacaccgcccgatgcaccggagcgaatggtcatcagcgtcaccagcgccttggcgacaaaggtgagtgccaacacacccagcaacatccagatattggactgggacagcgggaaaccggcgttcatcacggatccagaagagccgctcccaccctgaagcatggcccaaaacgaggccattccagagcccgctcccccgccagaggccgaatcggatacattaccgccgcccgtcagcaagttccatggagaggcggccgctgaagatgccgactgcatggcaccagcagtgccggcggtttcaggaatgaacgtgctgaatccaagttgcgctgcggcacggccgttgcccatcacctgcggcacagcaatcgccaccaaaccggtgatgagaccagccagcggcatccgccacagaatggccttgccggtcggcttgtgcgcttccgcccattgcgaaccttttcggaacaatgcgccgcccactccacatgccgcaccgcagatcagagcgaacagcattaacgttggcgtggattccggttgcatggcggtgatgtcgtagaacaggcaatgccctttgatcgcaaccgccacgaatgcggcaatggcagacacgcccagtccaaacgcaaccttttcgatcgtcacatccaccaacaggatttcgacggcgaagaacatgccggccagcggcgcgtcatagacgcctcctagaccggcaccggcagccactgccaccaccatgcgccggtcgataccatcaacgccctcgatatggaacaggtcgcaaaaacgttgcgcgatcatggcgccgagttcgcgtggggcgacttctcggccgatcgaggcaccggagccgacgatgaaaatctgcaacaccacatgcacaatggtttgccagaaaggcattcgctttcccgccacggccttcttgactgagggcaccacagtcgttttgtgtcgtagcagataccagataatgcccgcgatgccgagtcccacggtcatcgatatcacacggcgtgcagcgggcacgccgaatggaccagacaattctgggccttcgatgtagccgagcagcacatgttcaacgccgtagagcaacagggtcagcagacctgctcccacaccgatgagcacgccgagcacaatggtcgccgcagcgagccaaccaaggcgtttgatagtaaccgttggctgcatgtcaacctccgcacgctatgcaacgagtatgccttgggaactcccctcagtctcgctacgcccgacagctccccccaaaggggagccaaagaaatagtccttttaccagaataggaagagcccggaaccgtgaaacacgattccgggctcaaacaatcacgctaacgcgatgaggctatgctcactcagcgtccttggcgtcatccttggcggacagttcgtcggccacggcggcagcagcggaagcggcctcgacggactcggactcttcgtcctcagcggcctcgcccaggaagccggagaggtccacaacctcgccatcagcggtgaacttgacggcgcgcatgccggcgagcagacccttggaacggccgacttcctgcacagcggagccaagctggccattcttgatgatggcctggatgaagttgttcgggtccatgccgtactgctgggcgatggaagcgaggaagttgaacacgtcggactgggacacctgaacgtccagcttctcggccagagcgtcgagcaccatctgatcgcgcagatccttctccacggtctcctcggcctgagccttctgctccttggtggccttctccgggtccggggtcatgcccttgagctgctcttcgaccatgttggccttgacacccttcggcaccgggatctcgaggccttcctgcagcttggcgatgaaggcatcgcgagcctcggtggcctgacgaccttcggcgtcctgagcggcagccttgcggatgtcagccttgagctcgtccagagtgtcgaactcggaagcttcggaagcgaactcatcgttcagctccggcagttcctcagccttgacggagttgaccttgaccttcacggtggccttctggccctcgtgctcgccggcttccagcgtgccttcgaaggtggtctcctcgccggcggacaggccgtcaagagcctcgtccagaccgtcgagcatggtgttggagccgagctcgtagctcacgccttcctgggagtcgacggtctcgccgtcaatctcagcagtcaggtcgatgttggcgaagtcgcccttggcggccgggcggtccacgccgaccaaggtgccgaagcgctgacgcagggtctcgaggcgcttgtcgacgtcctcatccttgacttccggcttggagatggcgatctcaagaccgtcgatttccggcagttcgatgtcaggacgacgctcgacggtggcggtgaacttcagcttggtctcgtcgttggcggactgcggaacatcctgcacgtcgaactccggctgagccatcggacgaatcttcttctcatccagggccttggagtacagctccgggaccgcgtcgttcacggcctcaccggcgacggcggcgaaaccgatgcgctggtcgatgatcttgccgggaacgtggcccttacggaagccgggaacgttcacctgcttggcgatttccttacgggccgcatccagatacgggttgagctcttccggttcaacagtgacggtgagcttcaccttggtgggctcgaggttacgaacgctgatcttcacgctaatgactcctcaaaagtcgttatttcttacagttctgccgtaaggcaacctctacatgataacgccacttacggacggtgcaatgagtttcacctgccagtttcttgcgccctgctcgatcaggaacgtctcgacgtccacttccaccgggtcttccacccagcacaggttgcgtaggatctgtggcttgatgatcatctcggccggcgtgcgggtgtcttcggcgatgcggttgatcacacgccgtacccgctgcagacggtcataacgctccggatggcgctgttgccacagtcgcatggatcggggcgcgttcaccacaccgttttcgtcctgttcgggggcgggcatggtaggccattgggtgggctccagggccatggcgcggtcgatggcctgcttccagaccttcggcttgaccgtacgctgaatcggcgcgtaccgctcgaacattttgtcctgctcggtgccggtatgaatgcgcacacgctcgttcagggatcggagtgcgcggaattgggcggcattgtgcggcttgttggtcgcggcctcgatgattgacgaatcggtcaataacaggctgggagcgatgtcgtatcgccgggcgagccggtcgcgctcctcccatagggatttggcgatggccaagcccctcgaatcacgactcagctgggtgatgcgcgagatacgcagccaaggaatcggatgaggtttgcgcggggcaaggcccgcaaccaaagcgtgagaaaactcttcagcggcccactcgtccttgcctgcggctttcaggtcacgacgcatcaaggtttcgagttcgataagcacctccacgtcgagcgccgcatagttgcgccagtcgcgcggcagcggacggtaggaccaatcggcggcggaatgctctttggccagcgtgatgccgaggtagtgttcggtgacggcggccagaccgaagcggtgcaggccgagcaatcgcgccgctatttccgtgtcgaacaaggccttgggtttgagtccgatttcggcgaatccgggcaagtccatcagagaatcatgcagaatccatgtagcatcgcccacggcgtcattgaattcattccagtcagctccggcccgtgtcagggcgacgggatcaagcaaggcgatgcccgcaccttcacgtttgaactgaatcagccaatcctcatgtccatagcggaatccggacgcccgttcggcgtcggcggccagcgagcccgtcgcctcggccagcgcatcgcaggctcgatgatagccatccagcgacgaagtgacatcgggcactcccccgcgaggctctttcagcagtcggggttcggtgtcacggacgtcactcaactggcgtcatcctcctcaaaacggatggtggatctgatgaatgcggcccacgagcggatttgtgcgccggcgtccatagtaccgtccggtccggtcccgtcaagcggggtccatgagacgcgaatctcacacccggcgctggtggagccggccatcgaaccaaaagccgtgttttgggtcacggtgactgtgccggataccgaatccggctcgatgccgtcgaaatagtcgcacatgtcatcccagtacatgccgggggtcagagaatcgttttcggcggtttccagcggcagccgcgcgaacgccacgcaacgccagttggaatcccggtcaatgcgcagctcatgagcataaagcatcatgatccagcctgtggcgattcgtgattcggcatcgttgccaagaccggcggaaaaggcatcgccgagggcacgctctcccgcttcgaattccacgccgataccataatcggccaaggtggaaggcacgggaatctcccgatagcgcacgtcatggatgcgcttcatggtgctgacggattcgacagctgcccatacttcatccggcacaccctgagggcgtacggggcgtccgtcgttggacgctcccataggaaatgcgtagatgtcggccatatctctagggtatgggcgaacgggccgaatcgtggtatttacgcgcggttcggccctgcaatttaaaacacggtgaagccgtggtccttgaactggttggccacccgcgaacgggtggcggcgttgggtcccttctggttctccagcgggtatgggatgcgcagttcgtgccacttcgggcggccaagctggtggaatcccagcacgtcgatgtgttcgacggcatcaccgaaggactcgcagatcttcgccacgttttcgacgttctcttcggagtcggtcaggcccggcacgagcacaaatcgtacccagatcttcttgccggccttggccagtcgctggccaaaatcgatggtgggctgcaaggtgccgccggtgaccttgtgataggtctcctcgtcgccggatttgacgtcgagcagacacaggtcgatgtcctcgagcatctcgtcggtgtagctcgtgttgaggaagccggacgtatcgaggcaggtgtgcacgcccatctccttggcggcatggaacacacgcgagacgaaggcgggctgcatcatggattcgccgccagagaaggtgataccgccatgcgtggccttgaacaggtccttgtaacgatcgaccttcttgatcatggcgtcaaggtagacgggcttgccgtcgcgcatcttccaagtgtccgggttctggcagtactggcagcgcagcgggcagccggacatgaacacggtcatgcgggtgcccggtccatccacggaggtgttgatgtcccaagagtggacgaagccgatatcgccggatttcagggcggaaaggcggtcacgtcggtcgagtccgattggggattcaaagccggaaaggccgcccatcaaagtctgcgaggcataggtcttcgattccttgagcatatgcctggtcgtggtgcggaacgtgggtgttgcgggcatagttgtcctcctgttccaaatgatgcgaaggtctgtgggaaataaggaaggggtggagccgtgccccaccccttcagttagtcattgccgcggttcgcggggttggtcatcagtcgacgacggcaccttggtggaaggtacgggagatgacgtcgagctgctgctccttggtgagcttgacgaagttcaccgcgtagccggagacacgcacggtcaggtgcgggtacttttcggggtgctcgacggcgtcctccatggtctcgcggcgcagaacgttgatgttcgcgtggtagaggccgtggccgttgcccgcgtccaggatgccgaccaggttgccgatgcgctcggcttcatcgcggcccaggccatcgggggtgatggtgttggtcagcgagatgccgtcgagggcgtcgttgtagtcgatcttgccgacggagaacatggacggcagcatgccgtgcgagtccatgccgttctccgggttggcgcccggggcgtacggggtgcccttcttgtggcgggacgggaaggaaccggtgttcttgccgtactccacgttggaggtgatggtcaggatggactgggtcgggacggcgccacggtagacgggcaggcgcttgac

SEQ ID NO: 550 - DNA, 2771 bp, Unknown
  R48_24m  MAG No. k141_71604
ggtggcccgccagtgctgtcgggcaccgggctggcagacgtcaccgcggtagtcgacccagaggatctccgggtgggcctgggtcatccacatcggcggggatgcggtgccggaggcgagatcgacggcgatgccggccttaccaagcttgtcgatgacgcggtcgagccaatcgaagtcgtacacgccttcttcgggctcaagcttggcccaggagaagatggctacggagacgaggttgacgccggcctgctgcatgagggctacatcttcgtcccacacttcctcaggccattggtcggggttgtaatcgccgccgtaccagatgcgtggcttgttgcccgcaagcggctgcggccacttgaactctttacgttccatgatgattcagctcctttattgaattttatcgataatctgcgtccgcgggaataaacagcccacagggctgtttgcctaacggctcagctcgtcagagggggcttggcactattacctccctctgatggggaaggttgtctcggcggagccgggacggagggagagaccccgccgcgaggcggtgaagacaccgcgtcggcggagccgactccatcactccttgacggcgcctgcggcgagtccggactgccagtacttctgcaggcacaggaacgcgatcaccagggggatgatcgtgatcagggagcccgtgatcaccaggttctggatcgcctggccgcccgcggtcgaggcctggtccttccactggttcaggccgatggtcagcgggtaccagtccgcgtccttgagcatgatcaacggcaggaagtagttgttccacgtcgccacgatcgtgaacaacgccgtcgtcacgatgttcccgatactggccaacaacacgctgggggcgagcacgtcgatgtccgtgcccaggaaatcgttcaacgaacccaccaggccgtacttcgcgccatacacgaaaccccagatcaacgtcgacaccaccgccggcaccgcgtagggcaggaacgtcgagatacggaagaacctcgtgccatgcagcttcatcgaatccaacgccagggccatcaaagccgacaggcacagcatgatcggcacctgcacgcacgtgaacagggccacacgaccaacactgctccagaactggccatcacccaacaggcgcgcgtagttctcgaagccgacgaacttggtgccgccgatcatctgcttcttgaagaacgaaatataaacggcgtacacgatcggcacgatgaacacgaacacgaacaccaccgcaaaaggccacatgaatttccatccacgccaatcggccttgtgcttattcacacgagccttgcccgaatgcacgggcgcagctgcgatatcggctgaagccattcccaacccctctccttcgaaggttgaccaaaatgtttgcgttatcatcataacaccatttgtaacattatccaatcgtgttgagtaccgtgttgaattaagggtttctcagtcactctgctacaatggtcacgaagacaacgatgttatcgttaccgtaagcgtccctaagataagcgttgtaaacgaaacaccgacattaatgagtcaagcgagggtgaaatgtcgagaccaacacaggtgtccatgcaagacatagcgaaagccgccggcgtttcgccacagacagtgtcccgcgtggcgaatggcagcgatgcggtgaaacccgaaacacgccagcgtgtcgaagctgcaatgaaacgccttgggtatcgtccgaattatgcggcccgagccctaaagcacggccgcttccaggatatcggcgtggtgatgttcaacaccaccgcgttcggcaacgcccgcatccttgattctattgtggccaacgcggccgatgacgattattcagtcaccatccagaccatgcgccacggtgcggaacgcacgctttccgccgccatcgatcgcatgcagcgtcagccggtggatggtgtcatcgtagtgccggaggaacgcatctccgatttcgtcggatacaagcctccgcgagaacttccagtcgtgctcatctgcgaatccgccgccgaccactgccccaccgttgacgccgaccagtatggctgctcgaccgctatcgtcgattacctgatgaacaaggggcacaagaccgtctaccacattgccggaccgtccacctcgcgcgccgccgaaagccgcgcccgcggttggcgagaagcgttggaacaaatgggagcacgcgtaccgagcatgtacatcggcgattggtgcgcggattcaggctaccaggccggcgtggcgttggcccacgaccccgactgcacggccatctacgccgccaacgaccaaatggcatacggcgcaatgctcgggttgcagtcagcgggcaagcgcgtgcccgaggatgtcagcatcgtgggcgtcgatgattcgctggtagatatggttccgcgcttgaacctgacgaccatgaagctgcgctttgacgacattggcgccaccgccttctccatggtccgccgtcaatgcgaaggcgagaagataccggtcggcgtcaaaaccgtaatcccgccggaactgatcgaacgcggttccgtgcgcgacatcagctgacgagcggcatgtgctggcatccactggtacctgtcagtgattcacctgccagtgatccataggcaattccgcaccgaccaatcgactcggttgtgcaatattctgcacatttccaactatgtgcagaatattgcacactttactatactgtgata

SEQ ID NO: 551 - DNA, 7265 bp, Unknown
  R48_24m  MAG No. k141_72605
gcactagccttcaccacgggcaggttgaacttgttcgaatcgacatcaagttgtgccgttgccattcgcgcaccttcctcttcatgaaccacttaccccaaacattaacgttcacgcgttcgcgaacgctagtgttcggtactttatgtcttctgtgttaccgccggcagacaccggtcgatacacgaaagccgaagtgcgctcatgctatcaaagcaaacgcacttcggcttgttacgtctcgaattcgcgggaaaaccgcaaacatatagacggttgatgagatgccgatcgcccatcacaggccaatcaggcacccgccatacgccaaacgccaatcagaggttggtgcgatcggtgaagatgatcgggccgttctcggtgatggcgatggtgtgctcggagtgggcaccgcgcgagccgtcggaggcacgcagggtccagccgtccttcggatcctggaagatctcgtcggtggtcttgaggaaccatggttcgatggcgatgaccaggccttcgcgcagcttgtagccgtggtgggcgcggccgtcgttcggtacgtgcgggtcgccgtgcatgatgtggcccacgccgtgaccgccgaactcgaggttgatcgggtagccgtattcgcgcgcgacgtcgccgatggtgttggagatgtcgccgagacggttgccgggcttggccacgtcgatggcggcggcgagcgcttcctcagtgcacttgatgatgcgcaggtcttcggggtccgggtctttgccgaccacgaagctgacggcggaatcggccacccagccatccacggagatggcgagatcgagggagacgaggtcgccgtccttcaggctgtaatcgtacggcacaccgtgcagcacggcgtcgttgacggaggtgcagatgtagtgggcgaacgggccggtgccgaagtcaggagcgtagtcaacatagcaggattcggcgcccttgcggtccacgatcttcttgtggacgaactcgtcgatttcgagcagattggtgcccaccttggtggtctcctgcagttccttcagaatgccgccgacgaaacggccggccggcttcatttcctcgatttcacgaggggtcttcaattcgatcatgaggttctttctaccttgttgagacttgttctcaactctagcccagcccggggtcaaccgccagagcatcacccgtggtctgcctagggtccgctagtagcctatcaacggccaaggccgagaaaaagcgcccggcagatacataacctgcacgggcgctttggattgattgtccggagattgattgtctggagcgcgagatcacttcctgcgcttgccaaaagtgaacgcgcgaatcactgaagtaatccccatcaccaccatggcgtatccgccgaagataatcatgaatacggcggagctcagcgggctcatcagcaccacgaagccggcgataatcgagatgatggcataggcgatggcccagccggagcgcgggatgcgccatgattcgactagagccatcacgccttccataatccaaccgaaaccgaccatcagggtgatgagtaatgccaaggtctgaccggtcataccgtagtttcgtacgactacgacgcctccgaaggtcagcagaatgccgacgaacacgtccagcacacgccaaccgcccggcagacccggctctacaagagcgctgacgatgcgcaccacgccggaaatcacgaaatacacgccgagcaacaatgcggccaaagccagcgtcttgttcggcaccagcaacagcgcagcgcccaaggcgatggcggccacgcccaccacgccgtaaatgatgcgaatcttggtcttggccttttccggcagccattcctcgatcaggcggaatggactgaaattgccgacataccagttggtctgctgccagccgggttgactttgatcgccccatggaccattcggctgcccgtccgcttggctattcgattggccgtccgcctgataccgccgaccgtccgggccccatgccggctggccgttcgggccgtagttcggattgtaggcgtacgggccgtagtacgggttctggttcggtccgccttgtggctggccgttctgcgcctgctgattctgagtgtcttgcgctcccggcgcaccttgcggaggatattggccgccatgattgctgtcatacgcgccatactgcggttggcccggttggcccgccggattcggctggctcggctggctctggttgggctggcccgtctggccattccactgaccctcgtttggattgctcatcgtaactccttaactcaaggtccatattcaggttccacataccatgttaggcaagttacctaatttgaaccatcactacagttaggcaatccgtctagttcactgacagcgcaatacccataacgcaatatctgcatcaccaacgcttctcccccgccgcgattaggcttagggccatgaccaacgaaaccgaaacgctgacgtcgggcatcgacccggcatcgttctcctccgtcatcaagccgaccaatgacctgttccgctacgtgaatggtccatggatcgacacctaccgcctacccgacgatcgttcgcgctacggctccttcgacaagctcgccgaagacgccgaaaaccaagtgcgcgacatcctcgacgccgacgactgcccggccaccaaatcgcaggctctgtatcattcgttcctgaacaccgacgccatcgaggccgccggccttgacccgatccgcgatgagcttgacctcatcgattccgccatcgacaaggccgctctcacgcgcgtgctcggcaccatcaacccagccggcggccccgacctgttcggcttggccgtttacggcgaccccggcgacccggaccgcaatatcgcccaccttgagcaggccggcctttgcctgccggacgaagcctactatcgtgaggaccactacgtccccgtgcgcgaagcatacgtggcgatggtcgccacccagctggtgaacgccgggtacgcgcccgccgccgaatccaacggtggcgatgaactgccggccaacaccggcgatgacgagagcaatgctcccaccacggttcccagcgaagccgcacttgatatggcccgacacttccttgccgtggaaaccaagatcgccgccaatcattgggacaatgtggccacgcgcgattcggtgaagacctacaaccccaccgattacgccgatttggccgccacgctgaagaacttcgatctcggttcctggatcgacgcctggcagaccgcctatgacgccaccgaggctgccaaggctcagccgatcgatttcaagtctgtgttcgcgcgcgtcattgtgcacgagccgagcttcctcactggtcttgatgcgttctgggccgaggccgatctggccgaccttaagctgtgggcccgtgttcacatgattctgggcttcgcctcctccctgtctcgcgacttcgacaccaccaactttgacttctacggcaaggtgctctccggtgccaagaagcagcgcgatcgttggaagcgcgcggtgagcctggtcaacggcgtctgcggtgaagatgtgggccgcgagtatgtgcgcctgcacttccccgaaagctcgaagcgccgcatggaagagctggtcgccaatctgattgacgcctaccgcgtgtccatcaccaattccgattggctgggcgaagacaccaaggccaaggctctggagaagatctccaagttcacgccaaagatcggctacaccaaccactggcgcgattactcggcactgagtgtctccgcggatgcgctgcccgccgagaacgccaaggccgcgaacctgtacgagaccggctaccagctggccaaggtcggcaaggcggtcgacaaggacgaatggctgatgaatccgcagacggtgaacgcctactacgagccgagcatgaacgtcatcgtgttcccggccgcgattctgcagcccccgttcttcgacccgaaggccgaggatgcggcgaattatggcggcatcggcgcagtgatcggacacgagatcggccatggcttcgacgatcagggttcgcagtacgacggcgacggcaagctcaacaactggtggaccgacgaggatcgcaagaacttcgaggcccgcaccggcgcattgatcgcccagtacaacagctttgtgccgctgcagctggcagagaaatacgctgacgagcctgataaggcgccgcacgtgaacggcgcgctgaccatcggcgagaacatcggcgatttgggcggcgtgaacatcgcgctcaaggcgtatgcattcgcgctcggcaaggcggcaggtaagcccgacgccaaagaaaacggctcccccgccgccatcaaggcactgttcgataccgcccccgaaatggacggattcaccggcctgcagcgcttcttcctgagctacgcctccatctggcgcaccaagaaccgcgacgagctggccgaacagtacctgcagatcgacccgcattctccagccgaattccgcaccaacggcatcgccagcaacgtggacctcttctacgatgcctttggcgtgaccgaaggcgacgccatgtggctcgcgcccaaggaccgtgtgagcatttggtaatccccgttatgtaagagaaaaccgctgtgcttgcctcgattacaggcgaacacagcggtttttcatgatgtatggttggcactcagaattcggattcgctgggatcggaagattcggcgaaaccgtcgacgtaggtttgttgggctgcggactgtggctgattagcgccagcgtccggttgcgacatgacggcatcggccatggacgcagccgctgactcggttgatggcgacggcgattggccggaatcggaggtgaccccaaattcgacggggccagattccgacgaggtcgcatacgggtccatacccacaccggatgcggcaccgcccgcgccatattgcattggcctaacgtacggcgacgatgctcgttgcccgtttccgccatccatgccttcggcggcaccattggcattgccgttaccgttgccaccattgcctccgttaccattaccggcacgctgtggcttgatcagcgacgtggtgccgaaggtcaggtcatgcccaatgttggtggcttcgagaacggttctgctgcgcggttcgccttgctcattggtccactgctcggtgatgagtgagccgaccacaatgatgcggtcaccgcggcgaaccgaactggcggcgttcacggccaaagcacggaacgctttgacgcccacccatgcggttccgtaatcctcccattgtctggtagtcgggttgagtcgactgcgcgtgctgcccatacggaatgtcagcacgcggaaactctcagttccgcctagtgtcggatcaccggccacaaagccggtgacggtcactgctgcttgttgatttgccatgatcggtcctttcctcggcctgctggcctgttgtttggatgtggaccgccggagcctgtctccggcttcattgccggcttgcacgccccagcggtacctccactgtgaggcatgacgtttgaagtgcacaagggcaactggcaaatgtggatactgtgacgcagttgaaattttaagaatgtggataagtttcggttatccacaacaaagcgccattctgcgactgggcagaatggcgcttgatgcgattaacgccgaggctgagtaagtgggactcagctgagggcggcgaagcgctcggcgagcgcgtcggcggcttcggcggcgggcacggcgaccttgttttcgccgttgcggtcgcgcagttcgatggtgccgtcgttgacgtaatcgcggccgaccacggcgaccagcggcacgccgatcagctcggcatccttgaacttgacgcccggagacaccttcttgcggtcatcgtaaataacctcaaggcccttggcctcaagctcggcgaccagcttctcggcaccttcaaacgccgcagcgtccttgccggtggccaccacgtgcacggcagccggggcaatcacggacggccaagccaagccggcttcgtcgtggtgtgtttcggcgatgcaggccagcacgcgggaaacaccgatgccatagcagcccatccacaccggcacggccttgccgttctggtcgagcaccttcaggtccagtgccttggagtacttgagacccagctggaacacctggccgatttccacaccacgctcgaagctcaacggaccggaaccgtccgggctcatgtcgccgtggcgaacctcaacggcttccaccacgccgtcggccttgaagtcacggccgtacaccaggttgtagtagtcgacctcgttctcatcggcaccagtgaaccaagcggaacccttgaccacgtgcgcgtcgaccaggtagcgaaccgggttcttcacgccagcagcctcggcctgcgggccaagcaccatcggtccgatgtagcctggcaccagttcggggtgctgcttcaggtcttcttcagtggcctcctcaagctcggcgggagcgaactgggcttccagtcgcttcatatccaccgtacggtcgccgggcacgccgacgacaatcacttcacgccacggctcgtcatgctcttcatcctcagggtgcttgacggtaatcaccacgttcttgaggatgtcggaagcctgccattcacggccatcagtacgcgggtggtcggcgttggcacgctcgatcatgttatcgatggtcttggcatccggggtggcttccttggaagcggcgggagtggcggaagcatcgatttccggcagctccggagtgctcagggcctccacattccatgccttgccggaaggtgccagtgcgaaggtatcttcgccgatcggcatcggagccaggaattcctcggatgcggagccgcccatcgggccggacatggcgaacacaggtacgtacttcaggtcgaggcgctggaagatacgctcgtaggcgccgcgctcgtcatagtaggccttgcgcatgccttcttcatcgatggtgaaggagtaggcgtccttcatgatgaattcacgaccacggatcaggccggcacgcggacggaactcgtcgcggtacttggtctggatctggtacagggtgacgggcaggtctttgtaagaggagtacatgtccttgaccagaagggtgaacatctcctcgtgggtgggggccagcaggtaatcggcctcgtggcgatcc

SEQ ID NO: 552 - DNA, 4237 bp, Unknown
  R48_24m  MAG No. k141_73461
ccgactgatgctgtggggcgtggaacgcgccatcgtcggcttcagcaacatcggtgccgacaccaacgtgcagcacaagctccacgtggtgctgcccggctccccgaaccgcggcgtattcggcggcgacggtgcctacggcgaagtcaagagcgcctttgacgccatcgtcaaccgtgcccgcgctgaaaaggtgtggtcgagccgcgtcaccttcgctcacccgaagatcggctgggtgcgtggcaccggcctgatgggcggcaacgatccgctggtcgccgtcgttgagcgtcacggcatccacacctactccaccgcgcagattgcggccaagctgctcgacctgtgcactgccgaatcgcgcgagcaggccctcaaggccccgctcgatgtggacctgaccggtggcctcggctccgagcccatcgacatcaaggccctgcgtgccgaagccatggccgacgtcgagaaggaagctgctgcggcctcgtctcaggaaacggatggctccgtcgccggacagtccactggactgtctgactcctcgcgtgggcagcaaatcaaggcgctgcccaccccgatcgtcaccaagcaggcttcggtcgaccttgccgactggaccaacgtcaccgccaagccgaaagacgaaatcgtcatcgtttccgtcggtgagctgggcccgtggggctccggtcgtacgcgcacccaggccgagctcggcatccactcggatggcactgtcgacctgagcgccggcgcagtgctcgaacttgcgtggaacatgggtctgctgacttgggccgacagcccgaagcccggctggtacgacaccgacggcaacctcgtgcccgaagaggacatcgccgagcgctaccacgacgaggtcgtggcccgctccggcatccgcccgttcgaggaaggcatgggcaacgactacaaggacggtgctgacgaagaagaagccgaggtcttcctcgaccacgacgtcaccttctctgtgcccacccgcgaagtcgccgccgaatacgtcaagttggacgaggctcacaccaccatcgccccggatgaggaatccggcgaatggaacgtgacccgccacgccggctcgatgatccgcgtgccgcgccgcgccaccatgacccgcacagtcggcggccagttcccgaagggcttcgacccgacccgatggggcattcccgcctcgatggtcggcgacgtcgacaagatcgccctgtggaacatcgtcaccactgtggacgcctacctgggcgccggcttcaccccggccgaaatcctcgagtccatccacccctcgctggtggcttcgacccagggcaccggctttggcggcatgatgtcgatgcgcaagctgtacctcgaccgcttcctcaaccacgagatcccgaccgacatcctgcaggaggccctgccgaatgtggtcgcggctcacgtgatgcagtcctacatcggcggttacggcaacatgatccagcccgtctccgcctgcgccaccgcggccgtctcccttgaagagggcgtcgacaagatcgccctcggcaaggccgacttcgtggtcaccggtgcgatcgacgacatcggcgtggaatccgtgatcggcttcggcaacatgaacgccaccgccaactcggaggaaatgtacggcaagggcatcgacgcgcgcttcttcagccgcgcgaacgatcgtcgccgtggcggcttcctggaatcccagggcggcggcacgatcctcgtgacccgcggtgacatcgccgaaaagctcggcctgccggtcgcggccgtggtcggcttcatccactcctacgcggatggtgcccacacctcgatcccggctccgggcctcggtgccctggctgccggcctcggtggcaaggactccaagctcgtgcacgacctggctaagctcggcgtctcagccgacgacatcgccgtggtctccaagcacgacacgtccaccaacgccaacgacccgaacgaatccgagctgcacaacacgctggcccacgccatcggccgtaccgacggcaacccgctgttcgtgatctcgcagaagacgcttaccggccacgccaagggtggtgcctgcatcttccaggtcaacggtctgacgcagctgttcaagtccggcgtgattccggcgaacgcagcgctcgattgcgtggatccgaagctccagcgcgacgatcacatggtctgggttaggaagcccctgcgcatcggcggtggcgaggacgagttcggtcgcgagaccgctggtcgcccggtcaaggccggtctggccacctcgctcggcttcggacatgtttccggcttcgtggccctggttcatccgggtgccttcgaagcggccgtggccaaggccgatggcgaggccgcgctggaagcctggcgtgagcgtgccaacgcccgcctggccgccggccagcgtcacctcgaggaaggcatgatgggtcgcgccgcgctctacgagccgatcgacaaccgtcgcttccgcgaggatcaccgtggctacgaccaccacgaggtcgaaaaggcgatgctcctcaacccggacgcccgcctcggtgccgacggctactacgaggcctgattcctctggctcccctcggttgatgggagccagtagcgcaccggatctcggctcccctctttgaggggagctcccgcgaagcgggtgaggggagtttcccctggagctttctcgctggcacaaactcagtgagagaaatatgcagaacatacgaaagcccctccctcggagtgagctttctgcgtttcaaggggctgatttggcattcgccggaggtctacttccgtttcaaggggctgttgcccaagtagacaaggcgtaaaaacggcggaatggcgttggcgttatgctgcggatactcgtggtatggaggatgaccagccccttgaaacggaagtagacctccggaacggtcaaaatccgcccctcgaaacggagatagacctccggggcggggcgcggatgtttttttggacggctaggcagccagcccaagatgtttgcggtattgcgcgaggtcatccagcatagtgaatcttttccccctgaaatggaaatcaggccccaattctgatgaggtgtagagattacgcgcgaagcggtacacaatgggaagcatgaatacttgtggtttggggcatgacgtggtggatgtggccgcattcgccgaacagttggcggagccggggtctcgcatgcgtgcgctgttctccgtgcgtgagatgcggcaggcatccgaccgcgcgcgccagaagaatgacggggaagccgtccatctggccgccaaatgggcgggcaaggaggcgttcctcaaagcctggtgcgattatcttggcgatgccccctatccgttcacgcttgataatttcccgtggcctgaaatcgagatcttggacgattcccgtggtgtgccgcatgtgtctctgggtaagggggcggcgtcagtcttccaaactgattacgcgaattcggctgccggcgctcgctattcctctgcttattcccctgcttccgataacgggccttatgcagtgatgcaggagcggcggaatgcgcgttcggcgcagcgctcgactctcggtgcggggtcgatgccgcatatccatatttccctgagccacgatggtccgattgcctcagcggtggtgacgatttctgtggaatagcgtccgaggcccccgagtgctacatgctgtacaacgtctccatcatggttaacctgtggagcgcgctcaccggccgcgacgtgcgcctgctcaagaaccggatcgacaagctcgactcgctgcccgaaaactgctggttcgtgattctgaatgcgatgggcgccgacctccaaccatacgagtcccagctcatccatttgtgatttcgacggtttccagcgcccctctttgaagggagctgtcgccgtaggcgactgaggggagtcctcggcaaagccacaatccatcaactagattggctggtcctgctgcagccacacgcgtttgccatccccgaagaaatatgtataataactcaagtcgccaaaagcgacgcttaacgcggatgtagctcaatggtagagcctcagtcttccaaactgattacgcgggttcgattcccgtcatccgctccactatttatatgttggtgtatctaattgggaataccggaagggtgagctaccccgagtagtattag

SEQ ID NO: 553 - DNA, 12533 bp, Unknown
  R48_24m  MAG No. k141_73575
caacacaatccggcccgacgaccatcaaaggtcgtcgggcctgattcatacgcgctgtcggaataacggcgtccggacttcatacggaatggcgcattattgcgattcttcttggaatggcggcggttcgggccttccgtgttgccgtatttggcgatcatgcggcgttcgtgacgcttggcaccttctgaacgctcgtcgcgtacgatgcggttctcgttcttgtgatggatgcgcttgtcgaattttccgcccttgccgtaccgatcattgcgacggttcttgccgtactcgttgcggccatcgtcctggcgctcgtcgtaacggtttttgccgtatccgccgcgacggccgcccttacggcggtcatcgccatgctcgaacagatagtcgcggcgctcggcctcggggtcgctcatgccggcgcggcgttccgcacggttgcggttcttcttcacggccttcttgctggccttgtcgccgtgcttgcgctgcggctcgccttcggcaacaaactcgccgcctgcgttctcgtgctggaatccggtctcggcaacgttctgctcggcgcggtcgcgattgcgattgtgcttgcgcctgccgctgcggccggactcatcgcccgccgcgttcttggcgcccctgttcttgcccttgcgcgggttgcccacgggctgcgacttgtcgaggctccaaccatccacgcgctcggcgcggtcgcccacaagctcaagcacttcgggcgaatcgtgggtcacttcgatcatcttggttttgatgccggcctggttcagtaagcggcgcgtctcgcggcgctgctcgggcagcacgagggtgaccacgtcgcccgccttgccggcgcgggcggtacgaccggagcggtgtacaaaggacttcgggtcagccggcggctcgacctgcaccacaagctccacgccgccgacgtctatgccacgggcggccacgtcagtggccaccatgacgcgcacgtcgccggaatcgaatgcggcgaggttgcgatcacgctggttctggttcaggttgccgtgcagctcggcggccggaatgccgttctgcgtcaggttcttggcgagcttcttggcctggaacttggtgcgggtgaacaggatgcgacggccttcgcccgaggcgagcacgcgcacgagttcgtgcttgtcgccgcgcgtggtctcgaacacgtggtgggtcatcaggtcaggttcggtggtggccgaatcgacctcgtgcaccttgggatcatgcaggaaggtgttcaccacttcatccacgccgtgatcgagcgtggcggagaacagcatgtgctgggcgtcgggcgaaatctgctcaagcagtcgcttgaccggcggcaggaagcccatatcggccatttcatcggcctcatcgatgaccacgacttcgacggacgagagcgtgagcgcctgctggcgcagcaggtcctcaaggcggcccgggcaggcgaccacgatatcggcgccggccttcagatcgcggatctggtggatgtacttgacgccgccgtacaccgtggtggtgttcatgccgaacgtatgggccagcggcatcagcacgtcgttgatctggttcgcgagctcgcgggtgggggccagcaccaggccgcgcgggtgcggcaggaagtcgccggcgcagcgctcttccaagctggccttcttgcgacgcttgatttccttgcggaactcctccatcgcgatttcgccaagcgaatcataggagccaagccgggtgaccagcggaatggagaaggcgagggttttgccggagccggtgcgccctcggccgagaatgtcgcggccggccagtgaatcgggcagggtgtcggcctgaatggggaatgcggtcttcttgtcatctgccgcaagtacgcgcaccagcggtccgggtacgccaagttcgccaaaggtaagggggcgggattccgcgctgtcgttcatctggaaatcagcggaatcgtcacgatcatcgaaattattacggggcacagtggcctttcatgtcaaaggttacgcaaattacgcaagctttccgagcttagcgtaagccccctactttgcttgatgctcgccacgctgtcattccactctttacttatgaccccatggggcggtaactcgcccatgaggcggtaactcgcccatgaggcggtaactcgcccatgaggcggcaacttgcccatggggcggtttgaagaaattgtgaaaccgcagaataaagccattttcgtctaccgccccatgagggttttaccaccccatgggatgtttgccgccccatgggccaattaccgccccatgggttctaccaccacgtaaggcgagcaccgccccatggaacacgcaaatggcccctacccgtgaaggtagaagccattgtgcaaaagggctgagccacaatacggcccagtagccctaaaacacactacaaaatatccggatcgtctttggcgatagtgccggttgccttgccaatggccttcaggccgtggtaggccacaagaatcacgatcgtgccaatggcaatgccgttgaaggaaatgccaccaacagtgaacgcgaattggccgatggcaataatcatggtgatggctgccaccatgatgttcagcggcttgtcgaagttgaccttgttctcaacccagatgcggatgccgatcatgccgatcatgccgtacagcagcgtggtcacgccgccgagcactccggcggggatcgtgttgatcacggcgccgaacttcgggcacaggctcaggatcagggcgaaggcggctgcacaccagtaggcggcggtggagtacaccttggtggcggccatcacgccgatgttctcgccgtaggtggtggtgccggagccgccgccgaagccggcgagcgtggtgcccaggccgtcggccatgagggcggtgccgatctggttgtcgtagtcgcggccggtcatctgggccacggacttgacatggccgacgttctcagccacaagcacgagcacaacagggacgaacatgggaaggatggaaaaatcggcctgcggcaggtggaacttcgggaagccgatccatgcggcgtcaccgatggcggagaagtcgacctggccgcggatgcaggcatatacatagccgatgattacgccgaccaaaatgttgaggcgacccagcaagcccttgaacagcacggccacgagcagcacggccagcagggtaaccagtgcggtgtccggcgcggcttggaagttggtccacacggaaggtgccagattgaaaccgatgatggccacaatcgcgccgttgaccacgggcggcatgatgatgtcgatccatttggagccggcgtaatgcacgagcacgccaatcagggccagcagaataccggtgaccatgatgccgaagctggcgaccgcaatgcccttgttggcggtggtgaccgcggtgatcggtgcgatgaagccgaaggacgagcccaaatagctcggcagcacgttcctgttgataagcaggaacagtgcggtggacatagccgtgaagaacagggtggtggacgggtcgaagcccgtcagaatcggcactaggaaggtggcaccgaacatggcgatgacgtgctgtgcgccgataccggcggtgcgcacccaagtcagacgttcatcgggctcgacgacctcgccgggcgccagcgtcttgccgtcgccatgcaattgccattggaagatattggacattactactctcctcgctctcgcttggggcacggcattcacaaccagccgcactacgcgccattctagctcacgaagattttgtgaagtctctcttccgggaaaggctatttgccgtaatactccagcaggtgcggatcgacggcctgcaccacatccaccaaatcgccattggagagatacgggcgcttgaattcgcgccacggctccaccttgacctcccagcggccggtcgtctcgtcgagcacgggccgggcggtctgctcccagcgcacacgcttggaggtgcggccggtttccgggtcgcggcgcgtgtagtgcaggcaggtgcagttggtgatcttccagtcgtccgagtcggcgcgatgcaggaattcctcgtcggccagatcctcgatggtgagcatcagggcgagcatgaagtcgccgtgggtgaccatgaccacggattccgaatcggatttgcggctcagcgaggtcaggatgttgtgcacacggtcctcggccacatcggcaatcgactcgcctgccggcggacgccagtacagcggatcggtattcttgaagttccagttgcgtgcgtagttgtttttgaattcgtccttggtgatggtgttgatttcaccccaagaacgttcgcgcagcacacggttctcctcccatttggccttgggcagggccatggtggccgcggtttcgcgggtgcgcacgtatggcgagaccatgtaacggtcgaacagctgctgctggctgacgagccagcgtccgatgcagtcggcctgcttgcgtccggtggcggtgagtctccaggagcggtcgggtacggtgacgttgtcctgcgtatacagggagttgtcgccctgttcgcccgcctggacgatgacgttcgcttcggattcgccatgccggattacgtatagatcgagcggcatgctcatatggattcctctttcgttattggttacgttgtgttgttttctgctgtttcctacttgacctgcgtaatggtgttccccttgaccatgaacgcatgccgggccatgtcgatcatcggctgatcgaacttggagtcggtgtagaactcgtcgatgacggcgtccggaccgtacagttcgcggaaccgtttggtcttgttggtgttgaagttgaggtacgtgaccttcatcgtctccacatccacctcgctggccacgagattcctcacgccgagtctgcggcaggcctcccccaccgccagaccgaaggatgcggtgaggatcacatcgtccgactcaggctggtaccaaggcttgatacgtgcgtaatatcggtcccagaagtcgtccacgagctgttcgacgctcgccacccgtttggatcggctcagttccgtgagatagccttcggtcatcttgcccacgccgtattccatttgttcaagcgtggcccggccaagcttgtatttgaccgcgtaccgcagcacgggggcgatatagcggaacactttcgggtcgtggcgggcggaatacaggtacaagtcgaacaggctttcgccatcatagatggttccgtcgaaatcgaatacgcgcataccttctgcttctactctgttattccttgtctaaggctaatctcggtaagccggcgaaagcgcaaatacgcagtgaatttcacatgaacactgttttttggattgatttcggtacaggtaacgtacactggtgacagcgtggaaggaggtgcgtaatggcggcgtctgaaatcgaacaatggtggattgataagtttcaggagaacctgggtccgattcgcaaggtagccggatggacgactcagcaactggccgacgagctgggagtcgcgcgacagacggtgtctaacttggagaccggcaaaagcccgatgaccaaactgcagtatctcgctttacgtacggtgttcagcgccgagatcgcacgtcgtgaagaccgcgatctggcacgcatcatcaagactttggtcgacgatcccattgagcaacgcattcgcgaacggcgcgcccaagagcaggacggcgaggccgttgccgacaatgccccagtcaatacggacggtggcaacgctgccgacaatgccattgccgagaaacgcaagcccagtgccgccacattgaaggcttcaaagactgccgcaacgggcaagcccacgctcagcacggcgatgcaggctcttgccgtcatcaccggcgcattggccagtggaaccgccgccggcatcatcacttacttgatgttcccggacggcggcccgaacaagcgctgagtcgccgaaatatcgaatccgttactcgcaggccacgccatcgtgatcgcggtccaacttgccgttgtatccaggctgcccttgatacaacggagcagcaccagccgcacggacttcagagcaattcgcataatgcacattttgctgcgcttgctgttgctgttgtgcctgtcgagcggcctcctcagcttgccgctgggcctcggcctgcgcggcagcctgttcttcagcggcctttcttgcagcctcttcttcagctgccttcttggcggctgcctcttcagctgccttcttggcggctgcctcttcagctgctttcttctcctcagctaccttcttcgcttcttcctcctgcgctatatcgctggctttacgaacattgataacaggcttgtccccatcttccacggattgaacaacccagttcgaagctctgagcaccattttgtccgtgtcgcttttcacctcataatcagaggaggaaaaaccggcatccttgagctcgtctttcacatcggccagcgaacgccctttcttggcgatggcgataattttcgaatatgtggattcctccttgccgtccgcaccgtcagaagaccccgagcatccagcaagcacaagacccagaaccatcataagaatcacggtcaacgcccaaaccgcacgattgacacgcttcatgttcccgaaacgaaccctgttgttcaacattattctctcccttgtagtcgcagatctgcggatggtcggaaccacgtcaatgtgaatccaaccatcctgataattactgcttattcaatgatatattcatccattgttttcgccgatatatcgcaccagcgtttccctcattatcaactatttcgagttgcatgaatgcgccgtttataggccaagaatttcgtgcttttttgcatcaaattcttcttgggagagaatgccgatatcaaccaattccttcaattttttcatcgcctcgacttgttcttccacagacatggatgccgtgtgagcggcgggagcagcggcttccggtgccggcgcaggcgccggcgcttgaaccggggcggccgtcataggattaatggcttgtgccatattcatgcccagcaacatgccaccatcgccaaagccgttgtcttggatgccttgcgcaatgcgctgctgggcagccatattgccagcttgctgggaaacgccctcgtatgcggcaacattcatcttattcgaggcgaactgctgcacgagttgacgtgattgctcggtgaactcgatactttcgatgcccacactggacacttcaaagccaaaacgatcattccacgtacccgcattggcccgatcgccacgcacgcatgccgcgatgtcattcgtcttgccgggcaattgcgaaatacgatattcattggacaacgaattgatggccacaataaacgactgtacgaattcagacagaatctgcctacgtggcccttcatcatcgaatgaatacgacacggtagtggcaggcacaaagttacgaacgaatcgaactggatcagtgacctttagcgacatggatccgcgtgcgcgaatttccaaatcgacgccatagaaccggtcgttatacaccagcggcgcagaagtgccgaatttgatgccacgaatctcacgcaggttgacgaaggccacatatttggtgcggccaggctgacctccgaaggtgaatcgatcggcaacctgattgaagaacgatccgatgccgtctccggcgagcacgctctgctccccgttgcgatattcataaccgcccgactcggtgatgacgttttcgatacctgtttcagagaaaatgaacgccgcagtattctctggcacatagatacgcgaaccattggtgattattccctcggaaccgtattcattcgaaccgcgatcgttgttgcttccgcggggaatgcccggcacaacgacggtgtgttccgtgaacggaccagcggtgatgatatcacgccacaggtccgcgaatgtaccgccgagcgcgccggcgaacgccttaataactgccatctgttttttcctcgatatctcatgcatatggccgatcttgcgactatgcaatcgcaagaccggccgttatgctggcatgttggttatagctgcgtttcgcgatcgcagtattcgcatcgaacgacttctttgcgatgaccggaaagcggagcgccacaaccttcgcaattcaccgaaaccacgggttcggtaatcccaagcccactacggaatgcgccaaaagtgtctttcagggtcccggccagagcctccgttccggggatggccttgttgaagaccggctcatccattggcgtgtactgtctgccgcgtatacccatgtatcgtcatcgttcctttcttggaaaaccgttacctcgatacgccagtctgatcactggcccaccgatgcgagcttctgcgtgcatcgagtcatgacctcggtgtagtaggccgaatcctcactgctgagggagttttcgtcaatggcgtctaccttctgggagaactcagagtaacgcttcatcatgctggcatagtcggtagccatgctgaccacgttgtcggatttctgatatttgttcatgaagtcaacatactcatcgataaaggcctcgtagctgtccatcgtggacttgaagtcagcactgtcattggtgttctgctgcgccttctgatccgaagactggtcgctctgcttgttggcatcgctggaatcagtgcccgtatcagtgctcttatcatcctgcttcgcggcgtcgccgtccgtagacgtatcttccttcttttccggaacctggatagtgatggacatgatggtctcgtcgtcagtgttacgagaaacgctcacactgtatccatcggcgttcttggcattgaaactgtcagcggacttgctatagtccacggtgaaaccgttgtcttgcacggacttgacgtagtcggcatactgcttggcgtcggtatcgcacacctcgatgtggaagtagtccgaagactcacttctaatttcaccctttgtggatttcggctgcggcagcagcgccgcgatatccgactccggccatgaatatgcttcgcacttggtggcgagcgatgcttccaattccgcccgatcagccttggccttcgcatcgtcacgaattacgaacacgccaccgattaccagacccacaacggtgataccgactgccacccaggccagcactcggccttgcaccttgccactcgggcgggtcacgtatacggcgaagcctgagagcagtgccggaatcaccgtggcgaacagcagtccgccccaggatcggccagaaacatccacaaattgggcgagtacgaacaacactccccaaataatggcgaacacagccagcttggaagtcttcttcaccccttgtgcattcggatcaatcacggcaggcgcagcggcaccagcaaaaccagtggcagcaccggcaccatgtgtggcgggtgcaggagccacaccaatacgcttgtccagagcggcgaggaactcatcaacgcgcttggcgctttcgtttccagtcgcctccagacgaatggcggcccctgccgcaccctgcgggactacggttagcgtgcagttcaccccatcataggagtggaaggaaaacgctccggtctgggtgttttcgttatccaaggtaaacgtggcgccagtagtcagctggtcgtgaataacttggaacagctgttgcggactgaccgcatatacacgatcaaatggcgcgccggcgggccgctgcgatgccgtagccggagtcatcggagtggtggtagcaccatcagacgctacgttcggttggccagccggtacagtattcggcacggtaggcgcattcgcgcgatcttccggtgcgtcattcgtgccttcggacggtggaaccggctgaggttgttgatcaaatggcgttgtcatgatgcccttctttccttaagcagcagcattaccagcacagaagaggcaagcccggcaaccgttacggtcaatccgactgccatggcaagccggtatcgttcgctcatcattgcgtcccttcttattgctcgctttgctctgcgatacatcgaaaccagtgtatggcgttgttattatgtacgcaaattagcattttgtatgcatattagctttattgtcgatgcttgataccgcgcatgaacatcctttccgccaccgcacctacacggatggcatcgaccattgtcggcgacacgcgcgggccatacatcagctgacaactgaatttttcggcgtgtttccgaaaagtcggcgtcctgtacgctgggaatcgagcaaccgcgtacgatggcgcagcacagcacccgcaacacagcgacaaggagcatgggcaatggcagacatccccgaagaacatttgaccgaggaactgttggatcggctgctcgccagcgccagcattgagcagtatctcgatgagggactcgtcagcgcacgcacgctgaccgactatctgttcgaccgtatggaagcccatgacctgagacgagccgacgtggtgcgggcatccggcctcaacgccacagtggtttatgacattttctccggcaaaagccgccccggccgagatcacgccattatgctggctcttggtctcaagtgcacattacgtgaaacccaacggctacttcgtcttgcaggcgtttccgaactgtggtgcaaacagcgacgcgacgcgattatcatctggtgtatacgcaatggattcgaccgcatcgccacggacgacgagttgtatcgtatgggagagacgacgttgctaccggccgattgacgacattcggcccaacaacactcaccagtgagacgcaagtaagagggcatcaaggagagacatggacgataagcaggcgatgcatgcgatgagcatcgacgatgcgtaccatgtcgagcgtacgctcgctcgcggaccttccggcgtcaccgaactggtgagcattgacggcaacggcccgttcgtacgcaagaagattccctctcccctagcgcaacgcaatgtgtgggcggcgctcagcgcctgccagagtaatcgtctgccgcgtgtggaagcgacgtacgagctgcccgaccggttcgtcatcgtctacgattacgtgccgggcagcacgcttgcgcaaattgcggaggaaaacgggcggcttgcaccgaatgtggccgtgcagcttatcgaccaaatttgcgaagccgtgcaggagcttcaccagcacggcgttatccaccgcgacatcacgccggccaacatcatcgtggcccaggatggcgcgcatctcatcgatttcggcatcgcgcgcatccggtcagaggcaagcaaccgttcacgggataccacggcgcttggcacctacggattcgcctcgcctgagcaatatggctttgccaaaaccgacgcgcgttccgacgtattctcgctgggccggctactcggattcatgctgaccggcgtatatcccgatgccagcgactacgagcagcgacttgccgatgatgccgcagtaccggctcgactacgcgccgtcatcggctatgcgtgcgcattcgagcccagcaaacggccacagagcgtccaagagtttcgccaggcgctgttctcccagtccaatccgcccataccgaacgcatcatcggcaaatccgccatcaacgagaacaacgaacggcagcgcgtcggcgtctcgactattccggcgtctgcacttgagcaaacgcgccatcgtgctgtggtccattgccggagcggcactgataatcgccgccattgcgggaggcattgtgttggcaggccaacttggcattatcgggtcggcaacatcacccgattcctcgacccaatccagcagccaatcaaccgataaggccgatggcgggcactcctcgaacgggtcaggaaccgacaatgccaatggcacgggcggagtaggcggcactgacggcgctgatggagacaatcgagacaccgtcaccgacaatcctctgaaaatagtggaatccggctggtcggcggaccagcaagggtatgtccactacgctttcgccctgcgcaacaccagtaagacccagcaggtgcagtatccgcagattaccattacggggcgggccaaagacggttccatcgtgttctcgcagacgcaagcactgaatatggcattcccgaatcagactgtatatgacgccggtcaagcaggcgaaggcaccgccccagaaacggttgattttactgtgctcaatccggatacatacaacgtcgccaaggctcagggaaccgccgccttccccatcagtggaatatccaaaatagacaacagggacggcggcacgacgttcaatggcgaggtccgcgccgtggcagatggattcaagccatctgatggacagcaaatcaagatttccctagtactgcgtaacgcacagaacgcaatcatctatggagatatcgcattcgtggattg

SEQ ID NO: 554 - DNA, 3775 bp, Unknown
  R48_24m  MAG No. k141_74086
cgacatcacccgcccgaaccaggcggtcgccaaccgtgtggtcggcgacgtcgccggccaggactgcgtgcttgtcgatgacctgatcgacaccgccggtaccatcgcgggcgcatgccacgtgctgcaggacgcgggagccaagtcggtgaccgtggtcgccacgcatggcgtgctctccggcccggccatcgagcggctcaagaactgcggtgcgcgcgaggtcgtgctgaccgacaccgtgccgattcccgaggaaaagcgctgggatggcttgaccgtcctgtcgatcgccccgctgctggccagcgccatccgcgccgtattcgaggacggctcggtcgccgaactgttcgacacctaccccgagcaccacggtcaaggcttcctgttcgcctgatcacgtgcgtgtttgttcaaggaaagcacatgatgcgagacgcgacatggcgtagtctttcggtaaataccgacagtatggtataaatgaacacttgtgggccgaaagcccacgactcccccatggtgtaatggcagcacacgggtctttggaaccctttgtcttggttcgagtccaggtgggggaacggctgacggccgctcgacatccgggcggccgtctattgttttgaggtgtttccaccctcaatagacattccgatcgaagggaatacgtcagttatggcattatccgcagccatcgtcctcgccgccggcgagggtacccgcatgcgttccaacaagccgaaggtgctgcatacttttgcaggcaagaccttcctgaacagggtcatggattcggtgaccgccctgaaccccgacacgctggccgtggtcgtgcacttccaggccgagcgcgtcgccgaagccgcccgctcctatgacgagcaggtcaccatcgtgaaccaggacgacattcccggtaccggtcgcgccgtgcagtgcgcaatggcacagctcaccgaggctggcaaggtcgatggcccggtgctgatcgccgcctccgacatgccgctgctcgacagcgagacgctgcaccgcttggtcgaattccacaccgcctccggcaacggcgccaccgtgctcaccaccatcctcgatgacccgaccggctacggccgcatcatccgcgatcgcgaaggcaacgtgctgcgcatcgtcgagcagaaggacgccaaccgcagcgaactcgccgtgcaggaagtgaacacctcggtctacgtgttcgaggcttccgtgcttaccgaggcaatcgccggactgaagtcgaacaacgcgcagggtgagttctatctgaccgacgcgctggaaaccgccaaggccgctggcaaggtcggcgcgttcgccgctccggatccgctcaccgtcgaaggcgtgaacgaccgcgtgcagctggccgcgctgtccaagacctacaaccgccgcgtctgcgagcgctggatgcgcgacggcgtgaccattcttgacccggaaaccacttggatcgaggacgatgtccagatcggccgcgacgccaccatcctgcccggttccttcctgcaaggccacacggtggtcggcgaggacgccatcgtcggcccgtacaccaccctcattgacacaaccgtggacgaaggtgccgtggtcgagcgttcccgcgtgcaggaatcgcacatcggcgcacgcacgaacatcggcccgtggacctacctgcgcccgggcaacgagttcggcgaggatgccaaggccggcgcgttcgtcgaaatgaagaaggcgcacatcggcaacggcaccaaggtgccgcacctgagctacgtgggcgacgcccagctcggcgaccacaccaacatcggcggcggcaccatcaccgccaactatgacggtgtgcacaagaatcgcaccaccatcggctctggctgccatgtgggcgccggcaacctgttcgtggccccggtcgaggtcggcgacaacgtgaccaccggtgccggctccgtggtgcgccacgccgtgccgagcgacacgatggtctactccgagaacacgcagcacaacgtcgagggctggaagcccgcctgggagcgctgaaccatgcccgcacttcaggattccatcaacgccgtccgcgtggccgccgaggccgcagaccgtatcaaggccaccgacattgtggccttcgacgtagccgacctgctcggcatcaccgacatcatgatgatcgccggcgcctccaacgagcgtcaggtactggccgtggccgaggaaatcgaaaaggacctgttccttaagtgctccggccgtcagccgcgctctcgcgagggcctgaccgagggccagtgggtgctgcttgactacggtgatttcgtgattcatgtcatgcacgaggaatcgcgcgaattctacgggctcgaacgactctggcgcgactgcccggccatcgatcttgaactcgcacacccggaaacggcggagcatgcggacgctgctgccgtcaccaccgcgtaacgtgcgaatcacataacgctgatattcgctgatactcgctgatactcgtgtgtcgggctgcctgttgccgaacgtcattgacggcaccaggcagccctcccttttccctgtttcctcactggaatcgaaaggatcgtcactatggccaatcatgttcgttccattttccttatccgtcatggacgcacttcctataacgccgctcacaagctccaaggccaggtcgacattccgctggacgccgtgggtgaatggcaggtcaagcagaccgccgcggccttgaaaagcctgtacgtcgatcgtcggccggaaatcaaccaccggttcattgtctgctccgatttgaagcgtgcgcacgccaccgcgcaggctttcgccgacgtattgggtggaatcgagcccgtcgatgatcatcgcgtccgtgaacgcagcttcggcgactgggatggccatgccgtggctgaactggccgaacgctaccctgaggacttccgttcctggatggagtctcggggcggtgaactgaagtatggtgccgaacccaaggaagccgtaggcaaacgcggtgtggaggctcttgaggactggtccacgcgtgccggagacgacacggacctgttcgtgttctcgcacggcgcatggatcgcgcagacattgcagaccctgttgggcatttccgcgatcgatccgaccttctccacggtggtctcattgcgcaatgcgcactgggtgcgcttggtgccgatggacaatcccgatggcactgtgcgctggcgtctgctggactacaatcacggtccggccatcgccgacaccgacgaatgggaacgcgaacgctgatcatgttcccgactcccctgctaatccaataggtccggtgcattcggaaccgttcaagcaataactgaatgactcaatgcctgaataatggcggaaacaagccaaaaagtgtcgccaaatcacacttttgtcatttggcgacacgccggcttttgccagaatcgacatctcgtcgtaatgtatacgaggtccgaacaacgggccaacaattgaaaacggggctatagcgcagctggtagcgcatctccatggcatggagagggtcgggggttcgaatccccctagctccacgacgaagccatcaaatcggatgatatggtggtttctccgctggttcgtggcgggtcttgtgactcccatgaatcggatagcttcactcggggctatagcgcagctggtagcgcatctccatggcatggagagggtcgggggttcgaatccccctagctccacg

SEQ ID NO: 555 - DNA, 8994 bp, Unknown
  R48_24m  MAG No. k141_74478
agatttgcggcggccatggcccaggagagacgcccggtcccattccgaacccggaagctaaggcctggcacggcgatggtactgcacccgacagggtgtgggagagtagcacgccgccgcaccacacgtacaggaagccccgatacccctcaaaggtaccggggcttcccgcatatcaggacacttgcgcgtgggggggggtatctcgcgtccttgggccccggcaggagtatcccgtcggggcccagtgcgttttgggcggcaacccgctgaatacccggtaagatgtctgaggtatcaacaaacaggtcaggaggtgacgcgcatggtggcgccaagccgtgatgaccgtagcgtagatgcattggtgaaatccaaggcagtacttgatgtattggcggaactgggaccaagcaccgcaaaaaccataagcgaacgtactggtgaacccgtaagctcaacgtatcgtttgctggataatctcgtcgcagtcggttgggtggaacggggcatcaatcgtggcgagtatcggcttggcatcgattgcgtacgtatcggcggccaaatcgaaagcagactggacattcagcagatcgctcgccgtaccttccgcgcccatcacggccagttcggcatctggggtctgttcgttcggaggcgattgcgcacggtgtgcatcgagacacgcacccgtgagacattgcaaagctatgcacagctggtgggcaatagcttgcctctgagcatgagcgctccctctcatgtactgacggcctggcttcccccggctcgctacgagcagctgttggaacactatgcctataccaacgagctcggcggcacattctccacgatgcgtgccacagcaatgggacaggctcgtcatatacgcgaatgcggcttcacctatgacgtcggccagaccatggccggctccgtgactatcagcgtaccggtattcaatcacgccggagagattcaagcggcaatcgccctgagtggcctttcccgctccttggaacctgagctggcctgtctggtagatgggcaaccggcaacggcatcggctcaagacatggtgcgattggtgcggactgccggccgtgaggtgtcgcgaggccttggatacagtggtgatcatcttggcctgaacagttgaatatgatgagtcagggataagtcaggggaaggaacgtcgacgatggcggaagacaaacgtgaaccgacccgcgctttagacaaggcgagtcgtgtgatggacgcattggcggcggagaatggcctgtcgccggcagatatcgccgacgcctgtgatatcccgcgatcctccgtataccgcgtgctggatggactggtcgatgtggggtgggccgtaacggatacggatggtaactactcattatcactggactggctgcgattggctgatgccgctcgcacgtctcgtaccgaatggcagcctgcgattgcggtcatgcatgccatcaccgcgcaaaccggcatgacctcattcctcagtgtggtctccggcactgaattggtatgcgtggaatgtgcgcaaggtcatgccatcgattcgctgatcctgcgcccgggccgcgtgctgcctctgcatgctggcgcggccggccgcgtggccttggcgtatttcgaggatgccgatgtcgaacgctatcttgcaggagtgccgtttccggcatataacgagaacacgctggtcagtgtggaacagttgcgcgaggatattcgcttgactcgcgaacgtggatatgcactgtcggatgaggatgtgacgttgggtgtcggtgccgtcggtgtaccgattgtggacaacgagtccggtcgcgtgatcgccagcctgtccgccggtggattcgtggacgaagtgttagccactcaagaatccttggccgcgttactgcgcgatggcgtacgcgaaattcaggcagcctgattcggcccgctaggctgtcgggctggacggttatgtccggtcagctatggcctttgccggctacggttctgctggttatgcttctgcccgactacgctgcggtccgttacgcttcggccacacgacccaacgcgatggcggtgatcagcacgtacgcctcgcgcgggtcggtggcatcccagccggtggattcggcggcgcgcttcaaacggtagcggatcgtattgggatgtacgttgagctccttggccgtggtctcgagcgaaccgccgaacttcaagaatgtggagacggtgagcagcgtcggatcatccgggccggccgcggtcaggcttccgtagaccacgcggaccagttcgtcacgggcgtccgcgtcgccgatcaacgcacgttcgggcagggcgtcgtcggtgcgtaacgggcgcggcaatggctgcacggtggcggccagagccggcgcggcctgaagacagtagagcgtggcctgaatcgaacgcatcgcgccatcggcaccggtgcgctgtggacccaaggcgattggccgatcggcggcgaacgacggggcgatggtattgcagatgatttccggcgtggccgcaccgaccggacgaatcaacgccactacggcggtgctgttgccgatcgggcgcttggcggtcagacacacaccgccgaaatcggccacgattttctcgatttccttggccgtacgtgcggcggaccgggcagggtatccggcgatggtgtaacaatcgaagtcatgctcgaagccgaggatggtgaacagggactccactcgttcgtcggccagatgattgaacaggcactcgaacagcacggtgcgtacgcggttggtcgcggtgatgccgggtgcggccgaatcggatgaatcgggcgcacccggcataccggatgcaccggacgaatcggcaacgtcggcagcaagaagttcgagaaaatctgacatagtcactagtgtagcgtcgctgattggcgttgcctttcagccaaagactctcgccaatacgtcagcaccacgaatccgaatacaaacgcaaccggcaacatgtgccgctcgaaattattggccggcgcggtaatcatcacgcccatcagcagtagcagcggaatatgggtcatgagggtgagccaacgtcggcgaatcacctcggccgcgccgatcagcaatgtcatcaccacgtagaaattgccatgcgtgggccagccgagtacgggaatgctgccccatacgcgagtgaagccggcgatgcgctcacgccagtcatggttgtaatccttgatccatgtggagtttttctgcacgtaatcgctggccacgtaataatccatcgatacgtacggctgatcgttcacattgaagtatccgaagcatttggacagcagcgcatccaacgcgatgatcggattgtccttgacgatttcgaaccatgccttgttgaaattggtcatatcctcgggcgtcaccgtgcgccacttgtagctgaccttcttggcctgaataccggaggatttcaccgggtcggcatcctgctgggagtaagcgtcggccatctgatcgagattgaagacgggcgcgaggttctttttggcttcgtctgaaataccgtccggattgcgctgagccacgcgggcgatcatttgcagctgtacgccgcggctttcgattggatcgccgccgatgatcgcaccagaggagatggcgaaggagatgccgccgtgaatcagtacggtggggatgagcagcgccacgacgtaagtcgcccagcgtttgcggtcggcgatcagagccagcacgatttgcagagcgatgatgtaccacgcatatttcgcggaaatcagcatcaccgatgtggccaggataaaggcgatgaaactgtggcgcggcaagtggacgggcgtggcgatggcagtggcctgaggatgtttgcgggtgccgacggggtgccaggtctggacgagttcataccagacgctgaaccaccagacgaacgagaacgcgaacagcggcgatttggtgatggagatagtggaaaacacggccagcgggcagaccatgaagaacagcagaatcaggaatctggccaatcctccggcctgtgggggaacggcggaatccgttgccgtttttcctatccaaggccggttcaggaatcgattggcggcggcagcgcagcagaacacggcgaacagcgtctgcagggcagccaacgtcacgatgccggcatcgtttgagccggtcagatgcctcgcaaacgtgactatcgcgccatagaacacagtgagtaccacattgtgctggtcggtcagatacgtgggatcggacggccacatgtagtgcgcggtggggtagatgtccatcggcacgaaggagaagaagccgatatagggctgtttcaggccggtccactggttccaggcccagctgaattcgcggatctgtgagcggaggtccgcgccgaatgcggccagcagagtggtcggcacccagagccagccgacaaaaaacaccagcataagcttccagaaccggttcgtgccgcgtgtgatccagcggtccagaacagtgacggtggacgtgacgatagcgcgaacggtacgacgggtcttggctggttggctggcctgctgatcggcggcgggccgtgatgtttcgctattctgctgatggtggcgtaggcgctcgccgatggtcttcggcagtatgcgctggcctgctgcgaatcgcgccatcagcgtgatgattccgagatatatcaggaacgacacgacgaatattgcggtattggcccagttccaatgggcgagggtgccgttctcctcgtcccggtacagcgggccgaccgccgagcacagtgcaagccacaggcaggccagcacggccagtgtccagcgcgcggcagcgcccacgcgcgcaagatgcgggtgggactggcggctggatacggcggcaagcttcgcggtggctggtgacgtcatgacaatatatggtagccgcacaggtcaacggttgatattcgatgtctgccgggcatcgccattgttcgcaagccaatacgacggccgggtgcatgcgtgggctcggcgaatgcggaatttccgaagttgtgaacgctaacacgggctgtccggcccaaaatggttgattttgtgcgcttttccgtggaatatcgcgggcaaaaaacggcgcaaccgaggtaacgtagtgcccatgatgattgcgttgaaagctgcaacgccgcagctacccagaactacagccgtcgcggatcatgtggtcgccgtggacgaaaccgattcgaccaacgcgctggccgcgcagatgatcggcgacgggtcgttgacgctgcccgaccaccagggtggcgaactggcggtggccgtggtggccgccgaccggcagatcgccggccgtggccgcaatggtcacaagtggatcagtcagcccggccgttgctcgacgatgtcctatgccgtgcgcattccgcgcgcgatcgccaccgacgaatccgtcaatggctggctgcagatgatcgccggactggtcacgctggacgccctgaacggcatgatcgaggaatacggtgccgcgccgaaccagccggactgcttgctggaactcaaatggccgaacgacgtgttctgccacgggctcaagctgggcgggctgctctcggaactggtgattccgccgtcgtccggtactgatgctgatgccgatgacgacgtcgtcatcgtgttcggcgtaggcctgaatctggcgctgggtgcctgttggctgcccacgccgcagtcgacttcgctgcagctgcatgtcacgggcttgccgtcgtttggcgagatgcgcgatgcggtggccgaacgtcaggtcgagggcttccgtgaacgactggcgaagttcatcgccgacccgaagggccaggccgagtcgttgcgcgaggaaatgaaggcggtgtgctgggcgcgcggccgtcaggtcgaggcgcatttcacggacggcaccacgctgaccggcgaagccatcggcctcaacgaagacgcctcactgatcctgagaacacaagacggcacggaccatacggtccgcaccgccgatgtgggagtgctgtaatagccggccagtagctagctagtagctcaggtcagcgaccgagcttggacaggccggcggcggccagagaggccaccacggccttgatggcgtcgccgacgacgaagcccatggaggccagggccacggcggcgagcggcgcaccggtcaacgcggactggatgatgaagccgaaggcgtacaccaccacgacgccgccgaccagcgcggccagcaggtagcggcccgcggtgcgcgcggcggccgcgaaggacgaagtgtcggacttgccgcgcagcagggcgatgaccaccacacccggcaggaagccgaagaggaagccggcgctcgggccgaccagggccagcgtggaggtgccgccggcgaacaccggcaggccgaccgcgccggccgccagataggtggcgacggcggcaccggcctgacgccacggcagcatgagaccggcgagcatcaccacgaacgtctgcagcgtgatcggcaccggcgtgcccggaatcggaatctcgccggcggccgcggacagccacatcagcacggcgaacagcaccggcttccaggatgcggcgacgatacgacgggcgagcggcgtggtggccgctgcggatgcggtggtgtgtgaagtctgcatatcaataacccctatgttgtgtgatatcgccgtgaacggcgggcggtatgcgatggatgaggggaggttccggcgggccgtgcggtatccccgacagcccgaaccgtccatatggtggacggtcccaaatgaatccggccctgtgcgggcgaatcgtgcggcgatggaccgatgccggtccggtcgccttccgttcgcccgcagatgagccttcccccgaacttacggttgccatcgtagaggtgttcgatttcgtgcggtttcgtaccaacttacaaaattgtcgatttcgatttgtcacaagttgacgaacgcaaccgtaacgtcaacttcttgaaccggcgcgcaaggatgtgcaatcggcggatttgcaacgtttttgatagccggcgccaacggttacgttgccggaacctacgcgcgcgtttgttcgtagcctacaaaagggcgtgaaagcttttgtgcgaacgcggcttgccctctcctctatatggagagcacaatttgacactatggctcatactgtcaaaaaactgctgattgcgaaccgaggtgagatcgctctgcgcgtggtgcgcacggccaaggagatgggtatctccaccgtggccgtctactccgaacaggaccgcaatagccgctatgtggacatggccgacgaggcatacctgctctccggcgacacctacaaggacacgtacctcaacgaggatctgctgatcgacatcctgcacaaaaccggtgcggacgccgtgcaccccggctacggattcctttccgaagtgccgagcttcgcgcagaaggtcgaggatgccggtgccatctgggtgggtccgcatcacaccgcgctggtggatttgggcgacaagatcaccgcccgccgagtggccttgcgcgccaaagtgccgccggtgcctggcctgtccgaaccggtgaccgacgtgcgaacgctgctcgacttcgcacacacccacggctacccgatcatgatgaagcgcactgatggcggtggcggccacggcatcaccgtggtgcatgacgacgaggagctgcgccgcttctacatgaaccacgacgcgctgcaaggcggcgatctgaaggaatacttcatcgagaagttcgtggacaaggcacgccacgtcgagacccagtccgggcgcgactcgcacggcaacttcaccgtgtactccacccgtgactgctcgctgcagcgccgcaaccagaaactcgtggaagaggcgcccgcgcccttcctgtccgaggaaatcgtcagcacgctggaggaatactcccgccgcctgttcaccacggtcggctacgtgggcctgggcacctgcgaattcatggtgacaccgaacggcaaagtgtacttcctggaagtcaacccgcgtctgcaggtggagcacaccgtctccgaagaggtcagcggcctcgacctggtgcgcgaacagctcaatatcgccgccggtggcgagctcacccgcgcccccgaaccgcgcggccacagcttcgaactgcgcatcaccagcgaagacccggccaccaacctgacccccggctccggcaccttggagaagatccagtggccggccggccccggcgtgcgcatcgataccggtgtggaacagggcgacaccatctccccgaagttcgattcgatgatgggcaaggtcatcgtcactgcccagaaccgtctcgatgccgtggcccgtgtgcgccgcgtgctcgacgagctcgtgatcgaaggcgtgcccacgccgattccgctgttcaaggagatcttccgcaacgacgacttcaccgccgagcatggccatccgttcgccgtgtccaccaagtggctggagcgcacgtacctgaaccgcacaccggcttccgccgcctccggccagccggcctccttggccaccgccccgggtgccgctgccccggccgcgcccgacaagtccaagtcggagacgttcgtcatcgagatgaacaaccgccgcgtcaagctcaccgtgccactcgacatcgtggagaacatcaccggctcggcccgcgcccgcggtgccaagcgccccacccagccgttgcgcggcgcaggcttgcacaacgtggcctccggtgccgccacggccaacgacggtgccaaatccggcgtcatcgcctccccgatgcaggccgtggtcacgcgcatcaacgtgtccgaaggccacgttgtgcaagcctgcgccgcgcaacggctgggtggggcgcttggcaccgcgggcgcgggccgagccggtgatgttctccacg

SEQ ID NO: 556 - DNA, 4069 bp, Unknown
  R48_24m  MAG No. k141_74615
catgcttgaggatttcgatggcatcttttccttgggcgggggcgcgccgatgacaccttccatccaggagggattggcgagatacgttgcgtctggtggcaaggtcgtgtatttgatggctgatccggaagaggccatggagcgcgcgaatcgtggtggaggtcgtccgatgctcaacggcgatgccaatatgcgttggaagaaactttataaggaacgtgacccggtgttcaggtgcgtggcgaacgtgcatgtgggcacacgcggccagtctccgcaggcggcagcgagaaagctgatggaaatgattgatcaacgtatagtacatgtcaccggttccaccatcgaaccgtacgatgttcgtatcggcgagggtgtgatgggacagcttgcacaggttttgggcagcaagcccgtcaaggtggcgcttatccacacacagccggtgcagcgtcattcggatcgtgcgcgcacgctgcttcggcaggcgggctatgatgcgtacgacattatcattcccgatgcggaggctggaaagaccatcgaggtagccaacggtatttggcagcgtttgggcgatgagggtttcacccgttccgatgcgatcgtcggccttggcggtggagcggcaaccgatttggctggttttgtggcagccacatggatgcgtggcattcgctatgtgaactgcccgacatcgctgcttgccatggttgacgcttcgaccggtggcaaaactggcatcaatacgccgcagggaaagaatctggtcggttcgttctacactccggccggagtgctcgccgacctaaagtcgctcacatcgttgccgaacgacattttcatcgagggcttgggtgaggtcgtcaagtccggtttcatcatggatccggaaattctgcagattcttgaggattatgccgatgaactgcgtgccttcgacgggtcgacgttcctggattccgatttgaaggatgtggtcgcagagctgatcgaacataccgtgagcgtgaaggcctaccatgtgtccgccgatcttaaggaggcgggactgcgcgaattcctgaactatggacatactctcggccatgccatcgaaaagcttgagcatttccgttggcgtcatggcaacgcggtggcggtcggatgcgtgtatgcggctgaactgtcgcatcttctgggatacatcgatcaggatcttgtggactaccatcgttcgctgctgggctcgctgggcttgcccacgtcttggaacaacggtacgtgggacgatgtgctcgctttaatgcatcgagacaagaaggcccgcggcaacaaacttcgttttgtggtgcttgacaggattgggcatccgattcatcttgaggatccacccgcggatgccgtcgaagaggcgttccgccgcattcagcagtaataacaggggagtttgaacatgactaaagtagtagtcgtcaatggaccgaatctcggtcgtcttggcgtgcgacagcccgacgtgtacggcaagcaggatcttgagaccctgcgcgagttgtgcacgcagtggggtgcggaactcgggcttgacgtggaggtccgccagagcgatgacgaggccgagatgatcggctggatgcatcaggccgccgatgagaagacgcccatcgtgatgaaccccgccgcattcacccattactcctacggtcttgcggacgccgcccacatggtgattgacgagggtctgccgctgatggaggtgcatatatccaatccgtccgcgcgcgacgagttccgcaaacgctccgtgatttcaccggtcgccaccggcactatcactggcatgggcttctacggatacaagctcgctttggacgccgtcgcgcacctgctggaagctaagtaacgtttttcgagttctgattgggactgcccaagcaacgcaatacatgccggatgctttccggtaggcatccggcatccaccggggccgccgatccgtccgatcctgatgcgaaccagaaagatgacgagacactaccggatgatagaagcgtcactatctactgcaagcctgccgactccagctggaagagcccgaagacaggttccgccatcacgtgattcgtattggccacggtgacttttgacatagcattcgcattcgcgacttcccacagaaagaagaactgaatctgattgactgactgtatttcctacttttgctaggcgggatcatcgaagagacgatggccccgcattttcgcattgaagaaacacgccgcgtcttatgccgctgatagactggagttccatggttagaagaacacatggcaattctcaagagcacgttaccaagcatatttttgtcaccggtggcgttgtttcctctctcggcaaaggcctgaccgcctcctcccttggtcgcctacttcgtagccgtggcatcaaggttttgcagcagaagctcgatccgtacatcaacgttgatccgggcactatgaatccgttccagcatggtgaagtctatgtcaccgaggacggcgccgaaaccgatctcgacatcggccactatgagcgtttccttgacgtgtatctgagccaaaaggcgaacgtcaccaccggccagatctaccaggaagtgctgcgcaaggaacgtgccggcgaataccttggacagtgcgtgcaggtcatcccgcacatcaccaacgaaatcaagtcccgcatgcgtgcgcaggcgtccgatgacgtcgacgtgatcatcaccgaaatcggtggcaccgtcggcgacatcgaatcccagccgttcttggaggccgcgcgtgaggtccgccgcgatctgggcgccgaaaactgcatgttcgtgcacgtctccttggtgccgtacattgctgccgcccatgagctcaagaccaagccgacccagcactccgtcatgatgctgcgtcagctcggcatctccccggatgccctggtgttgcgttccgaccgtccgctgaaccagtccatcaaggacaagatctccctgatgtgcgacgtggattccgaaggcgtggtcaactgtgtggacgccccgagcatctacgacgtgccgaagaccctgttcgacgaaggcctcgatgcctatgtcgtgcgcgaactcggcctgccgttccacgatgtcgattgggacgagtgggaggacctgctggagcgtgtgcaccacccgaagcatgaggtgaacatcgccatcgtcggcaagtacatcgatctgccggatgcctacctgtctgtcaccgaagccatcaaggccggtggtttcgccaactatgccaaggtgaacgtcaagtgggtcgccgccgataagtgcgagaccgaggagggtgcggccgccgcgctcgaccaagtcgacggcattgtcgttcccggaggcttcggcatccgcggcatcgacggcaagatcggcgccctgaagttcgcccgtgagaacaagctgccggctctcggcctgtgcctcggcctgcagtccatggtcatcgaatacgcccgccacgtcctcggcttggaggacgcgaactccaccgagttcgagcccgattgtgcgaccccggtcatcgcaaccatggaggagcagaaagacatcgtcgctggcaatggtgacatgggacacaccatgcgtcttggctcctatcctgctgagcttgaagaaggttccatcgttgcggaactgtacggcaccacgcatgtcactgagcgccatcgtcaccgttacgaagtgaacgtggcatataaggaccgtctgcgtgaagcgggtctgcgcatttccggccagagcccagacggcgaactcaccgagttcgtcgaacttcctcgcgaagtgcacccgttctatgtggccactcaggctcatcctgagttcaagtcccgcccgaccaagccgcacccgctgttcgcaggtctagtcaaggctgctctggaccaccagcaggagcgctaaatcgacgaattgtgattaacgtcggataacccgatatgcaacatggtcatgagtccaaaggagttcatgaccatgttgcataataggggcctggccttgaattaccaacaagac

SEQ ID NO: 557 - DNA, 3124 bp, Unknown
  R48_24m  MAG No. k141_75993
cttatcccgcgtcagatcggtgagccgtcccgcatcgagcatcagcgtgcgggtggcgcgtccgtccggcggacggtgtcggatgcggatgatcgccatgccgtgtgcggccgcgtccgccatgatcgcggccactttggacgcgttgtcgtcgtcgagtccggcgtccacctcatcggccagcagcaccttcgggtcggtgagcagcgtgcgggccaacgccacgcgcgccgcctgaccgcccgacaggtcatgtggcgcgcgcgccaggtcgatgtcctcgcagcccatcgcgtccaacgtcgtgcggatgcgctcgtcgggcagcagctgctcggccctgccccccttgcctcgaatcgcgagcgtccagggcagccggatcgcctcggccacgtccttgccggtcaggatcggtttttgcggcagataggagacgtcccgccgccactgctgcgcgctgaattcgtcgctgcccacgccgtcgaggacgaacgtgccgtgcgcgtgcgggttgagtcgggcgcatgcggtcagcagactcgatttgccggagccggacggacccaccagatcgatgatgtcgccgcgttccatgctgaaggacaggttgtcgaacaccgtgcgttcgtcgtctgccggcgattgcgcggggacgacgcaggatacggatatggcttcgaagaaggatcgcatattcatccagtctagtcgggggccacgtgggaaaccccagcgttcacttcctgtatacccggtgtggcataatagccaaggcaatttttgggctttgcctaagctagtttgaatttgaaataggtgaataacgtggcacagactactaacgacatcaagaacggatccgtcctgaacctcgacggacagctgtggaccgtcatgaagttccagcacgtcaagccgggcaagggccccgccttcgtacgcaccaccatcaagaacgtgctctccggcaagatcgtcgacaagaccttcaacgcaggcatgaagatggaattcgagaccgtcgacaaccgcaccctccagtactcctacgaggacggcgacaacttcgtgttcatggacatgaccacctacgaccagatcatggttccgaagaccctcgtgggcgacaaggccaagttcatgctcgaaggcaccgactgcctggtctccttccacgacggcaccccgctgagcgttgacctgccgggctccgtggtcctgaccatcacccacaccgagccgggcctgcagggcaaccgctccaacgccggcaccaagccggccaccgttgagaccggagccgagattcaggtcccgctgttcatcaatgagggcgaccgcgtcaagatcaacaccgaggatggttcctacaccggccgcgagaacaactgatctccgcatcctcaacagacgaccgaccgtataaaggactaggacagcagcagtatggcacgttccaccgcgcgcaaaagggctctgaacaccctgtacgaagccgacgaaaaaagtcaggatattctctccctgcttaacgaacgcatcgcacatcccggtgcccagaccccgcttcccgactatgccattgaaatcgtcaagggcgtggccgagcaccgtcgtcagatcgacatgaccctggacgaacactccacgggttggaaggtccgccgtatgggcgtggtcgatcgcaacattctgcgtatcgccgcttgggagattctgttcaacgatgatgtgccggacaaggtcgccatcgacgaggctctggcattggccaagaccctgtgcgatgacgattcgcccgctttcatccatggcctgctgtctgcggtgtgcaccgccaagaacgcagcaccggcaccggagtccgcggcagaagaggccgatgaggaatcgtccgattccgatgccgccgcatccgatccgaccgatgagggcgatgtttccgattcgcccgattcgtccggtgcatccgacgagcccgctgccccgtccgctgagattcagccgacggtcgattagtcatttgttgttcagcctccccattcgggaggctttttcatgggcggacacttgtgtcgccacacattctcaagtcggcaccttgccggcagccccgccagcggggtgagactttgcgcccaacggcgtgtgagtctgcgctggccgttaaccttggtacgaatacccgaaaaacataagggggttttggtgagccagaacgagtccgggaccatcgcaattccgatgtatgacaaggatgatgcagtcctcgttttggaagacggacaggtatatgtgggggagccgtacggcgccctcggtgagacgaccggtgagatcgtcttcgccaccggtatgaccggataccaggagacgctcaccgatccgagctacgatcgccagatcgtcgtgcagacgttcccgcacatcggcgataccggcgtcaacagcgaagaccctgagtcctcccgcatctgggttgccggatacattgtgcgtgatccctctccgaacgtgagcaactggcgtgccgaaggtagccttgatgacgacctcgccaagaacggcatcgtcggcttgagccacatcgacacccgcaagctggtgcgtcacctgcgttccgcaggcgtgatgcgcgccggcatcttctccggcgacgccctgaccgaccaggccaccggcgcgctcaagaccatcgagcagctgctcgaagacgtcaagaacaccccacagatgcagggcctgagcctgtacgacgaagtgtccaccaagcaggcctacaccatcgagccatgcggcgagtacgaaggcaaggagccgctgtacaccgtggccgccgtggacctcggcatcaagggcatgaccccgcaccgcatggccgaacgcggctgccgcgtgcacgtggtgccctccaccatcaccttcgccgaaatcgagaacctgaacccggacggcgtcttcttctccaacggcccgggcgacccggaacaggccggccccgaaatcgagctgctgcgccaggtgctcgacgccggctacccgttcttcggcatctgcttcggcaaccagctgcttggccgcgcgctcggcttcggcacctacaagctcaagttcggtcacc

SEQ ID NO: 558 - DNA, 17445 bp, Unknown
  R48_24m  MAG No. k141_77369
agacgggtctcgaggtcggtcagcatggcgttaccggtctggccggcagtacgggtggccttctcgtaagcggcgcgaagctgcttctcggagatgccgtactgagcgcgcagacgctgcttttcgcgcatacgcaccgcgtaatcggactcggtgcggcggcggtcgcggccgtgctcgccaggagcgtacggacgcttttcgaagatgcgctgagccttgggggtcagtgcgatgccgagggcgcgagacagacgcacctgacggcgagaacgctgaacgttcgtcattggattaatccttctgtcgttatctgaacggaacgcttgccttgcatatgcctggcaagcgctgagccgggcctccccagcgcttcgtcgtgaacgaacacgaacgggttggttttcttgcgatcacctaccgccgacccgctgatgggctatgactccagacggtatctacctgttggcagacaccagcagaccatattacaccgaggctatggacagcactccggcgtccatgcgatacacccggtctgcgtattcgagtgcatcgggatcatgggtgaccatgagaatcgccgtgccgttgttggcttggtctctgagcagacgcattacgatgtcggtgctctcctggtcgaggtcgccggtcggctcgtcggcgatgagcaggctcggctggttcatcagcgcgcgggcgatggagacgcgccgcatttcaccgccggacagctcgcgcgggtagctgtctgccagatcggcgacaccaagctgggtgagcagcatgcgagctcgggtggcgaacaggtccggacggctcgcagccgtgtttgacggcgtgttttcccggtctgtgattggcgcaatgacatccggcatgaacaggtcggcggctgcttcatcattggtggcagcggcttgtgccacggcatcggtcgacgcaacagcgtccacctgagcaacggcatccgttgcttctgcgttttgggcaaacggcagcggctccggaaacatcgttgcgggcagaatcacgttgtcgagcacggtcaggttgccgagcagggtctggctttgggtcacgaatccgatggtgcgattcctcagcacggacagtgctttatcgcccaagtcggccacattgcgtccagccacgctcacggttcccgaggtcgggcgaatcagcccggcgaccatgttgatcagcgtgcttttgccgttgcccgaccggccgacgatggcgatgaattcgccggcatcgacggtgaggttcacgtggctgacggcgtcgaacggcgtgccgcggcggacgaactggcgggtcaggtccgtcaaggtcagcagatggtccggggagggcgtctcggttacgtgcggcgaatccggcgcagtcggcgcgttcggctgagctggcgtggtcggctggagcttggtcggctcaaccgtggtcagctgagtcggcgtagttgtctcagtcatatcactccccctctcgcagggtcaggtaggcttcgggccggccgagacgccacatggtggccagcgaaccgatgatgccgatgaccgtagagcacacaatggtcacggcaatgaatccgatcaccgcaaccgggctggcttgcagatacggcaattgaagttgtttgccgatcagcgaactgaatgggaaaatcaccaggctggccgcgccgacgccgattacgccaccgatcagaccgatgatggcggattccttcagaatgatggcattcaacatgccgcgcgtggcgcccatgatgcgcagggacgcgaattcgcgtttgcgttcgttcaccgacgaggcgaatacggcgagcagcacaatcacgcccattacccagatcaccgccacgaaaatcttgaggtaggtgacaagcgcggtcagcgaagttctggtgttggcggtgatgccgccggggtatacgtaccccaaatcggcgaaccgggagtcaagacgcttgatgttttcagccacggtctgcgcttcgtaaccccgctgcgtcttgatcatcacggtggagacggcttcgcctgcatattcggcgggcatgacctgcttggagaccttggccgaggcggcgaccatatcaggcacggtgttttggttgatgaacaccgaattgtcgaggctggtgccggtgttggcgagctgggcgatgaccggccacttatggccgtagagttcgatggtgccgtcggtggacacgttgacgtttgcgccggcaatcatctgaccgtcttcaagggggccttcgaactgggatgcgacccatggttcgatgacgaagtcagtgtccgggtcgtaaccgatgatctgcagcttttcggcacagcaggcggcggccagcgatgatatataggtctgttcggtggcctgtgcgatgccgtcggcctgcatgacctcgtcggcgatgtctttggtgaaatagaaagtgctgggattgccgctggtgagcagcgcttcagccttctgcgcggtgttttgcggcacgaccataaggtcggcgcccaggcgcttctccatactggtcatgccggtgttgaggttcatggtcagcatggtgccgccgaagaacgtcagcgcgaggatggtgacgacggcgagcagtgcgccggtgcggaacggcttgcgtttgaggttttcaatcggaaggccgcgcaatgcgatatgggatggcacgatgagtccttatgttgcttatagtgcggttgcaataagcgagaccggagtccagcgttcggaatggctgggctccggccgtctgctcgatcagttgcgcttggcggcgcgagagtcgagccagatggcgatggccgcgaacacgatggtgagcacgccgagcacgatgagcgtgggcagcataaccatgcggcagtgcatcatcgcgcccttgcagatgccgatcaggaaggtgggtacggcgagtagtagcagggcgttggctgcggcggcgatattgaggccgatgcgaatctgcggggcgacgaacaaagccacgacgcccaacacgaggatgacgacgccgatgccggtggccgcctgctgcgagtagtggcaggcacccggcatgtcatggccggtgcaggcgtgcgcaaaggtctggggcgcgatggtgatcagcgcgccgaacagaatattgggcacggatgcaaacagcttgttcttcataactactttttcctctcccctgttcccagggctcgtaggcgcaacctccgcattatgcccagatagtgatgaagaacacaagtcttgttttttgtgaatttatttggtatataactcagcccctcgtcagaggggccaatctatctacaacttctcaataggtgctacgcggagcatgaggcgtttgacgccggcggagccgaagtccacggtgattaccgaattgcggcccttgtcttgcgcgtcggtgaccttgccgagaccgtactggtcgtggctgatcatgtcgcccacggcgaagtcggcgatattcaggccattgtccttggtgagcttcgagctgggcacggcagagccggtcgaaccggatttcggtgtggtgcggcgcgtggtgaccttgccgccacgggtgccgccatatgaaccggatgaagaaccggaacgggaacgcgacccgtaagacgaccccgaacgggagcgagacccgtaggaggacgagccggagcgggaatcatatgatgatgaacgggaaccgtacgaagaacctgaacgggaaccatacgacgaggagccggaacccgagccatacgacgacccataccgcgaccgcgacccataggacgaacccgaaccggacgaaccacgcgagccgaacgtcgacgacccaccaaacgtggcaccgccgaaatcgtcatcatcccagccgcccaaatcgtcggcgaatccatcggtctcccagttggcgcgcatacgctccacgccggcttcacggcgtttccaatcaatcagcgaatccggaatttcgtcgaggaattggctgggcatcatatcggcggcctggccccactgggagcggacggcggcgcgcgtgacatacagtctctgcttggcacgcgtgatgcccacataggcgagtcggcgttcctcctgcagttcagtggtgtcttccatcgaacgcgaatgcgggaaggtgccctgttccatgccggtcaggaacaccaccgggtattcgaggcccttggcggtgtgcaaggtcatgagcgtcaccttgccggagtcctccgcctcaccgggcagctggtcggagtcggccacgagcgcagtggtctccaggaatgcggacaacgtggcgtcaggcgtgttctgttcgaattcggctgcggtggactgcagctgggagaggttctccagacgggaggcgtcctgcggatccacggatttctcaagttcggcccttaagcccgacttctccaatacttcggccacgatctcgctgggcttggagtcgtgcgcgtgcgtgaactgcgagagcgcgcccatcagatcgcggaatgctcgtagcgaggtggcggtgcgggtcggcacctcgatctcatccaagtgcatgagtgcgtagaagaagctggtgccatgctcgcgcgcgtaggcgagcagcacgccttcggcgcggtcgccaagcccgcgcttgggcacgttgagaatacgacgtagattcacatcgtcgtccggattgacgagcgcctgcaaataggccagcgcatccttgatttcgcgacgttcgtagaacttggtgccgccgacgagctgatacggctgattcgtgttgatcagcgcctcttcgagcgagcgggattgggcgttggcgcggtacatgatcgccatgtcggagtaggagatgccctcttcggcgtgcaggcgcgcgatttcggtggccacccactgggcctcctgctgggcgttgtccgccgcgtagccgacgatcggctcgcccttgccgagcgcggtccacagtttcttgggcttgcggccctcgttgttgctgatcaccgcgttggccgcatccagaatggtctgcgtcgaacgatagttctgttcgagcatgatggtcttggcgttcgggaagtcctgctcgaagtcctggatgttgcggatgtcggcgccacggaacgcgtagatggactggtcggaatcgcccaccacggtgatccaggcggggccggacttgccggcgttcggcgcgcccgggatggccttctcccccgtgtccacgccggccagctcgcgcacaagcacgtactgggcgtggttggtgtcctgatactcgtcgacgagaatgtaacggaagcggtgatggtagtactcggcgacggccgggtcggtgcgcagcaactcgaccgtgcggccgatcagatcgtcgaagtcgacggcgttggccagggccaagcgatgctcgtattcggcgtagatcaccgcatagatggcttcaaggtcgcccaccgtgccgaactggtagccgcgctggccaggcgtgaagtcgggcgcgtgaacggcgaggttttccttccaaccggtcagattgttcttgaggtcggagatatggccgaggatcgagcgtggagtgtagcgcttgatgtcgaggttgaattcggtggcgatgattttgacgagtcgctcggagtcggcggaatcataaatggagaagccggacttgagcccgatggacttgccgtcgcgcctcagaatgcgcacgcaggcggaatggaaggtggagacccacatgcgctgggccaccgggccgatcagcgagccgagtcgttcgcgcatttcggcggcggccttgttggtgaaggtgatggccagaatctggctcggccatgcgccgaactggctcaagatccaggcgatgcggcgggtcagcacacgggttttgccggagccggcaccggcgccgatcagtagcgcctgaccgcggtattgcacggcttccgcctgctgcgggttcagatcgcctacgagttcctgcgcgctgcgtgcgatgacttccggctcgtcgtacactgttgcctccctttgaatcgcgacattcatgtttaccacatgcacgggtcagcgcaggacaacgtacacttacaagtatccatatcattcactgacatacagcaatgggaggtctaatgcaggaacttgaggagcgaatccagagcgagggaacggtgaaggcgggtgatgtgctcaaggtggacgcgtttctgaaccaccagtgcgacgtgcgtctgttcgaccgcatgggttcggcatgggccgctcatttcgccggcaagcacatcaccaagattctgaccatcgaggcgtccggcatcggcattgcgtgtgtggcggcccagcatttcggcaatgtgccggtggtgttcgccaagaaggcgcagtccatcaaccttgacggcgaccagtacaccaccacggtctattccttcaccaagcagaaggagttcccggtgatcgtggccaagaagtatctgaacgccggcgaccatgtgctgcttattgacgattttctggccaacggcaaggcgttgcgcggtctgattgacctgtgcgaggcggccggtgtcacggtcgagggcattggcatcgccgtggagaagggcttccagggcggcggtgacgcgctgcgtgccgaaggctacgatgtggattcgctggccatcgtcgagtccatgaatcccgagaccggcgaaatcacatttaggcactgagcacattgactgctcccgccagcgggagcaacagagagaagaaaagaatcatgtcagagaagaaaaccaagaattccgtatcctttgaggcgctgtcttcgctgaacgcgccagtatccttctggaagggcattccgttcggcctgcagcatgtgatggccatgttcgtggcgaacctcgccccgatcttcatcgtcgcctcggccgcgaaaatgaccccggcccaatcggccaccatcatccaggccggccttctggtggcgggcctgggcacctgcctgcaactgtacggcgcgtggctcatcggctcgcgtctgccgatggtcaccggcatctccttcacctacgtggcggccgccgtggcgatctgcgcagacaagggctatggcgcagtggccggcgcggtaatggtcggtggcctgctggaactcgtgctgggtttgacggccaagtattggcgtcggttcgtgccgcccatcgtctccgccatcgtggtcacgtcgatcggcttctcgctgcttaacgtgggtgccacgagcttcggcggcggcagcggagccaaggacttcggaagctggcagaacctgacgctcgggcttatatctttggtcgcctgcctggcgttccagctgttgatgaagggcacggccaagcagctgtccgtgctgttcggcctggtggtcggctatgtggcggccatctgcatgggcaaggtcgatttctccggtttccagaacctcgctattgtgtccgtgccgcagttcatgccgttcaagcctgagttcgactggggttcgataatctccatcggcctgctctacgtcgtctcctcggtcgaggtgctgggtgacaccgccgcgctgaccaaggtgggcctgaaccgtacgcccaccgaacgcgagaccgcgggcgccatcgccggcgacggcctgatctccaccgtatccggcctgttcggatgcctgccgctgacctcgttcgcacagaacatcggattggtggccatgaccaaggtcgtcaaccgcaaggtgattctctccggcggactgattctggtgctggcgagcttcgtgccggccatcgccgaggtgttcaactcgctgccgcaggcggtgctcggcggctgcacgatcatgatgttcggcaacatcattctttcgggcttccagatgatcgccgaagcgggcttcacgcagcgcaacatcacgattgcggcgctttcgctgaccatcggcatcggcttcacccaggtgagcgacatcttcgcgcagttcccggcactgttccaacaaatcttcgcctcgaactgcatcgccgtgtcgttcgtggtggccgtaatcctgaacgccgtgctgcccagcgaggagcacttcctctccgcgcccaaggaggcaccggccgcggacgccgagtgataacaacgcgacatatcagctgcgcataatcacatgctgatgccctatcgtcttgcaggatgatagggcatcattgattttgagagagactacaagttgaaccatgagttcgagccggtggcgtgtcgatcaatcgacatcttcccattcgaggatgtctccgggttggcagtcgagtgccttgcagatggcgtccaatgtggtgaagcggacggctttggcacgtccgttcttcagaatggacacgttggcgggcgtgatgccaatttgttcggcgagctcgccgacgccaatcttgcgtttggccatcatgacgtcgagattgatgcgaatcgtcatctcaaatcacctgctcaagttcgcgcccgatccggacaaggagaacagtttccatacggccacgaacgccgcttcgatgcagagcaggaacagcacgcccataatgagacatgaccagtgcatcgacgtctggctcgggcagaggccggccagcgcgccgctcaatcccggtacggcgaatagttggccccataggcaggccagccagaccagaatcacgatggctttcaacgcgagcaacacccatcggttcatgtagtttttcatagcccggtcctttcaggtgccgacgtttttggcgacaccgcgaacatcgatatgactatatcgaaaaacgatataccttgcaaggcgtattgcgtcaaccggcattggtcgctcatatgcatataggcttcggcagactgtcagcagaccgtcagctcaacggaacgaacgccatatgagccacccattcgcgcacgagcgtgatgacggcttcgggttggtcgatgtgcgcgttgtgaccggcattatccagagtcacgaaggtggcgttgggatagtgcggcaacagggcttgctggtcttcgtatccgacgatctggtcttgcttgccggtgacgatgagcaccggacccgcatatgtgccgagcatttcctcgggattatcggccagccaataacgctgatccagccgttcgcatgccgcacggtcgcacaacgccacgccgggcaggatgaaccgttggtagcgccgccacgcgtcgaatgactggttgacgcccatggtaatgaaatcgaacacctgttcctgtggcaaggagtgcgtcagcttgggattgggctgtgcaaccacatgttcggccacatgccggccggcatgctgcgggtccacgaccggcgcgatcaatgccataccggccactcggcgaggttcgcgcgccaatacttcgcggacaagcgcaccgcccatcgagttgccgaccatggcgaatggagccgctttaccgacaaggccgtcaatggccgtttgcagccaatccgccatttccggcagcccgcaggcatgctcgggcaatgccggcgtacggccgaaaccgggcagatccagatatatacggcgaattgaatcattgccgtcaaacgccttgtcgagcatcatcagcgaacgatggtccacacccatgccatgcacgaacacgacgggcaatccatcatcattgccctcaatcgcgcagtacggctgcaattgtgccatgtgttcctctccttcaacccggtacaaatcgcctttcacacaatagcggcagcagctcccctggtgtcggagcaatcccgaccgccattctcggtttcgaggggctgatttcgtggtttggggacatccacttccgtttcaaggggctggtcattggccaaaacccaagtacgaatggcttcatgccaacgtcatttcgccgttttggagctgtcgctactcggccatcagcccctcgaaacggaagtggatgtctcggaacgagcaaatcagccccttgaaacgcaaatagacgattgcgaatcgacttatcagctgcgtcgaacttgcaatagagatgtcggtgtatcattccccggtctgattgcgcggatgtcaggaagcgtgaagaattgtcacaaagtcgcgtgatggcgcagccgccgttcaggtggatatgccacgctgtcatgatgacggccgagccggaacacgacaaatctcgcatgctgcataggccagccggtcacggtcagccatgacaccgaaatattggaggcgcaatgggacaacaggtgcggtgcggcagacgccgctcccatggcgcgggcgcgctgattgcagccgtcatacttgttgttgcggcgctgatcgcggcatggacgctgctgccacggctattcacgcctcacgagaccgcgcgcacggccgaggaagcatattgcgcggcggtgtcgcccgacggagcccgccgcaccttgacgcctgatcaggcgcagaacgcggcgctgattgcgaacatcgccgtcacgcgcggactgccggatcacgcggcgacggtggccatcgccacggccatgcaggagtcgaggctgacgaatctggactacggcgacttggattcgctcggcctgttccaacagcggcccagccaaggctggggcacggcggagcaggtgtccgacatgacctatgcgacaaacatcttctacgaccatctgctgcaggtgccggattgggagacgattccggtggaggacgccgcgcaggaggtgcagcgctcaggctacccggaactatatgccacatgggatgcgatggcacgcgcttgggcctcggggctgaccggcgaacggtcggcgggcgtcacgtgcgcgttggagccagcaacctcctcggacgcggacgggttggttgccgccataagcgctacactgccgaatgtcaaggtctcggttatgcccctaaatggcaaaaccggcacgaacaacggcgctgcgaccaatacggccagcacaacgttgacgatcacgctgccggacggcctgtccgccgacaaccgcactcgactttgctggcagacggcagggtggctggtcacacaggcgcatcaatacggcattgatgcactgcacgcggacggcatggattggaaccgcagagccggcacatggaccggcaccgaaaccgccgagcagaccgtcaccgtcacgcttgcgtgatgtgacctataacgccgtcgcgaccacaaatccgactgactggagcctacgccgtcgatgctgcctgaggcacgacacggatatgttttttactcgttcgaatgagcccaatccacgacggcttcgatgttattgccatccgggtccagcacgaatgcggagtaatagccgggatggtacgggcgcggaccgggagcgccgttgtctcggccgccggcggcgagcgcggctgcatggaacgcctgcacggcttgctgactgtcagccaggaacgcgatgtgtgtgaccggcgtgaccggcgaagcctccgcctccggcccgtcaatcggtgacacgtagaaatcggagtgcagggttccatcatccacgccgaatccgagcgtgggctcatgatgcgccttgacgatatagccgagcggtgcgagcgcctgtttgtagaatgtgatgccacggtcgatgtctttcacgtgcaacgtcagatggtccagcatggtcttggtcaccctcccctggttcttgtattcgattgctgcttgcagtgtaagcccgaacgtttcccacagggccgcgcatggctatgatgagagcaatcgcacgtcgagttcgagacaatattcaaaacgaatccaaggcaatagggggaatgatgatgaccaaggcactgattgtggtggatatgcagccgacgttctgtgaaggcggcgaactgggagtcgaaggcggcaacgcggtcgccgagcggatcgccgattatgtgaacgcgcatcgcagcgagtacgcgtatatcgcaaccacgcaggactggcatatcgagccgggcgcgcactggtcggcggaaccggatttcgtggacacgtggccgaagcatggtgcggccggcacgccgaacgccgaattgcatccggcgatcaaggcgctgattatccatcatcatttcaagaagggccagtattcggcggcatattccggttttgagggcatcgaggacaataccgaccgtatccagacccgtgaggaggttgcggccgagcaatccgccggcaagacgctggccaatgcgctgaaggccgccggcgtgagtcgcgtggatgtggtgggcatcgccgaatcgcattgcgtcaaggacaccgcgctcgatgccaggaagctcggtttcgaggtcaccgtgttcgaggacctgaccgtaccggtcagcgaggagctcggtgtcgcggcccgcaaacagatgacggcggccggcatcacattggccgagtcccgctgatcaggccggatatacccagagcgaacgcacgaacacttccgtatattcaaggccgacactgccgcatagtcgcctagtcgatatgtgaagaaggcttttatggttacgatgctgctgacttcgatattccgcaacgcctcgtccgccgtgcatgaagtcgaaccgcatccgcaaggcaagcgggtcgcgttcatcccgacggcgagcgccgtggaaccgtgggggccggttcactcggcgttgagcaaacacgcgctgcaacgcctcggtttcgaggtggagcaactggatgtggaagatgtgccgagcgggtccgccgaacgcgtcacgcgtagcatcgccgaggccgactgcatctatgtgggcggcggcaacacgttctttctcctgcaggagttgcgccgcaccggtgccgaccgggccatcatcgagcaggtgcgcgccggcacgccgtacatcggcgagtccgcgggctcggtcatcacggcacctgacatcggctatatcaagctcatggaccgcacggacaaagcccccgatctcaccgattacgcaggattgggcttggctgatttccgcgtggtcccccaccatcatgcaacggccatgggccacgccgcacaacgcattctcgaccggtatggtgccgatctcagtctcaagcccctcaccaaccggcaggccctgcttgtcaaggatggcaaaacccggctgctgcgatgatgcgggtcgtcggcccgtcgcccattcggcatcgccgtggtgtgtccggcctgacatgcctatcgagcggcatcaatcacacagcaatgtggctgggaacctcgccgaacgtcaacacctgcatacatcagcacggcaaaatctgccgaaatcgcccggcgcacgagatgccagccggccccatccgtcacctcagtgccgtaccgggccaggcatggccttgagcaacgggatgaatccggcgcacagtaccagggccacgacggcgagtatctgccagtgggcggagccgagccagccgccccacgtgccgacggcaccgccgatcgcatacgcgaacctggcacggccgctgaatttggccaggtcaccaccgctcagcagcagttgtcgcgatacgatcacgccatgcgccagcaggccatagccgaggttgttgatgagccatccgacgcacaccgcggcaaactcgggaaccagtacggcggcaagggaaatcgccgtggcgattgccccgatggcggacacggcgcgcatgccgagttttgcggagagccgcatgtagacaaacgatccgatgatgctgcccacgccgccgaatgcgtagaccacggtcagcatatcgctgccgtaccgggagccgatgcccagcaacgcatagcttgcccacagcgacggaatcagcgcaagcagcagcgatgcgatcagcagtctgacccgggtcaagcgggtgaccggagtgcgctgcggcgcgtgtgacgtgtcggccgccgtggattcgtcggcggagccgtcgccgtcatcgccgcccgcaccatcgttgccgaatcccggcatgaactcgcgggtgcggaatcgcgtcagcgcgcaggcaaatgacagtgccgacgaggtgagcagcatggccatgatggaggcgttggccaaggccgatccggcaacctggcccagcaacgtaccggccacgctggcaatcacggcgacgtagccgctgtacttgacgagcatgtcatcgtcgtcgccggccgcatccacctcgaacacttcggaggccacgtcgatgacctgcccggtcatcagcagcaggcatgacagggccagcagcagccacttccaatacgtccaaccgttgggcaccagcgcgaccgccaggcacagtacgccttccacgccctccgtggtcgcaagcgaacggaacgagccgaaccgctgcacgatccatgcggataccggagaagcgaagtcgatgaccagattgaacgtcttgcggaacgcgatcacccatgccggcagtccgacgatcagaatcgaaggaatcaccgacccctcgaaaatcgcgttggacagcatcgaaaacgtcatacccaccaacgcccatcgcaacgccctgctcaataccgacaatccgcgcataccttagttccttgtccttgccagtgtaacggaattatgacttctcaatcgtcccccccgctgtctaaatgaaagtgcaacaccctttcactggttatctggacaatctccaatctaaagggtgttgcactttcatttagacagcgccccccatatccgcatgtcactgctgccatcataatgagccagtagacgcctttaagcgttctgacaaccatggaatcgaaaatcgctatgcacatcatagaacagcactgccaaggcaagaggtctgaccagtcgctcaatgaggacaggctgatcatcaccgatggtttcgcggcagtggtggatggagtgaccagcaaaagtgtgcaccaccctgccggccttgttcttggccgcgtccagcaccggggtgatgtcagcggcccattcgcgcaccgaacggccggcgagcatgtcgttgccgcccacgcacacgatcagcacatccggccggtcgttgatatcgccgatcatccggtagcgcacgcgccgggcggtcgcgccgagcttgccgaccgtacgccaggccaccggccgaccggtacgcttgcgacgcgcgcggcaagcagcggcataatgcctttcgactggtcgtccacgccacatccggccaccaatgaatcgccgaccatgacggcaagaatcggcttcacgccgttcgcgcctttccaatcggggccgatcggcgccttgatatccaccacgcgacccttggcatcgaacaaaccgaaccgtttgcccttcggctcggacgccaacttcacccggcccttggcccacataccctcaatcggagcaacggcagcatcaaatcacacgcaagattcccacgccacccaacatagtccgccctcctcgacctcgttagcggccagtagcaacccatattcgaaaactcgataaccatcgtcaattcgcatagtttgaacgttttaggcgttttggtcgctttggacgttttatactgtgatagataaaaaggaggtcaccatggcagaatccgacaaactcaccattccacgaacaatccttccatccatcaacattgacgacatgacgacattggaggcattcaccgcacgatttcttgatgagcggatcttcatcaaagatgccagcggcgtggagactcccctaccttcgcagctttgcgacgccgtcaggcagacggccatccttctcgccgaaggcaaaagtgtaatgatcagtgccaccgaacaagatctgactaccgaacaggcggcggcaatgctcggcatttcgcggcaaacactgataagactgcttgataaaggacttattcctttttcacgtccgtccaatcaccgtcgcatccggctggaagacctgcttgaatacaagcgagcctcgaaacacaccaaggattgcgccctgagccaaatgatcggcgtcggggaagacgccgaattgtacgacctgcccgagccgaccccgcaggaagccatgcatgcggtatcggaggtaaggagagtacgggccgatgctgtcggtgtttcttgatgccaatgtcatctattccatcaccttgaccgatgttctgctcaccttggccgagcatgacctttttcttcccctgtggtcgcctaacgtattacaagaagcacaggaagccgcctcccgaacactgcctgacgccgcacaacaagccttccgaaaaagactgataatgatggaccaggcattccccgaatcctccatacatgttgaggaatcggaatggagccaattcgatctgcctgacccggatgatcgtcatgtacttgcggctgcggcacagggacaagcagacgcgcggccacgcgcaatatcaaggattttccccagaaactgcttgactctttctccattcaggtcatcacgccagatgatttgctctgtgtattacttagacgaaatccggaagccacagctagcgccatacgtgagcttatcgattctcgacatcggccaccgataaacattcccgactttgctaaaagacttgaacgctctggcgcaacacagtttgcagccgctattgcgcatatacgacagcctttcggcaatcattcgtactttgaccagtaacccatgaattctggatgaattggggtgaaccggcggggctggaggcgagcgggcggcggattatggggcacaatggtgtcaaggaggccgccatggtcgatgactatactgccaaaatgactgagctgatcgaactcatgcgtctgatcggcaacgatacgcagcagtgcgaggtcaaggaatgcaagcgcaagatctcctcgaccatcaccgatacgttgtccgcgttctccaatggctccggcggctggatcatccttggcctgtctgaaaagaacgggttcacgccggtcgagggattcgacgcgcgcgccatgcaggaggcgctgagccaggcgtgcgagaagatgacgccggtggtgcggcccgtgatcgtcacctgcccgttcgaaggcgcgaatctggtgttcgcgcgcatcgacgaaatgctgccgcgcgacaagccctgcttcaccaccgcgctcggaccgcacggcggctcgttcatccgcaccggcgacggcgaccggcgcatgacctcctatgaggtcgaccggctcatcgaggagcatctgcagcccacgtacgatctggatatcgtgcccggcgccacgaccgatgacctcgacccgcagcttgttgccggattgttggcgcgcgtgcgcgaacagcatccgcgcgtgttcgccgaccgggacggcatcgatgtgctgctggatctgcaggtgttgcgccatgatgattccgacga

SEQ ID NO: 559 - DNA, 3424 bp, Unknown
  R48_24m  MAG No. k141_80445
ccgaaggtgaacacgatacgggaagggccgctgccctgccttggaatcaggtggggcagcggcccttcccgccattgcggatccggttatcacacgatctggcagaattcgatggtctcgtcattgggaccgtacacgttgaagtagcggatgccatgctcccagaagctgtcgatgtgctgaatctcggtgtccttgaactccagaccgagcttcttggcgttggcgaacgcggcctcgatatccggggtgtcgaacgcccagtggttgatggcgccggtgacgccgggtgccggctcaccctcccaggtttcgatggtcagatgcccgtagcgcaggaacgcgcaacggttgtcgccgttatggaacagtccggcgagttcaaatccgagcttttccgtgtagaacgcgatggtttcgtccagatccctggcgatcatgccggaatgctgcagatcggtggtgaaggcggacatgggtttggtcatgatgatctcctttgcattggttgatggatgatggttcatatcaacgtcgttgacgattggattgcgattaagtctagacggcttcggctgcggcaacaccgacgccgatgctctcctctgataccgtgttgaccgccggcaccgcatcgtcttgcggcgccgttccgttctttgccttagcgatccgatggccatgctcgtcgaatccgggctgccgcggccggatgaacaacgtcagcacgaatgccagcacatacaacgccgcatacgtccagcacacgccgccgtacccgatgaccggcagaagaatcgtggcgacgccgggaccggcgaacgtggtgaggcccgccgcgagattgtaggcggacaatgcggcgccctgtgtgccttcaccggcgtacaacgtcaggatggtcggcagcgacgagaaggcgcaggtgccgatgcccacgatgatcgaggcgacaatcatcatcagcgcgttcgcgccgaaccattgcggaatgtagtagaaggcgacggatccgacggcgagcaccgcgcaaccgaaccagcgcatcggccacacccatccgaaacgatccatgaaccaaccccagaaggtgttgaagatcagggtgaccacgaatacgaagccccagattcgcatccattcctcggttttgaagatgttgatgccgccgctgtgcgtggtgcacaggtataggggcatgatgacggggaagccgtacagcagcaggttgttgatgatgcggataatcgcgcagatgaggatcttgcggttggtgacgaggatggtggcgccttcggccagttccttcagctgttccttacggctcagcccttcgcctttgacgaccttgttcttcggcacgaacaggaagcacatgatcgtgccgacgatggagaacggcagcgcgaaccagaaggtgcggtattcgccgaacaccggcatgatgaagctcggcaggtatgcgccgaacacgccgatgcccagcgagaagcaggtccagaagaatccggtggccgaggcgagtctggacggggagatgtactgcgccatcagcaccacgaaactgtagatgaacagcgggtagccgatgccgcgcagggcgtacaggccgaggatcagcggatagatgcggctggggatggccacgccgaggaacagcaggtggatgccgatccaccagcatgcgccgaacatcatgacgcgtctggcaccgaacatctcggcaagcatgccggcggaccatccgcccgccgcggcgaacagaccgtacacggtgaccaacagcgaagcctgggatgaggtgaatccctgatccaccatgaatttggagaggaaggtgagttcgaagccgtcaccggtcatgaagatcgcgacggccaggaagccgagcatcagcacccggggaacgccgaggcgctcaagcagcctaatcatgagcaataaaccccttacccgaccttcaccgacgttgggaagatcgtttcacagtcatatgaatgttcgcacacagcagttccggcccctttgccggcgccccgcaccgcgggaggcatggccgccgtccgtgtgcgcgtggcgacggccatgatttcatacgtgtgggcggatggcccgtggcgtcactcgccgatcttgacgacggccttggaaacgcccttgatcttgccgtcgaggaagtcctgcacctcgtcgagccccagttcgtggctgatcaggcctccgatgttcattttgccggaggagaccagcgagatggcatcgcggaaggtgagcgggttgatgaaggagccttggatggtcagctgcttcttgtaaatgtcgtacgtattcatttcgaaatgcgcctcctgcgggccgacgccgaacatcagcacctgcgcgcctttcttggccgcggcgaccgcctgggcctgggtggcgggcaggccgaccgcttcgacgatcacgtcgtaggagtccgccggaatctgctcgcgggtggtgttgtacgtttcagtgacgccgaaaagctccttgttgcgctgcagcttctcgtcgaagattccggcaagatccacctgatgcacgccgtacgcctgcagcagctgggcgaagatctgccccatgaagccgtcgccgatgaccaacgccttctggtacgggtgcaacttgagcagatcgagtccgtgcaccgcgcaggagaccggttcgatggcggccgcgtcacgcagggagacattgtcgggcagcttgtagaccacagtggcgggagcggtgaactgttcggccagaccgccgtcgcgggtgacgccgaccgcgctcaagtggtcgcatagttccggacgctgagtcaggcagaattcgcactggccgcagtagatgttcggatcgacggccacgcggtcgccgaccttgacgttggtgacttctgaaccgaccgcggcgacgacgccggagttctcatggccgagcacgatcggcggaactgcggcagcggagccggggcgacctgcgtacaggtcgtggtccgtgccgcacacacctgcatatgcggtgttgatcagcacttcatcgggttcgatctgcggtgttggcatgttctggatttcgaatttcttgacaccggtcagtacaagagctttcatgatatgtcctttccactatgaaagaggttccggcagatcgttctgcctgatgattgaaaactatacactttcttaaattcttttgcaaatctcttttcataaagttatttgcaaagcgtgttgccgcagaaaatcaacgtttttcaaaaaaccaccatcacaatatgcacatcatcatcaaaaatagccagaacggcatctcaccggcagcgcagcaaacatcgatccgacattggcagagatggtcccgacatagcaagtcaacagataatttcaaagtgtttagaatgaggttatga

SEQ ID NO: 560 - DNA, 21630 bp, Unknown
  R48_24m  MAG No. k141_80912
gccgacgccatcaccgccgcctaccagaaggccgacccgagtcacaaggacgactacgccaagctcaacaaagaatggcacgccaaggaagaccagcttgagtccaagatcaaggagacttccgccaagaccgagaacctgccgtacgccgccaccgaatccgtggcctggcacttggccgacgacctcaagatgaccgacgccaccccgaagggctacgcccaggcttccgccaacgagagcgagccgaccccggccgacatcaaggacttccaggacaccctgaagggcggctccatcaagatgctcgtcttcaacagccaggaagccaactccaccaccgaccagatcaccggtgccgccaaggacgtcaacgtgccgatcgtggagctcaccgagcagatgccgaagcagtacaccaacctgctcgactggatgagcgcactggtcgaccagttcgccgccgccgtgaagtaatgcggcggtagccggcaatccgcaacagcaataaggggaataatcaagtcagatagcgaggcgttgcctaggggagaacagaacgcttcgctatcagggaaggctccttatatatcagggtgcttcggggatgtcccgaggcaccctttgcgttagggtgaatagttaggaaacggtaagaaaaatagtggaactatggattttccaaggttcagcggcaacaatatgcccttgaaaagtcacatacggaaacaggcgaatgagcgagaacactagtagtatcaccacagtgaaaccccatttcaagctttgggtcaaaaaggccgaagccaatgaagtcacgccccagcacccccacaagcccttccccggctgggcgtacggcgtgctcttcgttatcttcgacattattgttgtgacggcgctcgaagtgggcgtttcgtccagctccacccgtgtgcaactgtccagtccgaccgtcggattcggcttcgtgagcaagatgtggaccgacggcaatttcgtattcgtactcaacgtgatacttgtcgcgttgctgtacctcatgttgctgatgctgttcaacagattctggacggcaagcatcgtgattcttgcggtcggaatcatcgtggccgccatcgaacatttcaaggtcgagatccgttacgaggccattctgcccgccgacctcggcttccttggctcgaacaccggcaatatgctcaccttcattccggccggcgcgcacgtgaccatcctcgtggcacttggcgcgttcgccgcgctgctcgccctgattctggtgctgcgccacttcgacgggcgcaaaggtcgcatgatccgtacggacaacctgagcctgaacctcacctcccgtctgattctgctgctgctgccgattctggtgttctcgttgtactgcattcatgtgagcaccaccgattcgctggccaacaagttctcccgcgccttgggggacacgccatccatgtgggattccgtgtatgacgcgcagcgcaacggtccgctcgtggcctttacccgtcagctcaacccgaagatcatggacaagccgagcaactactccgaggagaccatgaagaaggtcgccgctcgctaccagaaggaagcggagacaatcaacgcctcccgcaccaacaacctcactgattcgacagtggtgtacgtgctgtccgaatccttctccgacccgagccgcgtgccgggactgaagaccaataaggattcgatgcccaacatccgcaagatcaaggcgggcaccacctccggcctgatgctctcctccggctacggcggcggtacggccaacctcgaatacatgggactttccggtctgagcatggccaatttcgattcctccctgtccagcccgtaccagcagctggtcccgagccagcattggacccccaccatcaaccagatgtggggtgcgcccgccaactcgctcggctaccatccgtacgagtccagcatgtactcgcgcgctacgaactacaagaagttcgggttctcgcacttctacacgctgaccggtccggacgtgatcaagtatcaggacaagattgacgagtcgccgtacgtctctgataagtcttcctatgattctgcgctggaaggcatcaggtccggcaagacgaacaagttcattcagatcatcaccatgcagaaccacatgccctaccacgagtggtatgagaacaacgactacaccgctgaatccaccacgggtacgccgctgggtgatgatgaacagcagtcgattgagacctatcaaaagggtgtggagattaccgatcaggccactcaggagttcctgaacgaactggatgcgctggataagcccgtcaccgtagtgttctacggcgatcacttgccgggcatctactcgtccgccagcgaggatggcaacaactccttggccctgcacctgaccgattacttcatctggtcgaataaggcttccagctcccaaggcaataaggcaagcgatgcagcctactcttcgccgaacttcttcgtggcacaggccgccgatcacatgaacgccaaggtcagcccgtatctggcgttcctgaccgaaatgcattccaagattgccgctatggaaccgcctgtggtcaacaaggtccaaggctgggatcgtattcccgaaggccagaacatctatctcgaccaaaacggcaacccgatgtccaccgatgacttcgacaaggaaaccaagcagttgcttgccgactacaagctcatccaatacgacatcaccgccggcaaaaactacctcaaagacacagattttatgacgttgccgtaaagcagacagcccggccgaaccgtaaagcggatagctcagtgggctatccgtaggtgaggggagcggctgtgccgcgacggaaaatccggaggattttcggtctgtaggcaacgtgcgagccgacaggcgagccagcaaaacgcgggcgaagcccgtccaagattgctgtaccgttgccatagtgctgtgagctccctctgatgagggagctgtcgaacgaagtgagactgagggagagatcccacagaccaatcactcccgccttacaataaagccatgaagcgcatcgatgtgaatcatggctggcggttccgttcaattggcaaggaccgcgatacggcaacgcggcagccagtcacgctcccgcacgatgcgatgattcacgagtcgcgcgaccctcgcgggccgcacctcgcgattcatcgaacgaggacatgacggcgtggccagctggtcatgggcgggctatgagggccgcgacgccatcgtgcatgtcaccgatgaccgccgcattgtggttgatgcaggcgggcatatcgccgtcggaccttctgccgaagctgtggatgtggaggtacaagtggactctgtggccgcacaacacgacctgcctgccaatgccgaactgctcggcgtggccagcgccaatcccatcaccgtcgatgaactcgccgacaatacctgcaccacctacttcggccgagcccaagctatttggcgaataccagccgaaacgtctggtattgcctgcagcacaaacgccctcatgccatcgtcatgacggtacgataggtacagtcgatgcccggaaaccgacccgggcatcctgcgggaaggatgtgccatggtcaatgcggatttcgctcagttgcgtcacgcctacgaatccgggtgtacgcggccattggcttggcgacgggcgcaattggatgcgctatgccgtctggtagcggacaatcgtgatgctttcgtggctgcggccatggccgatttgggcaaacccgcggcggaaaccatactgatggagctgaatctggtggctggcgaggcgcagttcgtccgcaaccggctcggactgtgggccgcgcgccatcccaaggcgatgcattggatgctgcaacccgccgccggctggacgatcgccgagcccaagggcgtggtactcatcatctcgccatggaattacccggtgctgttggctctggagccaatggccgacgcgctcgccgcaggcaacgccatctgcctgaagccctccgagctttcgcccaacacctcgcgcctcatcgccgaactcgtgccgcaatatcttgaccccgagtccgtgtgcgtggtcggaggcgggcccaaggaaaccggcgaactgctgaaatgtccgttcaaccatatcttctacaccggcggcgggcacgtcggcaaaatcgtcatgcgtgcggcggccgagcacctgacaccggtcacgttggaactcggcggcaaatcaccgtgcttcgtggatcgtacggtggatatcaatgtggccgcacgacgtatcgcatggggcaagttcaccaatgccggacagacctgcgtggcacccgactatgtgctcgccacgccggatgtggccgaggctctggccgagcgcatcgccgtagccatcaccgaattctatggcgaagatccgaaggcctcgcctgattttggtcgtattatcaacgatcgtcattttgaacgactgtgcaagctattgccggtcggcaccgtgccgtctgaggagccgagctcgccgctggtacaggtggcatcggcggtaggcgcggccatggatatggtcgggcggcgcttcaatgtcgtggctgccggacgcggaagcgcgggggagacagccggtggtggcaccggtagcgcgaacaatgcggcgaagccggcggccggttcgaatacggcagccgctgatagtgatgcgactgcctcggccgctgttgagccgagcgagattcacaaggtgcccggcgtattcgatccggccgggcgaatcgtttgcggaggcaaggtcgatcgcgccgcccgatatatcgcgcctaccgtgctatacggcacgtcaccggatgcgccggtaatgaaggaggagatcttcggcccgattctgccgatcctggtggttgaggatgccgagtccgcaatccgattcatcaacaagcggtcccggccgttggctgcatatgtgttctcgcgcgatcacgaggttcggctgactttcgaacgtcagaccagctccggagctttgggatattcgttgccgttgggtcacctgctgtccagccgactgccgttcggtggcgtgggcgcgtccggcatcgacgcctaccacggtaaagcaggcttcctcaccttcagccacgtcaaaaccgtggttaccaagccgcagttccccgacactctgcgcctcgtgtacccgcccttcaatgaagccaaggccaaactgttcaacatcatcgccaaattcagctagcgtgatatcgctcgctgatattgggtgatggcgttgtcatagtgacgttcgctgtcccggcagccacgtcaatcgattgattcgtgtaccgggccagatttttctgtcctggtatttgatttcgagtcattttctgcttaccgggacaaaactgacgccgaaagtatcgtccgcgtattacgaaaatggcggaatagtgcggttttgcatggaagggaattccaaatattcctatattcgaggtgttcaactgtcctggtttgcgaaaaagagccgaaatcagctaccgggacagaaaaatctggcccggtagccacgtcaatcgattgacatggccaccgggacaaaaatatgcggcagatgcgccgcttctgttacttcagggctttgaagccgatgtcgtggcggtagaacagtccgcgcagctcgagcttgtcgatgatcgcgtagaccttgtcctgagcggacttgatgtccggggcggaggtttcgacgagcaggacacggccggagttggcaatcagaccacccttgtcgtcggaggcgacgccggcatagtagacatgcgaatcctcgtcgacctcgatctcgggcacacgggcacccttgatgacgttctccgggtagccgttggaggcgatgaccacgccgagggtggcgttggactcatcccagatgaattcgggggtttcgccgtcgagaatggcggagatgccggcaccgaggtcggaggtgagcttcgggagcacgacttcggtttccgggtcgccgaaacgagcgttgaattcgatgaccttcggtccgtcggcggtggcgatcaggccggcgtacaggatgccggtgaacggcgtgccttcctcggccatgccttcgacggtggggcgcacgattttctcgatggcctcgtcgaccacggactgcggaatctgcggcaccgggctgtaggcacccatgccaccggtgttcgggccttcgtcgccatcgtgggcgcgcttgtgatcctgggagatcggcatcggccagaaatcagtgccgttgacgaagctcatcagggagaattcctggccgtcaaggaagtcctcgataacgaccttggcaccggcggagccgaagcgatgatcgatgaagatgtcttcaagcgcacgctgggcggtgtgctcgtccatggccacggtcacgcccttgccggcggccagaccatcggccttgatgacgatcggcgcgccatgctcgtgtacgtaagcctgagccatgtccaagtctccgaacgtctgatatttggcggtcggaatgttgtgacggtccatgagctgcttggcgaagtccttggaaccctcgatctgggcggcggccttggacgggccgaacgccttgatgccggcggcggcgaaatcgtccacgatgccttcgatgagcgggacttccgggcccacgaacacccagtcatagccattgttcttcacgaattcgataagtgcggcgtggttcgactggctcagctgcgtggtgtggatgccgtccttgagcatgcccgggttgccgggagccacggtgacttcgtcaatgctcggtgccttgagcagcgtgtaggcactggtatgctcacgcgcaccggagccgttgaccaatactttctgacccatgttattccttcctaaagtctttggctcccctctttgaggggagccggtatctggagctacttcagtacgatttgcgtgtcggtggtgtcggtggtgatctggccgagcacgtaggcgggttcgttgttgtcggcgagcagcttcagcgcctcgtccttgcgggcggggtcgatggccagcaccatgccgatacccatgttgaagatgttgtacatctccttgtgatcgatgttgccggccttctcaagcacgtcgaagatcgggagcacaggccaggtgccaagctcgatctcggcggccagaccgtccggaatcatgcgcgggatgttctcgatgaagccaccaccggtgatgtgggccacgcccttgaccacgcccgccttgaacagcggggagagggccttgacgtagatcttggtgggggtgagcagcacgtcgccgagctttgcgccgcccagctcggcgagctcagtgtccacggtatagccagcctgctcgaacagggccttgcgcaccagggagaagccgttggagtgcacgccggtggaaggcagaccgataagcacgtcgccctcagtgatggtggaaccgtccacaatggcggacttttcggcaacgccgaccgagaaaccggcccgatcgtactcgtcctcgtcgtacatgcccggcatttcagcggtctcaccgccgaccagtgcggaaccggcctgcacgcagccgtcggccacaccggccacgacctgctcaagcagggccgggtcgttcttgccgcaagcgatgtagtcaaggaagaacagcggctcggcaccctgggcggcgatgtcgttgacgcacatggccacgcagtcgatgccgatggtgtcgtgcttgttggccagcttggcgaccatgagcttggtgcctacgccgtcggtgccggagatgaggaccggctccttgtagcccagggaggctaggtcgaacaggccgccgaagccaccgatgccgccgaccacgccgggacggttcgtgcgggccacgtgcgacttgatgcgcttgacgacttcgtacccggcttcgacgctcacgccggcgttctcatatgcttttggcatttggtggggcctttctgttctattttcaagctcccttgccggggagccacctgcaaaaagcggattttcgtttgtactaagctccccttgtcaggggagctgtcagcgaagctgactgaggggtagtcgtaaagaccaatgactgaggtgtagtcgaaggaccggccgaacctactgcacgtccggctgcacggtgttgtactcgttgccgatgtacttgctcttgtacagcgcgaattcaggcagacgcacacggtcctcgggcgtgagggacttcaggaagtcggcctcgtagtcgtcgagcgcagtggggtagtcgccgttgaagtaggcgacgcacaggccaccgtatggggcgtcggcgttcagtccgatggattcgaccagaccgtcgagcgaaaggtaggccaaggaatccgcgccgatgtattcgcggatttcctccacgctcatcttggctgcgatgagttccttggtggtggagatatcaatgccatagaagcaagggtacttcagcggcggggagctgatgcgcatatgcacttcagcggcgccggcttccttgagcagctgcacgatgcgcttggacgtggtgccgcgcacgatggaatcatcgataacgataacgcgcttgcctttaaccacgctgcgcacagcagagagcttcatacgcacaccctgctcgcgcagttcctgcgtgggctgaatgaaggtgcgggccacatactggtttttgattaggcccatttcgttgggcaggcctgctgcttccgcatagccggatgcggcggacaatgaggagttcggcacgccgataaccatatcggcctccaccggggattcggcggcgagacgtgcgcccatgcgcttgcgggcggagtgcacgttgacgccatagatatcggaatccgggcgtgcgaagtagatgtattccatcgagcagatggccagctgcgtgttgttggtgtactgcacgatcttgtagccgtgatcgttgaccaccacgatttcgcccgggcgaatgttgcgcaccagctcggcgccgacgacatccagtgcgcaggtttcggaggcgagcacgtaggcgccgttcttcatcttgccgagggagagcgggcggaagccgttcgggtcgagtgcgccgatcatggcgtcttcggtcatcagcaggtaggcgaaaccgccatgcaccgtgttgagcgcttccttgagcttgtccataaaggtgcgctgcatcgaacggcgaatcaagtgcatcagcacttcggtgtcggagttcgaatggaagatggcgccttcgtcttcaagcttgcggcgcagtgacgggcagttcgtcaggttgccgttatggcacagagccacgtcgccgtcatggaagcggaagatgaacggctggatgttgtccgtggtgcccgagccggccgttgcgtaacgcacgtggccgatggcgcaattgcccttcagtcgttcgatttcgcgctcatcgccgaacacctgggtgagcaggccgagtccgcgatgaccgatgagatgaccgttatcgttggagacgatgccggcaccttcctgaccgcgatgctgcagcgcgtgcaggccaaaataggtgagtcgtgaggcgtcggggtggccccatacgccgaagatgccacattcctcatgaatgtcttcgagttcagccgacaagccaaagctcctttttcaaacaggggattaactatctgccaaccctaccaatcggcggctacatcgcgtgttgtggggtggtggaacttgttggggttcgcggacgcggtttaagcaccagatcagttgagtatgaatagtggcttaggattttggcctttcgtcgtatgaatccggtgtttgtttttcggcttcgtctcagtgcctgaaatggctgaagaactcgatggtctcgggatcctgcgactcgtccatcacctcggcgggtgtgccgttctcggcgatgacgccgtgacggagcagtacgatgcggtcggccgcgtcgtgggcgaagctcatttcgtgcgtggccatgaggattgtggtgccttgggcctttaactcggcaaccatgttgagcacttcgccgaccagcatcggatcaagagcagatgtgatctcgtcaagcagcagcagttccgggtcggtcatcagtgcgcgcgcaatcgccacgcgctgctgctggccgccagagagctgatcagggtaggcgctggctttatcgcgcatgccgatgcgttcaagcagttccatagcgcgggtttcggcgcgatccttgctccagtggtgaaccttgattgcggcaagggtcacgttcttgagcaccgacatgtgggggaagaggttgaactgctggaacaccacgccgatacgtgcgcgaatcttgtcctggtcggcacgcgggtcggtgatatcggtattgcccagccaaatctggccgtcatcgacctgttcaagcaggttgacgcatttcatcaatgtggatttgcccgaaccggaaggccccagcaaagccaccacctcatgttggtgaatgtcaaaggaaatgccacgcagcacctgcgtgtttccaaaggatttgcgcacgtcatcaagacgcagcaccgtcttgttgctcacgggggagtcactcgcctcggtggtgatattggtcatttcgctcataccgttcctccgctgagttcgcgcttacgcagacgttccgtgtaccagtcgttcagcaggatgaacggcacgctcatcaggatgaacagcaggctggcgaccacatacggcgtgaagttgtaggtgctggccacgtcgatctgtgcggcgcgcacggcatccaccgcacccagcacggaaatcaggccgacgtccttttgcatggagatgaagtcattcatcagtgcgggcgcgactttgcgcaatgcctgaggaatgacgatcagtcgggtcgtctggccggaggtcaggcccaacgagcgggccgaggctcgctgagaaggatgtacgtcgttaaaaccggcacgcagcacctcggagacgtaggcgctgtatcccattaccactgcaatggtgccgagtaccgagggatcgatacggccgaacaagcctaggccgggaatgccgaaaccgattagatacagcacgacgataataggcacgccgcgcatcacagtcgtgtagatcaatgccaggatacgcagcgggaacagaataggggagcggctggtgcgcaccaatgcgatcagcgtgcttagaatcgccacgccgaccactgcgacgagcagaacgcggatgttgagccataggccgtcaagcacatggggaaacgatttgacgaagtattcgccggagaagaaggtctccttgactcgtggccagccgggggagagcttcaggccgatgacgatgaccacaacgaacacaatggtgctgatcagactggtaatcgtcgattgaatttgctgatgaacacgatattggcgtcgtctgagctcgacctgacttacctcgtgtccgtcaggggcattgtactgcctggtttcggttggtgctgcggtcatgtgatgaatgtcgctcgcttcctgaatgccggaatggccgggtgtcgcaggaaaatttccgcagcgcccggccaaggtgttgtgaccttatgatgtgagcctactccacttactttttcagttcggtcaggtcggtggtgtactcggccagccacttgtcctgaagcttcttgatggtgccgtcggcgttcaggtcatccactgccttggtcacggctgcagtcagcttggaatccttcggcagcacgatgcccatgccgctcttgtcttcggagtcaggcagacggccgagcaccttggcgtccttgacctgctcggactgcaccatgtacacgcattccacggtgctggtgaccagtgcgtcgatctgaccggcgtcaagtgcctgagccagtgcggcatcatcattgaacgtctggatgtcgtccttgatgttcgccttggcgtagtcgtaggcaagggtgccgaccatgacgcccacggtcgcattcttcagatcggataccttggtggcgttggcgaacttgctgtctttcttgaccacgacggactggctgtcgttgtagtagctggacgagaagtcaacggccttcttgcgctcgtcggtgatgccgaactgctggatgttgagatcccagtccttggcaccgggagcgatggcggtgtcgaatgcggtgcgggtccacaccacgtcgctcttcttgaaaccgagcttgtcagccactgcgtaggcgacggccgcctcgtagccctcaccgctttccggcttgtcgttcataacccacggctcgtaggccggctgtccggtggcgatggtcagcttgcccggcttgtacgtctgctgggtgatatcgttcgaatcggcggaattggatgcggtggactggccggaaccgcaggctgcggtgaacgacagagctaggatgctggcggtggccgcaatggtacggacgatgtgttgcttattgaacatgggcttcctctcctcaagtgttcgtcatgcacacggttcaaagccgtgcttgatgcatgcgcgccaattgtatggctattgggttactacaaaacagcgatattctcggatgctggttatctccattgcttatggccggctagagccgcgcaatctggcgcgtaagcgaacggatatctcatattggcgcagagcgaaatggcgttcactgttcgagtgtgaagccgtcgaatacgaatcccggactgaccacacaggagaccagcgcatcgccctggccaggcactgtgcgctgccagacgccagccggtacgaccgcatgtcccgatacggttacgtcggcctgatcggtggtgatgccggaacccagggtgattacggttcgcttggattcgtcggattccggagtctcgccgctgccgccgagttccagcttgaccgatgccgggccatgccacagccagacctcatccgcatcgaccttatgccaggcgctggcatctccctcgggcagcaggaagtaaatcagtgacgatagcggtcggcttgaggcctcatccgtgtgcggggattgccagtcacgcgtgtaccagccgccttcggggtgggcttccagtccaaggcgttccactatggaccgggcgtatggactcatgtctcgcaaagcgacgctcataatgagatctcctgttcttggcgggtttgctggtttttggcttcttgatatcaggtcaggtcaggtcaggtcagcggtgtcaccaggcgttgttgtaggcttcgcgcccggatatcaccgtggctcggttcgtgcctgcgccgtgcttcaccagtgtttccagcgtttcttcgatgccggccggagatgatgtgtcgacggggatgtcgaagaacgcgaaatcagccaatgcgcccgcgttgatctgtccaatgcggtttcggcccacgtgcatgcccatggaggcggcgccgcccagcgtcatcatacgaatcaggcgatgtgtcagatcgtcgctggcatagccttgttcgcgggccaggtcgtaaagcatcgacacgtcatcaagcagatcgagggtccgcgtgctggagagcgaatcggtgcccacgcttaccagattgccttcctcgaggtattcgcgcaccggtgcatctttgccggtgttggtaatgcgattcgatcgggggcacaatgccacgcccacgccgcgctgacgtagaatacgccgatcctcgccattggcccacacgccgtgtgcaatgtgcacatccgggccaagcgagccaagctgatcgacgaactggatggcggaggcacctttgcccacgtctttgagctgccggtagctttcccaatcgtggtcacgccagtcggacgccgaataagtggtgagcaccggcggataagtgccggcctcgagcggggtctccgccagatggatatgcagtcgcatgttcagttgacgagcaatgtctggaagatcaacgaacggttcggactccagcgtatacggagcatgcgggctgatgccgaggttcggcagctgctcctcgttcatccggcgcaactgccggatgagctcggtgcggcccttttccatccattcgtcgttgtgccagcccattacctcccaataagcgatgccgtgcatgccctgcgaagccagcgcgccggcggcgtccagatcggtgacgatgtctgcggcggccgtcgtgcccgattcgaccatctggcgagcaccgtcctcggcccactgcttccatggctgggtcttctgcgcctcggcgtacacctcgttgaatgccagttcccaggcgcggaaccgatcgtaggtgccttgcccgacctgcaccatgccgctgtactgcagatgagtgtgcgcgttgaccaatccgggggtgagcaccccatcccaatgccgttcacggatggtgccgtgagacgtcatttcctgcttcagcgcctccagcacccagcggcgtttacctacatgaaccacgcggtcgccatgtatggcaactgcgccatcgatgatgacggggcccgtcacggggatgatgagtttggcggaatacagtgtcacatcatcgataagctcggtatcgacggtcggccaggtgttgtcggtcatattctcctcgctgcgttgtgttcggtgccgtgcctatggctatcggtcggcgttctctcggtcgttttccgcgaatctggtcagtcgccaatcgtagccgttgtcctccacggcatggctggctcggtatccgcgcgccttgagcgcgctggcggcgatgcgctggtcggtcgctgcgtcaagtctgataagcgtgtgatccagtgtgcctcgatgttccagaagatatgcgacggcgctggcctgtacggcgaagctcagatccatgatctcgattggattgccgcctcccaccgtgtagttcacgccatcgccgtcggcgattagcgtgagcgttggtccgtcgggaacaatgagttgcgcggtgtccctgttgacctgtgggatgaagtcgcttacctcgtccaaggcgatttcgttggcgatgccgccgatcactgcgagcgccgcgccctcgtgcattgcgcgcatgtgctcaagtgtgactgtatgtctcacgccagtggcggacaccaccatatccgcgcaagggagtgcctcgtcaatgtcttgtgcggcgaagccgtcgaacaccgctttgagtgaagccactggatcgatatcgcagatggtgacttcggctccaagcgcgcgaatacgccgtgcgaagccttggccgaccgggccgtagccgatgacggtgacgttcttgccgtcgaatgcatgctcgccgagaatgcgctgcatggtggtcacgcatgtctccccagtgccgtgggcgttgtcgaatccggttttcagcacactgtcgttaacggctacgaccgggtaggtgagcgctcccgcttcctgcatctgctggaacgcgcgtacgccactggtcgtttcctcggccactccaatgagattcgccgtgagctcggggcgttcgagcgaggcgaggcgggcgaagctggcaccatcgtcgatgatgatgttcggctgtatcttgtccagcaggcgcagggctgcctcgtgcgcctgttccgcggtccaggctcggctggattcgaccgtgattccttctcggcgcagctgttccgccactcggggatccgtggaatccgggccgcaatatacgccgacgattgcgccggcggccttaagcttgcgcagcagaatcgcggtttttggctccagtatcaggcagacggcaatacgaatgcctgagaaatcgacgcgggtggtgaggtcatccatggtgtcgcgtaataccggcatgtgctgttccgcgtactccattgcctccagcccacttgccgtgcgcatgtcggcaatggaatcaatgctttgtgtgccgtcacagaggaattcctcgctgtgcccgtcggtcatcgtggcatcttcgacggtcatgccccattgctgggcctgagacttgatttcggcacgcttctgcggctccggaatcgcgaggcgggctcctgccagtgatcgattcgttttctgggatcgggctgccgcccacgccgcaaaatcgctgtctgccgtaatgcttttcttcatattccccatggtacgcatgcatgccgctgctctgccgctgcgcgtgtggtgtgggtgaagagcgtgcttgggcgcgttgcgtgcgtcgacttcggcagcttcgaacagacatgttgtatcgaacaaatgttcgaccgtattgatatgctggtcgggccggcggtggtaaggaggtgatggcgatgggcagcggaacggtatcgacgcaacgcgagcatacctatattgccattgatctcaagtccttctatgcctcggtggagtgcgcggcgcgcggactcgacccgttgaccacgcatctggtggtggccgatgaaacccgcaccgataagacaatatgtttggcggtctcaccctcgctgaagaactatggcattcccggtcgtgcgcggctattcgaggtaaaacagcgcctgaatggagtcaacatcgagcgcgcggtccatgctcccggcggccgattaatcggggagtcctgcgatgcgcgcgacctggaacgctcgccgagactcaaagcctcgatggtcatcgccaagccgcgcatggcgcactatttggaggtcagcgggcaggtatatggcatctacctcaaatacgccgcacccgagcacatccatgtctactcgattgacgaggtgttcatcgacgtcacgccatatctgcgctcgctgggtatggggccgcatgcgatggcgcgaaccatcgtgcgcgaaattctcgatgaaaccggcatcaccgccactgccggcattggctccaacatgtatctggccaaagtcgccatggatatcgtcgccaagcacatgcccgccgacaaggacggcgtgcgcgtggccgaactgaatgaaatgtcatatcgtcggctgctctggagccatcgtccgctcaccgatttttggcgggttgggcgcggctatgccaggaaactcgagcacgccggtctgatgaccatgggcgatatcgcccgatgctcggtgggtcgtgcttcggattactacaacgaagacctgctatatcgcatgttcggtgtcaatgccgaactgctcatcgaccatgcgtggggctgggagccgtgcgaaatcgcggacatccaatcctatgagccggatgcgcacagcatcagcagcggtcaggtgctcaccggtcccgccgactatgccacggcccggctgatcgccaaggagatggccgatgcgctcgccctcgatctggtcgataagggggtgatgacgaatcggctgacactggcggtcggctatgacattggcagtctcgatgcttcgaagcttgattcatgcgcagaccgggcgatgaggcgtgccgccgaacgcgcggcaaagacctatcaagggccggtgaccgttgaccgtttcggtcgtcgggtgcctaagtcggccgtggggtcgattggattgggcgattttacgtcgtctgccgcacgtattcgcgaggcgatgaccatgctgtacgagcgtattgtggatgcgcggttgctggtgcgtcgactcacagttgttgccgatgatgtggccacgcccaaagaactggcggcgggcaaacgctatgagcagcttgatttgttcggtgatgatggcgatatgcgatatgactgtgatagcacggaatccggtggcgacggaagcgggcgtatgccggcttgtggggacgatgccgccgcacagacgttggctcgagagcatgatatccagcgtgcgctgctggatgtgaaacgtaaattcggccgcaacgccgtcatcaaagccatggatatggaagacggtgccaccggtcaggctcgcaaccgtcagatcggaggccatcgcgcatgaccctgcaagaaacccatgcatacgacgacatcatcaacctgccacaccaccaatcacgcaagcatccgcatatgtcccgccaccagcgggccgcccagttcatgccgttcgcggccttgaccggatacaaccaggtcattgagcaaacagcaaaaaacgccgaaaccgccatcgcccaggccgaggcccaaggcgataccgatttcggcgcttaacaatcgctcccgttggaggaagtctcagattcgtcagcccacgtgacgcgagagccggccggcagcggctggcccttgcgatacttgccggtcagcagaccctgcgcgagtggggagaacgtggtgataccaatgccgagcttgcggcaggtgcccatgatctcatgctcgatatagcgatcctgcaggttgtactgcggctgaaccacggtgattgggtacaggttgtagcggtcgataatgcgctgggcttcctcgaggcgggccgaaccccactcttcggaaacgccgtaatacagcaccttgccctgggcgaccaggtcgctcatcgcgcgcaaggtctcggtaaggtcggtggtctcgtcaaaacggtggcaaaagtacatgtccagataatcgatctgcatgttcttcagcgtctggtcgatgctttcgaaaatgtgcttgcgggacaggccgcggtcgttcacgccttcgccggtggggaagtagaccttgctggagatgacgagttccttacgcgggtactgcttgagcacttcgccgaggaatcgttcggcggcgccgcccgagtaagcgtccgcgcagtcgaagaagttgacgccggaatcgtaggcgagcttcacggtctccttggtcacgttctcggccgctgtgcccttgagatccgtgacccagctgcccagcgcgacctcgctgatcttcagtcccgacttgccgacgctgcgatacttcatgtgtactccttgatgattaatcgtcaccgccgtctcttcatggccggccgtgaacgctaacaattcgattaaaacagttcaaccccacttgaacgcaagttggtggctaccgcgatacgccggttgtagtcccgtgaccaatttgccgcaatcagtaactgctaatatatgagtaattattggctttttaggcataaattgctaatatattagtatgttttctttgttggatgagcctatgcctggggatgtttcggccgctattgccgaacgcatggttgccagacgcaaagagcataagttgtcgcaaacggctctggctagaaaatccggtgtgagtcttggctcaatcagacggttcgagcagcagcacgaaatctcattgacggcgctcatcaatatcgcgtttgcgctgagttgcgagcaggattttgagacactgttttcacagccgtactatgcaactatcgatgatgtcattgctgcgcgggagagggaagcgcgatgagcgagacagtgccgttggatttatcggttgatcgggtacgggtgtttttggatggtgaaattgttggctcgctgacactgtcgccggcaaaaacagtggcgttctcgtacgaaagctcgtggttgtccagtggattcagcataagtccgctgagtctgccattgcgtgagggggtctttgtcgccaaaagagatccattgcatggtttgtttggggcgttcgatgacagtatgccggacgggtgggggcgtttgctcacggatcgtcttctgcgtcagagaggaatagacccttactctatcggaaccttgacgaggctgtccattgtgggatcaagcggtatgggagccttggaatatgaaccagcggcggacattgaaaatggtgttgcagctactgacttggacgatatagcgagagagtgcgcgaatcttctggaaactgatttttctgaggatttggatcagctttttgcccttggtggctcgtccggtggcgcgcggccgaaaattctgactgaggttgatggagaagaatggattatcaaattcccctcatccgtagactcggcgaatatcggagaacaggagtatcaaatttctgtacttgcgcgcgagtgcggcattgatatgccggaaactcgtctgttcgcatcagcgcaatgttctggatattttggtgtccggcggtttgaccgtacgcgggatgacgatggcaccgaacataaggtgcatatgatttccgccggcggattgctggaaacgtcgcatcgtattcccaatttggattacggactattgatgcggctgactatgcgtgtgtgcaacagcgcagaggagtgcgagcggttgtaccgtctcatgtgctttaacgtgttcatcggaaaccgcgacgatcatgcgaagaatttctcttatctctatgatcgttctcgccaagcgtggagattgtcgcctggatatgatttaacggaaaaccctggaatcaacggcgagcacactacttcggtgaacggaaaggggaagaacatcactgttgcggatttgactggtgtcggtgtgaaggctggtatttcgcgggcgcgctgtattgctattgccaatgagatgcaagataagattcgtgatgctgggtttgccgtccgagattgatggtctcgccatacttagtttttccaatacgcattctctagtacgtttgccttttgaaaagcttcgcgataggcggtgataaggtccggcaaacgcattgaggcgttggccgggctggtggagggcagttgggtcataccgatggcgatgccggcttcggtcaggcgcggctcgataagtttgcggtaaagttgcgctgatttcgcgccggttgcgaagatgtgggcgattggagcgccgcgcaagattggtgtcaagtcgttgggcgcggcattgcggatgctggcatcgctggctccggtgatatcgcaagaagcaatgacatcccataacgcaatgtggtggcgcagagcaaacgcacgacgggactcaggtgaatcgccgacggcgtcggcaggatcagcggagttggcaaacagcgcctgcatcaccggccaaaaccggttctgcggatgcatatagtaaaacgccgccgctcgggatttcggactcggcatcgatcccaaaatcaaagcccgggactcaccatcccacaccggcccaaacccatgctccacatgttcgctcataagccccatattatgccgtttggtcttgaaaatagttcgggggcggacagttaatgtcatattccctcaaagagaagaaggatttacaatgaaaaaaggtggaagaaattgccagtgaaggcacaagccattcttattggtgttttagtcgtcgtttgcgcaattgctgcggtatttggatataggtcagttgacaatatgctgcatcctcaggcgactctgaccaattcggttgtggccaggcagttggaaaagattcaggatcttactacggccaaggaaaccgattttggttttgaagagtataaggaaggcaacattgctccacgccagatcgtcctcgaagccatccggcaacggaaccagcggattcttccacatccggaaatccgcaaccagcc

SEQ ID NO: 561 - DNA, 13318 bp, Unknown
  R48_24m  MAG No. k141_81010
ccagttcagccaatacaggatggcgatggtgaatgcggtgccgggtccgatgaatcgcttcgcatacatgtggaagctgccggcatacggcatggccacggacagctcgcccagcgagaccattacacagtagacgagcaaggaaccggccgcgtaggcgaggatcgcgcccaaaggtccggcctgatgaatcgtgtaaccggagctgacgaacaggccggtaccgattacgccgcccagggagatcatcgtcaggtggcgcgactccattttccgttcgaggccggtgtcgtccttgggattgccggctgacgccatgcttaggtctccttcggtcagatggtcggatggtcagagggttgtgcctcatgtcggttgtgcgggctgcactcgatgccgcctaccatatgatagcggtagatgaaacggctcacgaaaggcggaagtgaaatgacgggtttgcttatcggatcgcatttgtcgacggctggcggctggaacgagctgctggaacgctcccatgaggagggcggcaccgcgttcgcgttctttccgcgatctccgtatggcaaacgttccaaggcgctcgacctggccggcgcggcggtgttcggcgcacagctcagggccgaaggctatgggccgttggtcgtccatgcgccgtacgtctacaatctggccggcaaggatgaggccaagcgcgcattcgccatcgaggcgctggccgaggatatcaagctgctgaccgccatccgcgaggccggccaggaggtatatatcaacattcatcccggcgcgcatgtgggccaaggcgccgagaccggctgccggctgattagcgaggggctgaatcaggtgtttgagcgtgcggatggcgttatggtgttgctggagaccatggccggcaaaggcacggaatgcgggcgcaacttcgaggagctcgccacgatcatgaacggcgtggagaacaaggcgaacgtcggcgtcacgtttgacacctgccatgtgctggatgccggctacgatttggtgaacgactacgatggcgtgatgcatcagttggatgtggtgatcggattggccaaggtcaaggcgattcacgtgaacgattcgcagtttggcctcgactcgcataaggatcgtcacgccaacatcggggagggccagctcggcatcccgtttttcacgcgactggtcaacgacccgatcatggccaagctcccgatgatcctcgaaaccaaggagcagacgcccgccacgcatcgcgacgagatcgagttgttgcgcggattggtgcaaaagtagtcgtagtcgaccaatgtcgagcagaagagacctgtttttgactgagggccatacgaggttagctatcagtggggcgttgattgatccgtcttcatatacagctgcatagccggttccagctgcaagagctcaaaacagacgcatgggttcggtggaatccaatggctgaataagacgtttgccgtcgctgttcagtggcgcgacttcgtgaaattgcagatgccgggaaagcatggtacccgcttcccgcatggaatctaacagtgcggctccgtcaacggagcggtccagccatgaggcaaccatattccgaggcgccagcaggggcatgcgatcatgcaccttgacgaactcgtccgcggcagggcaggtgatgatggttgcggtcagctgccatggcgatgcgggagacggcctccaccatgagtacaggccggccaaagacaatagttcatcatgtggtgcgtgaaaatagaacggcctgcgacctttccattcgtagtagccggaagcggggatgatggctcgcatggattttgtggattcggcgaacgccggcttgacatgcgcagactccacacgcgcattatatgtggggtagctcagcactttgttggcgctccatcgcggcaccagcgaccaataggcaccggtcagatgacggcggccatccttgccctgtgccaccacgccaatgttctgcatgggtgcgatgttgtaggaaggctgtggcagagtgtcaacgcgcacgtcatcctcgtctaccgcgaactgtgaggccacggcatcccaatccaaatcaagcgcgaatctcctgcacatgcgcccagtctatgccatcaatggaatcaatcccaggccgtatgaccgatattcatggcgattttcctttttgttggccgctctggttccgtagcgatacgaaccaacgaggaatagcccagaatgtaggacgggttcggcaatcgggacggggcgtgacctagagtggcgcatgaccgaacaccaacaaagggaggaccatgtcggttttggacgaactggtggcgggagcgctggaggatcagcgcgcccgtgagctcaccgtatcgcttgaggacgtgaagaaggccgcgctggcggccccggctccgattgacgcgacacgatggcttaagcgcgccgacggcatccccgtgatcgccgagatcaagcgcgcgtctccgtccaagggccacctctccgacatcccggacccggccgcgctggcccgcgagtacgagaagggcggcgcaagcgccatctccgtgctcaccgaaggccgcaaattcctcggcagcctcgatgatttcgacaaggtccgcgccgccgtgcatattccggtgctgcgcaaggacttcatcgtcaccgactaccagatttacgaagcccgcgcccacggtgccgatttggtgctgctcatcgtcgccgcattggacgacgcccagctcaagcacctgctcgacctggcgcacgagttgaacatgaccgtgctggtggagacgcatacccgcgaggagatcgaacgcgcccgcaaggccggtgccaaggtgatcggcatcaatgcgcgcaacctgaagaacctcaaggtggacgtgaacaaatacaacgaactcgcggccgatctgcccgataacgtcatcaaggtggcggaatccggcgtattcggcgcggtcgaggtcgaagactacgcccgcgcgggagcggatgcggtactggtcggtgaaggcgtggccaccgctgatgatcatgaacttgcagtggaacgactagtaaaggcaggagcacaagtgaaagcatccgaaaccaccccgctcagcgaacatcagggaccgtactggggacagttcggcggccgctatgtgcccgaggccctcatcaccgccctcgacgagctggagcgcgtgtacacgcaagccaaggccgaccccgaattccacaaggaattcatgacgctccagcagcgttacgtgggccgtccgagtccgctgaccgaagccccgcgcttcgccgcactggtcaagcagaagaccggtctcgacgcccgtatcttcctcaagcgcgaggacttgaaccacaccggcgcgcacaagatcaacaacgcgctcggccaggccctgctcgtcaagcgcatgggcaagactcgcgtgatcgccgagaccggtgccggccagcacggcgtggccaccgccaccgtgtgcgccatgctcggcctcaagtgccgcatctacatgggccagatcgacgcccgccgtcaggccttgaacgtggcccgcatgcgtatgctcggcgccgaagtggtcgaggtgaccctcggcgacaagatcctgaaggacgccatcaacgaagccctgcgcgactgggtcaccaacgtcaaggacacgcactacctgctcggcaccgtcgcgggcccgcacccgttcccggccatggtgcgcgacttccagaagatcatcggcgaggaagccaagcagcagctccaggactggtacggcatcgaccatccggacgcgatctgcgcctgcgtgggcggcggatccaacgccatcggcgtgatgaacgccttcctggacgacgagcgcgtgaacctctacggctacgaagccggcggcaacggccccgaatccggcaagcacgccatccgcttcgcccccggcaccggccagctcggcatgttccagggcgccaagagctacctgctggaaaccgacgaaggccagacgctcgacacctactcgatctccgcaggcctcgactacgcttccgtgggccccgagcacgcatggctcaaggacatcggccgcgtgaactacagctgggccaccgacgaggaggccatgaacgccttccgtgacctgagccagaccgagggcatcatccccgccatcgaaagctcgcacgccgtggccggcgcgtacaaggccgccgccgatctgaaagccaagggctatgacaaggccgtgatgatcgtgaacatctccggccgaggcgacaaggacatggccaccgccggcaagtggttcggctacctgaccgacgatcaggccgccgcgctcgatgtgaccggcgcccacggcaatactgtcgcctgaacaagaagaggagattgttgattatgaccaatgaagcaaccacgccgtccggccagccgctgggcatcagccacaagcccagcaagtcgggcgctatgttcaccaagttcaaggccgagaacaagcccgccttcatcggctacctgccctatggcttccccaacccagacgtctcgcttgacgccttcaaaacgatggtcgagcacggcgtcgacgccgtggaaatcggcctgccgtactccgacccggtcatggacggcccggtcatccaggctgccgcctccatcgccctgaacaacggcgagaccatcaagcgcgtgttcgaggccgtcgaaaccgtggccaacgccggcggcgtgccgctcatcatgagctactggaacctcgtgtaccactacggcgtcgagcgtttcgcccgtgacttcgagaacgccggcggcgccggcctcatcaccccggacctcatcccggacgaggcgggggagtggatcgaagcctccgaccgtcacggactcgaccgcatcttcctggtctccccggactcgtccaccgagcgcctcgaaaccgtggcccgcaacgcgcgtggcttcgtgtatgcggccgcccgcatgggcgtcaccggcgaacgcgccaccatcgacgcctcgcccgaactcctcgtggagcgcacccgtcaggccggtgccgagaacgtgtgcgtgggcatcggcgtgtccaccgccgaacagggcgccaaggtcggctcctacgcggacggcgtcatcgtcggctccgcgctcgtgcacaccctgctcgcggacgacaacaagaccgcacgcgacccgaaggaaggcttgaagctgctcgccgccaagagcgaggaactggccgaaggcatccacaacgcccggtgaacgcccggtgcgcctcacgcgggttgtgccgtgacacggtagggtagtcacagagcatcaagcacaacccgcgcgtggacacaccatgagcaccagcaagtagaggcacgatgaatctggcttatattccctcgccgaccttctccaagttcgagatcggcccgttcactatccacatgtacgcgatctgcatcctgatcggcatctgcgtggccgtatggatcctcaccacacgttggaagcggtacggcggcaccttcgaccagattctcgacgccacgctcgtcaccgtgccctgcgcgctggtgggcgcgcgcctctaccactgcatcaccacgccggccgactacttcccgcccaccggcaacttggtcaacatcctcaaggtgtgggaaggcggcatggccatcttcggcggcatctccgtcggcaccttggtggcgttcctgtggtgccgccacaagcactatccgttcgcgatcttcgccgatgccatcgcccccgcgctgcccgtggcccaggccatcggccgactcggcaactggttcaaccaggaactctacggctggcccaccacgttgccgtggggcctgaagctcaacgacgcggacgccatcggcaaatccgaaatctgctattccggcgcgcaatgcccggactacaggaccacgctgttccacccgacgttcctctacgagatgatctggaacctcatcggcgccgcgctcatcatctacctcggccacaagctcgccgaccggctcaaggccggccagcagttcgccatgtacctgatgtggtacggcctgggccgcacctggatcgagaacgtgcgcatcaactactccacggtgatcctgggcctgaggaccaacgtgtggaccgcgatcatcgtcttcgtgctcggctgtatcctgttcgtcgtgctctaccagtacggtccggaccccaaggcgcaggcgcgcgggcttgcggcggtcaccgccgacgagctcgaacgccagagcatcgaagaggaacagcttcgtcagaaggagcaggccaagcgcactaagtgacaccacaataaacagcgccgaaacagcgcgaaacacgggaccccaagtcccattgcacagataaggtaggaaaccatgagcaatatcgcaatcgcacccagcatcctgtccgctgacttctgcaacctcgaacgtgatctcaaggccatcgccaacgccgacctggtccacgtcgatgtcatggaccatcatttcgtgccgaacctgaccctgggcgagccgatcgtcggccgcatctgtcaggtcaccgatctgccggtcgacgtgcacctcatgatcgaggacccggaccgttgggctcccgaatacgccaagctcggcgccgcctccatctccttccacatgggtgccacccacgcccccgtgcgtctggcccgacagctgcgcgagatgggctgcaaggcctgcttcgccgtgcgtccggccgaaccggtcgagccgatcttcgatatcctcgacgagttcgacatggtcctcatcatgaccgttgagcccggcttcggcggccagaagttcctcgacaaccagatggccaaggtccgccgcctgcgcgatgagatcacccgccgtggcttgaagacccgcatccaggtcgatggcggcgtgagccccaagaccgcgcacatcgtggccgaggccggcgccgacgtgctcgttgccggttccgccgtgtacggcgccgagaatcccgcccaggccatcgacgacatccgcaccaaggccgaggccgcgttcaaggcctgagctccaagcctgaaccgcaatccacctttcatccataaccgcaagaaaagaatctgaatcacatgaagacgtttgaatccctgttcgccgaactgtccgaaaaggcccagacccgccccgaaggctccctgaccgtcgacgagctcgacaagggcacccacttcatcggcaagaagatcatcgaagaggccggcgagacctggatggccgccgaatacgagggtgcggaccgcaccgccgaggaaatgagccagctgctctaccacgtccaggtcatgatgatcaagcacggcctgatgcttgaggacgtctacaagcacctgtgagaggaacgcaaatgctgagaatcgcagtgcccaacaagggcatgctatccgaacccgcgtggaacatgctggccgaggccggctaccgtctgcgcaccaaccctcgccagctggtcgtgcaagatcccgacaatggcatcgagctgttctacctgcgtccgctcgatatcgccgtatacgtgggccgcggcgccatcgacgtcggcatcaccggccaggatttgctcaagaactccggtaccgccgcgctcgagcacatgccgctcggctttggtgcctcgaccttccgtttcgccgcaccgaacgaatccccgatcaccactctggaggatgttcagggcaagcgcgtggccaccacattcgataagctcgtacacgactatctggtcgagcacggcatccaggccgagaccatccacctggacggtgcggtcgaatcctccgtgcagctgggcgtggccgacctcatcgccgacgtggtctccaccggcaccaccctgcgcaacgccggcctgcgcgtgtttgccgaaccgctcatgcactccgaagcctgcctgattcgctcgccgcgtctgaacgagcaggatccgcgtctggccgtgctgacccgccgtctgcaaggcgtgctcactgcacatcagtatgtgctcatggactatgacattccgatcagcaaggtcgccgccgccgtggccgtgacccccggctttgaaagcccgacgatctccccgctgcacgacaaacagtggaacgccgtgcgagtcatggttcccaaggccaaggtcaaccagctgatggatgatttgtacgaagtcggcgcacgcggcatcatcgttaccgctctgcaagcctcccgcatgtagactgttagtcgatatgaccaaccagaaagtcaacgccagatacagtccggaagcacgtgacatctatttcaccgtgcccaatttgatcagcgcgctgcgaatcatctcgattcctttcatcagcgtgctgatctccaagcacgagatgattgcggcgctagccctgatcgccatttcctcggcttcggacggactcgacggcatcatcgcgcgcagattcaaccaagtgagcaagatcggtcagattcttgatccgatcgccgaccgactgctcattttctgctcgattctggccctcagcgtcgccggcatcatcccatggtggatgctgattatcgtgggactgagggatctgtggatggcgattcaggtgctatggcttgcccagtacggttatggtccgctgcccgtgcatttcgtgggcaaggctggtaccgcgctgctgatgatttccatcgtcggtcttattttcgccgatttgggcaccagtacgttcttccacttgctctacatcgccgcgctggccgccggcatctggggcatcgccatgtattggctcgccggatatatctataccaagcagggcgtcggattgctacgcaaggaactgggggagaagtatggcgcttgaggccacggccccggtctcgttccccatacccaaggagaatgagccggtacgacgccgcgccgtgttctcccactcagtccgaggcgcggaatcgcatcatgcgctttccccggatgacgccgccgccatccgcaccagacgtcgccgtaaaaccaacgacgattcgcttcagctcatcgatgatcttgtcaatcgtccgatggatccgatgttctccgactcacgactggtccatgagcatcgttcgaccttctccatctggtttaatcgcatcgtcgtattcatcatctgcgtcggcgttggctttgcctgcagcctattcgtgcaacagttgcaatccgatccgcgtaagcaggtacggcagactttggccacgcaattggagaatcgcaactcgcagatagacgaactcaccacggacgtcaataatttgcgatcccaagttgacgaacagtccaagaaaatctccggcagcgtgaaaagcgacacgcttatccaagacgaaatggtcaatggtgccacggtggtcgaaggcgaaggaatcaccatgacgctggccgatccaatcgcggcaagccagtcggatcaatcctcctcgacgagaatcggcacctccacgaacatccgagtcatcaccgatctggatctgcaacaactggtctccctgatgtttcaaaacggagccgaagccattgccatcaacggtaataggctcggcgcgcaaacctcgatacgcaaggccggcgggcatattctcatcggcatgaccgcgatacaaagcccctataccattgaagccataggcgataagagcgccttggccgaagcgatgggggagaagagacttgcaagtctttacgattccttcaaggaagccggtatctacccgcaggtgagcaaatccaattcgattacacttgaggcagcagtcactggcgaagtgaagtacgcggaaaggaatgaataatggcagccgttctgggactgatcatcggcgtcgtcatcggcgtgttcgtcaagccggacattccgatcatcgtgcagccatatctgccgattatggtggtcgctgctcttgacgccctgctgggtgccgcgcgagcctatttcgagcgcagcttctccgaccgcgtgttcgtgatctccttcctcgccaacgtggtgacggcaacactgctcgtgttcctcggcaaccagctcggcgtcggttcgcagctgcagacagccgtcatcgtcgtactcggcatccgcatcttctccaacgtgtccgcgatcagacgcttcatcttccgaggctgacaagggtactgacgtatggcacgtaaagcacaatcagacaacatgctggagaaaatgcgcgaccagcatgtacaagacaaggtcaacgaccggatggaaaccgggtcgtttcccacggtgcgtaagaagccccggaaggatctcaaccgtgccagcaacaaatcacggttactatcctcgattctcatcgctctgatgtgcgcgttgttgggtttcgcctacatgagccagatcaataacactaaatccacgtacgaaacgatggacgagagtgaactggtaaggctgctgaacgagtcgaatacgcagatctccaatctcgagcagcgtaaaacccagttgaacagccagctcaactcgctgaaatcggcggctaacgagcaggagcaggcgcgtaagatcgccaagcaaaacgaggagaccagcggcttgatttccggcagactcccggcaaagggtcaaggcgtgaccatccgaatcggacgaggctcgacgactaaagtggacgcctcaatcatgttcaaccttatcgaggaacttcgcaatgccggtgccgaggtaatcgccatcaataacgtgcgcgtcatcacctccacctacattcaggacgccgaggaaggtttgattgtggatggcaccaccatcaagcccacatacacagtgaaggccattggcaatccgcaggaactgtccaacgcagtcgatatcgccggcggcgtgggtgctcagctccaggtgaaatacgggtccaacgtcaacgtacagccttctgacagcatcattatcgacgaagtacgcgaagctacgcaaaaccagtatgcaaagacggtagaataggagattatgaccaacccgattcctagcgcaggcgaaaccaccattatcggcctgcccgcgattaatgtactgcccattaccaccaccggcgatcgaccgctgactcaagaggatctggacaccatcaccagattgtccgagggaacggcattgctgatttccgccaggggagcggtctcaggttctcgttacttgcttgacgaggatgaaatcaccgtcggccgtgatccgcgagctgatattctgctcgacgactccaccgtatcccgtcagcatgccgtgttccgcagggtcaacggtcagttctttgtggttgacgcaggaagtctgaacggcacctacgtgaaccgtcagcgtgttgatcaggcgacgctgaagaacggcgacgaaatcatgatcggtaaattccgcctcgtgttcttcacgaaatccgccattatttcccaatagtccacacccagcacggggttagactgattgcagaaattgcaatcatgtgattacaccagtgtgagtcatatgcgagacacgcatgagttaggggagtgccatgggacagaccgggctgcatcttcatgtttcgcttgaggaccgtcagaatctgaacgctgacgcgattcagggggagttgttctccaatgtcgatactgaggagatcaagcgcggctaccgtggcactgtggcctccaaggtggccggcatcacgtaccgacagctcgattattgggcacgcaagcagattgttgagccgtccatcacaccgtctcatggctctggttcacgacgattatactcgtttaaggatgtggtgattctcgctgtatccaagaagctgcttgatgccggtgtgaatctgcagaacgtgacggcggctatcggattcttgactcaacgcagcaccgatcagctggccaatgtgaccatcatgtgcgatggtcaaaacgtacatgaatgcacaaccagcgaacagatgctcgaactgttgcaaagcggtaaggcagtgttcgccgtgtcggtgggttcgttgtggcaccagattgagacggccttggaacaggaagaatatattgatcttgaggctaagccgctgacgattgccacgggccgtccgattgatgaactgactgccatgaggatgcgcaagaagctcgaggcacagcgcttgcaacgcgcaaccgcctgatacatgtatggttgttggcgacttgccggctttggtcggcaggtcgctttgttgtatgtgttgcttttgttgcctgccatcttatgtttttatatgttgcggtgattattatgactgattggaggaccgggtgaacgggattgttgtcggattgttgccgggcgttctgtggatggtcgccgtcatctttgctgtgtccatcatcactataacggtcagccgaggccatctgttcacgccgaaacgccggcgaccgccggtcgatccggtcgactggtcgatggtgaaaacgcatttcatgtcgtttgcggcggcgctgattccgtttcccgtgttgacgtttacagcggatttgatggatgctcgcatgctcgcgttctacgaccacgcgcaattgcccggagcaatcatcatattcgtgctggtgctgctggaacttgtcgccatgtatctgcaggcacgcaacgcctcagaaaccgaaatggacaagcgtttgggcgttgcttctcaccggaataaggatgatgttgcgaagtagccgattctctgcggcgaggctaatccgcagctagatactactggttcggctaaaatcaccacatactattaaccgataatgtacgctgtgcgacagtgatttgaccggacttcaggaatggctttatttcaacggtttgaagccatgctaatcagcggtttggaccggagcctgccaaaggtagccaaacccgtatatgacaattggctatgggggtggagcgacccacggcctcagcttgcattgccctttgccgcgggtcggtttcatcatacccggcactcctgcccggcgagtttcgccaagctggcgtcgggcacatcgaaccacgccccgcgtttggcgggcgacaccagctccgcgcccaacccgtgccccggcgtccatctgcggacgagccccgatgcgtcgcggtccaccatgccgtgctccgacctccagaagccctgccattccggcgtctcgcggctcctgtcgaagtcgaagcagccatccctcagaagggccatgagatcgggttcgacgggttcg
